(19) United States
(12) Patent Application Publication
(10) Pub. No.: US 2011/0287957 A1
(43) Pub. Date: Nov. 24, 2011

(54) METHODS AND KITS FOR DIAGNOSING COLORECTAL CANCER

(75) Inventors: Andre Rosenthal, Ludwigsfelde OT Groben (DE); Bernd Hinzmann, Berlin (DE); Tobias Mayr, Berlin (DE); Hans-Peter Adams, Potsdam (DE)

(73) Assignee: Signature Diagnostics AG, Potsdam (DE)

(21) Appl. No.: 13/111,514

(22) Filed: May 19, 2011

Related U.S. Application Data
(60) Provisional application No. 61/346,270, filed on May 19, 2010.

(30) Foreign Application Priority Data
May 19, 2010 (EP) 10075210.4

(51) Int. Cl. C40B 30/04; C12Q 1/68; C40B 40/06

(52) U.S. Cl. 506/9; 506/16; 435/6.12; 435/6.14; 435/6.18; 435/6.17

(57) ABSTRACT

The invention pertains to a method for early detection and screening of colorectal cancer in human subjects based on RNA isolated from blood obtained from said subject. According to the invention, the expression of at least 3, 5, 8, 30, 60, 102, 202, 55, 1002 or 1002 RNAs listed in Tables 1-15 are measured. Using the invention, an accurate and noninvasive screening and diagnosis tool for colorectal cancer is provided with a sensitivity of at least 80% and a specificity of 85% that has high clinical utility and the potential for broad adoption.

### PRIORITY

[0001] This application claims the benefit of U.S. Provisional Application No. 61/346,270, filed May 19, 2010, and claims priority to EP 10075210.4, filed May 19, 2010, each of which is hereby incorporated by reference in its entirety.

### FIELD OF THE INVENTION

[0002] The present invention pertains to methods and kits for screening, diagnosing, and detecting colorectal cancer in human subjects. More particularly, the present invention relates to methods and kits for screening, diagnosing and detecting colorectal cancer based on the presence or absence of one or more RNA expression signatures in RNA expression profiles from blood.

### BACKGROUND OF THE INVENTION

[0003] Colorectal cancer (CRC) is the second-leading cause of cancer-related deaths in the United States. Each year, approximately 150,000 people are diagnosed with CRC and almost 60,000 people die from the disease.

[0004] CRC arises from the mucosa forming the inner lining of colon and rectum. Like any other mucosa, it needs to be regenerated and proliferates at a high rate (about one third of all fecal matter are mucosa cells), and is thus susceptible to abnormal growth, i.e., neoplasia and/or dysplasia. In fact, abnormal colonic mucosal growth can be detected in about 40% of all persons over the age of 55 years. The development of neoplasia into cancer is a well-established concept in the biomedical sciences; and is termed adenoma-carcinoma-sequence (ACS).

[0005] Pathologists classify abnormal mucosal growth into four categories with increasing severity: 1) Low-grade intraepithelial neoplasia (LIEN) or adenoma, which occurs in more than 30%; 2) high-grade intraepithelial neoplasia (HIEN) or advanced adenoma, occurring in more than 2%; 3) carcinoma in situ (CIS or pTis), where the cancerous growth is still confined to the mucosa; and 4) CRC, where the cancerous growth has invaded the submucosa. CRC is diagnosed with an incidence rate of about 1% in persons over the age of 55 years with an average risk for the disease. The lifetime risk of developing CRC is estimated to be 1 in 18 persons (Cancer Statistics 2009: A Presentation From the American Cancer Society; 2009, American Cancer Society, Inc.).

[0006] After primary diagnosis of CRC, the spread/stage of the disease is classified according to the guidelines set forth by the “Union International Contre le Cancer” (UICC). UICC-stage 0 includes CIS only. UICC-stages I and II are comprised of the localized stages, whereas UICC-stage III describes CRC where tumor cells have metastasized into regional lymph nodes. The worst case is UICC-stage IV; it describes CRC which has metastasized into other organ(s), usually liver (˜75%), peritoneum (˜22%), and/or lung (˜21%).

[0007] In 2008, the cancer registry in the state of Brandenburg/Germany documented 1591 patients with newly diagnosed CRC and stage information. They were staged into UICC-stage I: 22.6%, UICC-stage II: 29.2%, UICC-stage III: 28.9%, and UICC-stage IV: 19.0%. Relative five year survival-rates by UICC-stage were: I: 90.5%, II: 78.8%, III: 60.6%, and IV: 9.3%.

[0008] The U.S. National Institutes of Health (http://seer.cancer.gov) reported for the period 1999-2006 216,332 patients diagnosed with CRC with localized disease (UICC-stage I and II): 39%, regional disease (UICC stage III): 37% and distant disease (UICC-stage IV): 19%. Relative five year survival-rates by stage were: localized (UICC-stages I and II): 90.4%, regional (UICC stage III): 60.5%, and distant (UICC-stage IV): 11.6%. However, the statistics of the U.S. National Institutes of Health do not cover the U.S. population, while the data from the cancer registry in the state of Brandenburg/Germany do.

[0009] Current technologies to detect mucosal neoplasia (polyps/adenoma) and CRC can be categorized into three classes:
[0010] I) in-vitro diagnostics (P/Ds)—a specimen/sample (blood, stool, or urine) is taken from the test person and analyzed for one or more biomarkers as surrogate markers for colorectal neoplasia/cancer. Exemplary tests include guaic fecal occult blood test (gFOBT) or immunological fecal occult blood test (iFOBT), detection of tumor DNA-chains (deoxyribonucleic acid chains) in stool samples, detection of specific methylated tumor DNA-chains in stool samples, detection of specific free methylated DNA-chains in blood plasma, detection of elevated and/or lowered amounts of specific proteins in blood samples, or detection of elevated and/or lowered amounts of specific RNA-chains in blood samples;
[0011] II) imaging methods without interventional capabilities such as X-ray, double contrast barium enema (DCBE), video capsule endoscopy, or computed tomographic colonography;
[0012] III) imaging methods with interventional capabilities such as flexible sigmoidoscopy, colonoscopy, laparoscopy, or open surgery.

[0013] To obtain a definitive diagnosis of colorectal neoplasia/cancer, an invasive procedure is typically required. The procedure requires taking a sample of the visibly abnormal tissue growth (neoplasia/cancer) and having a person of skill in the art of pathology examine this sample, who will then decide (diagnose) whether this sample was taken from a neoplasia/cancer or not (Sternberg's Diagnostic Surgical Pathology (5^{th} Edition). Mills S E, Carter D, Greenson J K, Reuter V, Stoler M H. Lippincott Williams & Wilkins (LWW), 2009).

[0014] In response to the high incidence and mortality rate of patients with CRC, the American Cancer Society issued the following statement: “There are significant updates to the guidelines for colorectal cancer screening. Two new tests are now recommended as options for colorectal cancer screening. They are stool DNA (sDNA) and computerized tomographic colonography (also known as “virtual colonoscopy”). For the first time, screening tests are grouped into categories based on performance characteristics: those that primarily detect cancer early and those that can also detect precancerous polyps. Tests that primarily detect cancer early are fecal (stool) tests, including guaiac-based and immunochemical-based fecal occult blood tests (gFOBT & FIT), and stool DNA tests (sDNA). Tests that detect both precancerous polyps and cancer include flexible sigmoidoscopy, colonoscopy, the double contrast barium enema, and computerized tomographic colonography (also known as virtual colonoscopy), it is the strong opinion of the expert panel that colon cancer prevention should be the primary goal of colorectal cancer screening. Exams that are designed to detect both early cancer and precancerous polyps should be encouraged if resources are available and patients are willing to undergo an invasive test,” (Cancer Statistics 2009: A Presentation From the American Cancer Society; ©2009, American Cancer Society, Inc.), A review of current CRC screening in Europe can be found in: Zavoral M, Suchanek S, Zavada F, Dusek Muzik J, Seifert B, Fric P. Colorectal cancer screening in Europe. World J Gastroenterol, 2009 Dec. 21; 15(47):5907-15.

[0015] However, each of the tests for the detection of mucosal neoplasias (polyps/adenomas) and CRC have limitations.

[0016] For example, the imaging methods (with or without interventional capabilities) require preparation time for the test subject, specialized equipment, and specialized medical personnel. Therefore, colonoscopy and flexible sigmioidoscopy are used only in wealthy economies such as the U.S., Switzerland, and Germany as primary screening tools for early detection of CRC. Even in the U.K., France, Italy or Spain, IVDs, in most instances gFOBT, are used as a primary screening tool for colorectal cancer. Only patients with a positive IVD test result are referred to colonoscopy.

[0017] Recently, a screening program for CRC using gFOBT was initiated in the United Kingdom. All eligible persons were contacted via mail, and a test kit was delivered. Yet, just about 50% of all contacted people complied. The willingness of patients to undergo gFOBT testing in Germany has dropped from 8.2 million tests in 2001 to 4,6 million tests in 2007 (Projekt wissenschaftliche Begleitung von Früherkennungs-Koloskopien in Deutschland, Berichtszeitraum 2008-6. Jahresbericht, im Auftrag des GKV—Spitzenverbands und der Kassenärztlichen Bundesvereinigung Version 1,1, Stand: 19. Februar 2010, Zentralinstitut für die kassenärztliche Versorgung in der Bundesrepublik Deutschland). In the U.S., about 24.01% of all eligible patients underwent gFOBT-screening in 2000, in 2005 the rate dropped to 17.07% (U.S. National Cancer Institute, http://progressreport.cancer.gov).

[0018] Thus, the clinical utility of all stool-based CRC-screening is limited because individuals in the CRC screening population are simply unwilling to take the test repeatedly, unless they have no other choice.

[0019] The U.S. National Institutes of Health reported that compliance with endoscopy (flexible sigmoidoscopy or colonoscopy) is dependent on the education and income of the population; by 2005 37.66 of persons with less than high school education, 46.27% of persons with high school education, and 57.52% of persons with higher than high school education had ever had an endoscopy (not defined to CRC screening purposes).

[0020] Colonoscopy is an invasive procedure which is not only inconvenient but may be associated with health risks. Approximately 3% of the individuals over 55 years undergoing colonoscopy for screening purposes have heavy bleeding incidences. Additionally, in 2 of 1,000 individuals perforation of the colon occurs. Emergency operations must be performed to correct both heavy bleading and perforation. As a result, 2 of 10,000 individuals who undergo colonoscopy will die from these complications. The relatively high rate of accidents in combination with the time consuming bowel cleaning procedure has led to a low adoption of colonoscopy as a screening tool even in those countries where colonoscopy is paid by the health insurances.

[0021] Thus, the overall clinical utility of all endoscopy-based CRC-screening is also limited, because it is only offered in a few countries, a high percentage of the CRC screening population is unwilling to take the test, and because of the complications associated with the test.

[0022] Therefore, the clinical utility of a test for detection of colorectal neoplasia depends not only on its performance characteristics, i.e., sensitivity and specificity, but on acceptance by the patients, the medical community, and, of course, the private or public health care system that has to pay for the test.

[0023] A blood test would have the highest chance of acceptance by patients, at least in Europe, the U.S., and Japan. In terms of the medical community, a blood test would also have the highest chance of acceptance, in particular if sensitivity and specificity are convincingly high, if there is no need for preparation time, if the blood need not be processed immediately but can be shipped to a central laboratory, if the test is accepted by local regulatory authorities, and if the test is commercially available. A high level of acceptance of a test can only be achieved if the test is endorsed by CRC screening guidelines and by the general health care system.

[0024] A blood-based test for screening, detecting, or diagnosing colorectal cancer with high sensitivity and high specificity is therefore desirable. Further, the identification of biomarkers, such as RNAs for use in such a minimally-invasive test would fulfill a longstanding need in the art.

### SUMMARY OF THE INVENTION

[0025] The present invention provides methods and kits for diagnosing, detecting, and screening for colorectal cancer. Particularly, the invention provides for preparing RNA expression profiles of patient blood samples, the RNA expression profiles being indicative of the presence or absence of colorectal cancer. The invention further provides for evaluating the patient RNA expression profiles for the presence or absence of one or more RNA expression signatures that are indicative of colorectal cancer.

[0026] In one aspect, the invention provides a method for preparing RNA expression profiles that are indicative of the presence or absence of colorectal cancer. The RNA expression profiles are prepared from patient blood samples. The number of transcipts in the RNA expression profile may be selected so as to offer a convenient and cost effective means for screening samples for the presence or absence of colorectal cancer with high sensitivity and high specificity. Generally, the RNA expression profile includes the expression level or “abundance” of from 5 to about 3000 transcripts. In certain embodiments, the expression profile includes the RNA levels of 2500 transcripts or less, 2002 transcripts or less, 1500 transcripts or less, 1002 transcripts or less, 502 transcripts or less, 250 transcripts or less, 102 transcripts of less, or 50 transcripts or less.

[0027] In such embodiments, the profile may contain the expression level of at least 3 RNAs that are indicative of the presence or absence of colorectal cancer, and specifically, as selected from Table 1, or may contain the expression level of at least 5, at least 8, at least 10 or at least 30 RNAs selected from Table 1. Where larger profiles are desired, the profile may contain the expression level or abundance of at least about 60, at least 102, at least 202, at least 502, at least 1002 RNAs, or 2002 RNAs that are indicative of the presence or absence of colorectal cancer, and such RNAs may be selected from Table 1. The identities and/or combinations of genes and/or transcripts that make up or are included in expression profiles are disclosed in Tables 1-13. In particular embodiments, the genes or transcripts include those listed in Table 8 or Table 13.

[0028] In some embodiments, the profile further comprises, in addition to the expression level of RNAs from Table 1, the expression level of one or more RNAs listed in Table 14. Exemplary embodiments of such “combination” expression profiles are shown in Table 15.

[0029] Such RNA expression profiles in accordance with this aspect may be evaluated for the presence or absence of an RNA expression signature indicative of colorectal cancer. Generally, the sequential addition of transcripts from Table 1 to the expression profile provides for higher sensitivity and/or specificity for the detection of colorectal cancer. For example, the sensitivity of the methods provided herein may be at least 75%, or at least 80%, or at least 85%, or at least 90%. The specificity of the method may be at least 85%, or at least 90%.

[0030] In a second aspect, the invention provides a method for detecting, diagnosing, or screening for colorectal cancer. In this aspect the method comprises preparing an RNA expression profile by measuring the abundance of at least 3, at least 5, or at least 8 RNAs in a patient blood sample, where the abundance of such RNAs are indicative of the presence or absence of colorectal cancer. The RNAs may be selected from the RNAs listed in Table 1, and optionally with additional RNAs selected from Table 14, and exemplary sets of such RNAs are disclosed in Tables 2-13 and 15. The method further comprises evaluating the profile for the presence or absence of an RNA expression signature indicative of colorectal cancer, to thereby conclude whether the patient has or does not have colorectal cancer. The method generally provides a sensitivity for the detection of colorectal cancer of at least about 75%, while providing a specificity of at least about 85%.

[0031] In various embodiments, the method comprises determining the abundance of at least 30 RNAs, at least 60 RNAs, at least 102 RNAs, at least 202 RNAs, at least 502 RNAs, at least 1002 RNAs, or of at least 2002 RNAs chosen from the RNAs listed in Table 1, and as exemplified in Tables 2-13, and optionally one or more RNAs from Table 14, as exemplified in Table 15, and then classifying the sample as being indicative of colorectal cancer, or not being indicative of colorectal cancer.

[0032] In other aspects, the invention provides kits and custom arrays for preparing the gene expression profiles, and for determining the presence or absence of colorectal cancer.

### BRIEF DESCRIPTION OF THE FIGURES

[0033] FIG. 1 is a graph showing various RNA colorectal cancer signatures as a function of performance. The x-axis shows the number of RNAs in each particular signature subset. The subset length is varied along the x-axis from 8 to 202 (the full set). The y-axis shows performance of the subset. Performance is shown in terms of sensitivity (percentage of real carcinomas that were properly classified; lower values (squares)) and specificity ((percentage of real health controls that were properly classified; upper values (diamonds)) scaled from 50% to 100%. These are retrospective examinations of the 202 set. As the figure shows, reduced sets compared to the full set appear to have excellent performance. For each subset size, the performance was measured for 1000 randomly chosen subsets based on leave-16%-out runs: the subset is trained on 84% and applied to the remaining 16%. The average performance over all the 16% tests is shown.

[0034] FIG. 2 is a graph showing the performance of RNA colorectal cancer signatures, each having 202 RNAs. Various RNAs from the first signature in Table 8 (first column) were replaced with random subsets of RNA markers from Table 1 that are not listed in Table 8. The number of replacements is given along the x-axis and performance is given on the y-axis. Performance of the method of detecting CRC is shown in terms of sensitivity (percentage of real carcinomas that were properly classified; lower values (squares)) and specificity (percentage of real health controls that were properly classified upper values (diamonds)) scaled from 50% to 100%. For each subset size, the performance was measured for 1000 randomly chosen subsets based on leave-16%-out runs: the subset is trained on 84% and applied to the remaining 16%. The average performance over all the 16% tests is shown. As the figure shows, replacements do not appear to alter the performance of the signature given in Table 8.

[0035] FIG. 3 is a graph showing the performance of RNA colorectal cancer signatures. The signatures each contain the RNAs from Table 8, and also include additional RNAs from Table 1 that are not in Table 8. The resulting signature contains the original 202 elements and the new elements. The extension size (original length+length of addition) is varied along the x-axis from 202 to 2002. Performance (y-axis) is shown in terms of sensitivity (percentage of real carcinomas that were properly classified; lower values (squares)) and specificity ((percentage of real health controls that were properly classified; upper values (diamonds)), scaled from 50% to 100%. These are retrospective examinations of the 202 set. As the figure demonstrates, larger sets compared to the set with 202 RNAs appear to have excellent performance. For each subset size, the performance was measured for 1000 randomly chosen subsets based on leave-16%-out runs: the subset is trained on 84% and applied to the remaining 16%. The average performance over all the 16% tests is shown.

[0036] FIG. 4 is a graph showing the performance of RNA colorectal cancer signatures of 50, 100, 200, and 400 RNAs, wherein the RNAs are all intergenic sequences. The signatures each contain RNAs from Table 13. The performance of, from left to right, the first 50, 100, 200, and 400 RNAs is shown. Each light column (on the left of each pair of two columns) represents the sensitivity, each dark column (on the right of each pair of two columns) represents the specificity for each signature.

### DETAILED DESCRIPTION OF THE INVENTION

[0037] The invention provides methods and kits for screening, diagnosing, and detecting colorectal cancer in human patients. “Colorectal cancer” (CRC) refers to both colorectal adenoma and colorectal carcinoma.

[0038] A colorectal adenoma is characterized by atypical growth of epithelial cells in mucosal tissue, i.e. neoplasia. Hypercellularity with enlarged, hyperchromatic nuclei, varying degrees of nuclear stratification, nuclear polymorphisms, and loss of polarity are the histologically defining features. In colorectal adenoma, this abnormal growth is confined to the mucosa; a synonym of adenoma is intraepithelial neoplasia (IEN). If this atypical growth of epithelial cells extends/invades through the muscularis mucosae, the muscle layer under the mucosa, with destruction of the usual anatomical wall, the pathologist terms this atypical growth a colorectal carcinoma.

[0039] The distinction between high-(HIEN) and low-grade (LIEN) intraepithelial neoplasia refers to the extent of the defining features.

[0040] A patient with CRC is traditionally defined as having undergone surgery/resection of colon and/or rectum for CRC and whose resection specimen has undergone examination by a board certified pathologist, who has diagnosed a colorectal carcinoma as defined above. A patient with CRC may have undergone complete colonoscopy of colon and rectum during which the examinating physician has taken a sample of suspect tissue, which in turn has undergone examination by a board-certified pathologist, who has diagnosed a colorectal carcinoma as defined above. A synonym for a patient with CRC is “CRC-case” or simply “case.”

[0041] A patient without CRC is traditionally a person that has undergone complete colonoscopy during which the examining physician, an endoscopist, has noted no abnormal tissue growth. A synonym for a patient without CRC is “non-CRC-case” or “control.” This however does not exclude that this person has any other carcinoma.

[0042] A patient with HIEN is traditionally a person that has undergone surgery/resection of colon and/or rectum for suspected CRC and whose resection specimen has undergone examination by a board certified pathologist, who has diagnosed a high-grade intraepithelial neoplasia as defined above. Alternatively, a patient with HIEN may be a person that has undergone complete colonoscopy of colon and rectum during which the examinating physician has taken a sample of suspect tissue, which in turn has undergone examination by a board certified pathologist, who has diagnosed a high-grade intraepithelial neoplasia as defined above. A synonym for a person with HIEN is “HIEN-case” or “HIEN.”

[0043] A patient with LIEN is traditionally a person that has undergone surgery/resection of colon and/or rectum for suspected CRC and whose resection specimen has undergone examination by a board certified pathologist, who has diagnosed a high-grade intraepithelial neoplasia. Alternatively, a patient with LIEN is a person that has undergone complete colonoscopy of colon and rectum during which the examinating physician has taken a sample of suspect tissue, which in turn has undergone examination by a board certified pathologist, who has diagnosed a low-grade intraepithelial neoplasia as defined above. A synonym for a person with LIEN “is LIEN-case” or “LIEN.”

[0044] As disclosed herein, the present invention provides methods and kits for screening patient samples for those that are positive for CRC, that is, in the absence of colonoscopy and/or surgery or resection of colon or rectum with pathologist's examination.

[0045] The invention relates to the determination of the abundance of RNAs to detect a colorectal cancer in a human subject, wherein the determination of the abundance is based on RNA obtained (or isolated) from whole blood of the subject or from blood cells of the subject. For example, the sample may be obtained using PAXgene (QIAGEN) or an equivalent RNA isolation system.

[0046] In various aspects, the invention involves preparing an RNA expression profile from a patient sample. The method may comprise isolating RNA from whole blood, and detecting the abundance or relative abundance of selected transcripts. As used herein, the terms RNA “abundance” and RNA “expression” are used interchangeably. The “RNAs” may be defined by reference to an expressed gene, or by reference to a transcript, or by reference to a particular oligonucleotide probe for detecting the RNA (or cDNA derived therefrom), each of which is listed in Table 1 for 2002 RNAs, and Table 14 for 750 RNAs, that are indicative of the presence or absence of colorectal cancer. Specifically, Table 1 lists such RNAs by probe ID, gene symbol, and Transcript ID, and such nucleotide sequences are publicly accessible and are each hereby incorporated by reference. Table 1a gives the fold change in expression levels for the genes/transcripts listed in Table 1, when measured in 64 control cases, and 55 CRC positive cases. Table 14, listing RNAs that can be measured in addition to the RNAs of Table 1, lists RNAs by probe ID, gene symbol, and Transcript ID, and such nucleotide sequences are publicly accessible and are hereby incorporated by reference.

[0047] The number of transcripts in the RNA expression profile may be selected so as to offer a convenient and cost effective means for screening samples for the presence or absence of colorectal cancer with high sensitivity and high specificity. For example, the RNA expression profile may include the expression level or “abundance” of from 5 to about 3000 transcripts. In certain embodiments, the expression profile includes the RNA levels of 2500 transcripts or less, 2002 transcripts or less, 1500 transcripts or less, 1002 transcripts or less, 502 transcripts or less, 250 transcripts or less, 202 transcripts or less, 102 transcripts of less, or 50 transcripts or less. Such profiles may be prepared, for example, using custom microarrays or multiplex gene expression assays as described in detail herein.

[0048] In such embodiments, the RNA expression profile may contain the expression level of at least 3 RNAs that are indicative of the presence or absence of colorectal cancer, and specifically, as selected from Table 1, or may contain the expression level of at least 5, at least 8, at least 10 or at least 30 RNAs selected from Table 1. Where larger profiles are desired, the profile may contain the expression level or abundance of at least 60, 102, 202, 502, 1002 RNAs, or 2002 RNAs that are indicative of the presence or absence of colorectal cancer, and such RNAs may be selected from Table 1. In certain embodiments, the expression profile further comprises the expression level of one or more RNAs from Table 14. Such RNAs may be defined by gene, or by transcript ID, or by probe ID, as set forth in Tables 1 and 14.

[0049] The identities of genes and/or transcripts that make up, or are included in exemplary expression profiles are disclosed by the combinations of genes/transcripts identified in Tables 1-15. As shown herein, profiles selected from the RNAs of Table 1 and optionally together with RNAs of Table 14 support the detection of colorectal cancer with high sensitivity and high specificity. An exemplary selection of RNAs for the RNA expression profile are shown in Tables 8 and 15.

[0050] In some embodiments, the expression profile includes the abundance of one or more intergenic RNAs. As used herein, “intergenic RNA” or “an intergenic RNA sequence” is a transcript whose abundance is determined by a probe in Table 1 that does not correspond to a known gene or transcript. Such sequences are listed in Table 13.

[0051] Table 1 shows a list of 2002 RNAs that are differentially expressed in several human subjects with colorectal cancer in comparison to subject without colorectal cancer. Each marker is characterized by a Sequence number, by an Affymetrix probe set ID, and, if applicable, a HUGO ID and a Ref. Seq ID. The first 202 RNAs shown also comprise an exemplary subset of RNAs, and are also shown in Table 8. Table 1a further includes fold change values between 119 CRC and control samples for the sequences listed in Table 1.

[0052] Table 2 shows 5836 exemplary sets of 3 RNAs of the RNAs listed in Table 1.

[0053] Table 3 shows 3946 exemplary subsets of 5 RNAs of the RNAs listed in Table 1.

[0054] Table 4 shows three exemplary subsets of 8 RNAs of the RNAs listed in Table 1.

[0055] Table 5 shows three exemplary subsets of 30 RNAs of the RNAs listed in Table 1.

[0056] Table 6 shows three exemplary subsets of 60 RNAs of the RNAs listed in Table 1.

[0057] Table 7 shows three exemplary subsets of 102 RNAs of the RNAs listed in Table 1.

[0058] Table 8 shows three exemplary subsets of 202 RNAs of the RNAs listed in Table 1.

[0059] Table 9 shows three exemplary subsets of 502 RNAs of the RNA listed in Table 1.
[0060] Table 10 shows three exemplary subsets of 1002 RNAs of the RNAs listed in Table 1.

[0061] Table 11 shows three exemplary sets of RNAs based on substitution of 50 RNAs from a set of 202 RNAs (Sig. 1 of Table 8).

[0062] Table 12 shows three exemplary sets of RNAs based on substitution of 50 RNAs from a set of 1002 RNAs (Table 10).

[0063] Table 13 shows the subset of 408 intergenic RNA sequences.

[0064] Table 14 shows a list of 750 RNAs that are differentially expressed in several human subjects with colorectal cancer in comparison to subjects without colorectal cancer. Each marker is characterized by a SEQ ID NO., by a probe set ID, and, if applicable, a gene symbol and a primary transcript ID. According to embodiments of the invention, the abundance of at least 8 RNAs from the list of RNAs shown in Table 1 is measured, optionally together with a number of RNAs taken from the list of RNAs of Table 14. Examples of signatures consisting of RNAs from Table 1 and Table 14 are given in able 15.

[0065] Table 15 shows nine exemplary subsets consisting of RNAs listed in Table 1 and Table 14 (Combination signatures). It was found that any group of 8 or more RNAs from Table 1 can be supplemented by a subset of RNAs from Table 14. Combination signatures 1 through 9 of Table 15 show exemplary combinations of subsets from Tables 1 and 14 with at least 8 RNAs from Table 14. Three different sizes of sets were used:
[0066] less than 100 RNAs in combination signatures 1, 2, and 3
[0067] 100 to 500 RNAs in combination signatures 4, 5, and 6
[0068] 500 to 1000 RNAs in combination signatures 7, 8, and 9.

[0069] In each of these three size ranges, the first set was balanced in favor of RNAs from Table 1 regarding RNA numbers, the second was balanced between numbers of RNAs of Table 1 and Table 14, and the third set was balanced in favor of Table 14.

[0070] The following table shows the subset sizes for combination signatures 1 through 9 of Table 15:

| Combination | Number of RNAs | Number of RNAs |
|---|---|---|
| signature | from Table 1 | from Table 2 |
| 1 | 22 | 8 |
| 2 | 8 | 8 |
| 3 | 8 | 24 |
| 4 | 256 | 101 |
| 5 | 100 | 100 |
| 6 | 91 | 261 |
| 7 | 620 | 275 |
| 8 | 275 | 272 |
| 9 | 269 | 633 |

[0071] The performance of the Combination signature, determined as the average over 1000 test runs, where for each run 15 percent of the samples were randomly chosen as a test set, is as follows:

| Combination | | |
|---|---|---|
| signature | Sensitivity | Specificity |
| 1 | 80.8% | 85.4% |
| 2 | 83.6%, | 87.0% |
| 3 | 77.3%, | 81.5% |
| 4 | 88.5%, | 96.1% |
| 5 | 90.4%, | 92.3% |
| 6 | 88.6%, | 94.8% |
| 7 | 90.9%, | 96.3% |
| 8 | 87.8%, | 96.0% |
| 9 | 88.7%, | 95.9% |

[0072] Thus, in various embodiments, the abundance of at least 3, at least 5, at least 8, at least 30, at least 60, at least 102, at least 202, at least 502 or at least 1002 distinct RNAs are measured, in order to arrive at a reliable diagnosis of colon cancer. The set of RNAs may comprise, consist essentially of, or consist of, a set or subset of RNAs exemplified in any one of Tables 1-15. The term “consists essentially of” in this context allows for the expression level of additional transcripts to be determined that are not differentially expressed in colorectal cancer subjects, and which may therefore be used as positive or negative expression level controls or for normalization of expression levels between samples.

[0073] Such RNA expression profiles may be evaluated for the presence or absence of an RNA expression signature indicative of colorectal cancer. Generally, the sequential addition of transcripts from Table 1 to the expression profile provides for higher sensitivity and/or specificity for the detection of colorectal cancer. For example, the sensitivity of the methods provided herein may be at least 75%, or at least 80%, or at least 85%, or at least 90%. The specificity of the method may be at least 85%, or at least 90%.

[0074] In another embodiment, further RNAs than the RNAs listed in Table 1 can be used according to the invention, namely preferably the RNAs listed in Table 14. Put differently, the measurement of any combination of, for example, at least 8 RNAs listed in Table 1 can be combined with the measurement of any combination of at least 1 RNA listed in Table 14. In a preferred embodiment, the number of RNAs from Table 14 used is not greater than the number of RNAs used from Table 1. For example, when 8, 10, or 20 RNAs are used from Table 1, not more than 8, 10, or 20 RNAs of Table 14 are used in addition. In further preferred embodiments, at least 8, at least 10, at least 20, at least 60, at least 100, at least 200, or at least 500 RNAs from table 2 are used together with RNAs selected from Table 1.

[0075] The present invention provides an in-vitro diagnostic test system (IVD) that is trained (as described further below) for the detection of a colorectal cancer. For example, in order to determine whether a patient has colorectal cancer, reference RNA abundance values for colon cancer positive and negative samples are determined. The RNAs can be quantitatively measured on an adequate set of training samples comprising cases and controls, and with adequate clinical information on carcinoma status, applying adequate quality control measures, and on an adequate set of test samples, for which the detection is yet to be made. With such quantitative values for the RNAs and the clinical data for the training samples, a classifier can be trained and applied to the test samples to calculate the probability of the presence or non-presence of the colorectal carcinoma.

[0076] Various classification schemes are known for classifying samples between two or more classes or groups, and these include, without limitation: Naïve Bayes, Support Vector Machines, Nearest Neighbors, Decision Trees, Logistics, Articifial Beural Networks, and Rule-based schemes. In addition, the predictions from multiple models can be combined to generate an overall prediction. Thus, a classification algorithm or “class predictor” may be constructed to classify samples. The process for preparing a suitable class predictor is reviewed in R. Simon, Diagnostic and prognostic prediction using gene expression profiles in high-dimensional microarray data, British Journal of Cancer (2003) 89, 1599-1604, which review is hereby incorported by reference.

[0077] Although blood-based colon cancer screening has been attempted, each previously reported test is inherently limited in its respective specificity and sensitivity.

[0078] For example, Han et al., (Clin Cancer Res 2008; 14, 455-460; also: WO 2007/048074 A1) reported the discovery and validation of a five-gene expression (messenger RNA) signature for detection of colorectal carcinoma. Basically, the 37 candidate genes for the signature were selected from microarray data of 16 CRC cases and 15 controls. These 37 candidate genes were evaluated on a second set of 115 samples (58 CRC, 57 controls) using quantitative real-time PCR, validating 17 genes as differentially expressed. A further gene selection step using the PCR-results revealed the 5 gene signature, which was validated on a third set of 102 samples. The predictive power of these five genes which was evaluated using a fourth set of 92 samples, correctly identifying 88% (30 of 34) of CRC samples and only 64% (27 of 42) of non-CRC samples. The intermediate zone contained 16 samples. The performance parameters are compiled into table A.

TABLE A
Estimates and Exact Confidence Limits of
GeneNews ColonSentry ™ Test

| | | | | Exact Two-Sided | |
|---|---|---|---|---|---|
| | | | Esti- | 95% CI-Limits | |
| Performance Parameter | N_{c} | N | mate | Lower | Upper |
| Sensitivity | 30 | 34 | 0.88 | 0.725 | 0.967 |
| Specificity | 27 | 42 | 0.64 | 0.480 | 0.784 |
| Positive Predictive Value | 30 | 45 | 0.67 | 0.510 | 0.800 |
| Negative Predictive Value | 27 | 31 | 0.87 | 0.702 | 0.964 |
| Correct Classification Rate | 57 | 76 | 0.75 | 0.637 | 0.842 |

N_{c} = Number of correctly classified cases; CI = Confidence interval; Exact confidence limits were computed using the proc FREQ of the statistics program SAS.

[0079] Provided that patients of the last validation set were a random selection of the screening population, applying the performance on a hypothetical set of 10,000 patients with an incidence of one percent and computing the performance parameters of this test yields the results shown in table B.

TABLE B
Estimates and Exact Confidence Limits of
GeneNews ColonSentry ™ Test applied
to a Hypothetical Set of 10000 Persons

| | | | | Exact Two-Sided | |
|---|---|---|---|---|---|
| | | | Esti- | 95% CI-Limits | |
| Performance Parameter | N_{c} | N | mate | Lower | Upper |
| Sensitivity | 73 | 100 | 0.73 | 0.632 | 0.814 |
| Specificity | 6979 | 9900 | 0.70 | 0.696 | 0.714 |
| Positive Predictive Value | 73 | 2994 | 0.02 | 0.019 | 0.031 |
| Negative Predictive Value | 6979 | 7006 | 1.00 | 0.994 | 0.997 |
| Correct Classification Rate | 7052 | 10000 | 0.71 | 0.696 | 0.714 |

N_{c} = Number of correctly classified cases; CI = Confidence interval; Exact confidence limits were computed using the proc FREQ of the statistics program SAS.

[0080] However, based on the data provided by Han, 1,739 of 10,000 patients would have an “intermediate result”. In clinical practice, this would mean that these 1,739 patients would have to undergo colonoscopy to clarify their state. However, in this computation, these 1,739 patients were regarded as having been predicted as low risk. The main disadvantage of the ColonSentry test is its relatively low sensitivity of 73% and its low specificity of 70%. Applied to a screening population of 1 million individuals this means that 2,700 individuals with undetected CRC will not be detected by the test. In addition, 300,000 individuals (30%) are diagnosed as false positive which need to be followed up by colonoscopy. The combination of a relatively high false negative rate of 27% with a high false positive rate of 30% reduces the clinical utility of this test and impedes acceptance by the medical community and the screening population itself.

[0081] Epigenomics has a CE-marked test, Epi proColon®, in the market that measures the methylation status of the Septin-9 gene and is based on detection of free somatic tumor DNA in blood serum.

TABLE C
Estimates and Exact Confidence Limits of Epi proColon Test

| | | | | Exact Two-Sided | |
|---|---|---|---|---|---|
| | | | Esti- | 95% CI-Limits | |
| Performance Parameter | N_{c} | N | mate | Lower | Upper |
| Sensitivity | 69 | 103 | 0.67 | 0.570 | 0.759 |
| Specificity | 135 | 154 | 0.88 | 0.814 | 0.924 |
| Positive Predictive Value | 69 | 88 | 0.78 | 0.684 | 0.865 |
| Negative Predictive Value | 135 | 169 | 0.80 | 0.730 | 0.856 |
| Correct Classification Rate | 204 | 257 | 0.79 | 0.739 | 0.842 |

N_{c} = Number of correctly classified cases; CI = Confidence interval; Exact confidence limits were computed using the proc FREQ of the statistics program SAS.

[0082] The product performance figures of Epi proColon® displayed in Table C are cited from the companies' website (www.epigenomics.com). Table D shows the figures when the performance of the test is applied to a hypothetical screening population. Though the Epi proColon® test performs better than GeneNews' test in some performance parameters its overall sensitivity for all four stages of CRC is only 67%. This means that if 10,000 individuals are screened and the prevalence of CRC in the screening population is approximately 1% that 33 individuals with CRC will be missed by the test. Applied to a screening population of 1 million individuals (3.7% of the German screening population or 1.3% of the US screening population) 3,300 individuals with CRC will not be detected by the test. This high false negative rate limits significantly the clinical utility of the Epi proColon test. The false negative rate of patients with early stage CRC (UICC I and II) which will be missed is even higher.

TABLE D
Estimates and Exact Confidence Limits of Epi proColon
Test applied to a Hypothetical Set of 10,000 Persons

| | | | | Exact Two-Sided | |
|---|---|---|---|---|---|
| | | | Esti- | 95% CI-Limits | |
| Performance Parameter | N_{c} | N | mate | Lower | Upper |
| Sensitivity | 67 | 100 | 0.67 | 0.569 | 0.761 |
| Specificity | 8679 | 9900 | 0.88 | 0.870 | 0.883 |
| Positive Predictive Value | 67 | 1288 | 0.05 | 0.041 | 0.066 |
| Negative Predictive Value | 8679 | 8712 | 1.00 | 0.995 | 0.997 |
| Correct Classification Rate | 8746 | 10000 | 0.87 | 0.868 | 0.881 |

N_{c} = Number of correctly classified cases; CI = Confidence interval; Exact confidence limits were computed using the proc FREQ of the statistics program SAS.

[0083] Another blood-based test developed by OncoMethylome Science (Liege, Belgium) measures the methylation status of two Genes FOXE1 and SYNE1. The sensitivity of this two-marker test for all four stages of CRC is 56%, while the specificity is 91% (ESMO meeting, Berlin September 2009)

[0084] All three blood tests have a significant false negative rate and do not detect a significant number of patients with CRC. The ColonSentry test has a low specificity of 70% and burdens colonoscopy facilities with a high number of false-positive test results.

[0085] Thus, there is a clear clinical need for an improved test, which is minimally invasive so as to permit more widespread testing of the population to indicate the presence of colorectal cancer with high accuracy and therefore with a high clinical utility, and to ensure greater adherence to recommended protocols. The present invention addresses this and other needs.

[0086] The present invention provides methods for detecting, diagnosing, or screening for colorectal cancer in a human subject with a sensitivity and specificity not previously described for a blood-based method (see FIGS. 1-4). Specifically, the sensitivity of the methods provided herein are at least 75%, at least 80%, at least 85%, or at least 90%. The specificity of the methods is at least 85%, or at least 90%, for example, when determined with samples of at least 122 patients with CRC and adequate samples (e.g., at least 109) of normal individuals without CRC are tested.

[0087] Without wishing to be bound by any particular theory, the above finding may be due to the fact that an organism such as a human systemically reacts to the development of a colorectal tumor by altering the expression levels of genes in different pathways. The formation of cancerous tumor cells from a nonmalignant adenoma or nonmalignant polyps, the formation of high-grade intraepithelial neoplasias and the further growth and development of cancer of different stages may trigger differential expression of genes in white blood cells that are involved in both adaptive and innate immune responses, for example wound healing, inflammatory response and antibody production pathways. Although the change in expression might be small for each gene in a particular signature, measuring a set of at least 3 genes, for example at least 5, at least 8, at least 102, at least 202, at least 1002, or at least 2002 RNAs at the same time, and optionally together with one or more RNAs listed in Table 14, allows for the detection of colorectal cancer in a human with high sensitivity and high specificity.

[0088] An RNA biomarker is an RNA molecule with a particular base sequence whose presence within a blood sample from a human subject can be quantitatively measured. The measurement can be by methods known in the art, for example analysis on a solid phase device, or in solution (for example, by RT-PCR). Probes for the particular RNAs can either be bought commercially, or designed based on the respective RNA sequence.

[0089] In various embodiments, the invention involves the determination of the abundance of several RNA molecules (e.g., mRNA, pre-spliced RNA, intron-lariat RNA, microRNA, small nuclear RNA, or fragments thereof) to determine whether a subject has colorectal cancer. Abundance measurement, in one embodiment, is determined in a relative or an absolute manner. The RNA abundance is, if applicable, compared with that of other individuals, or with multivariate quantitative thresholds.

[0090] The determination of the abundance of the RNAs described herein is performed from blood samples using quantitative methods. In particular, RNA is isolated from a blood sample obtained from a human subject that is to undergo CRC testing. Although the examples described herein use microarray-based methods, the invention is not limited thereto. For example, RNA abundance can be measured by in situ hybridization, amplification assays such as the polymerase chain reaction (PCR), sequencing, or microarray-based methods. Thus, methods include, without limitation, polymerase-based assays, such as RT-PCR (e.g., TAQMAN), hybiridization-based assays, such as DNA microarray analysis, as well as direct mRNA capture with branched DNA (QUANTIGENE) or HYBRID CAPTURE (DIGENE).

[0091] In certain embodiments, the invention employs a microarray. A “micoroarray” includes a specific set of probes, such as oligonucleotides and/or cDNAs (e.g., expressed sequence tags, “ESTs”) corresponding in whole or in part, and/or continuously or discontinuously, to regions of RNAs that can be extracted from a blood sample of a human subject. The probes are bound to a solid support. The support may be selected from beads (magnetic, paramagnetic, etc.), glass slides, and silicon wafers. The probes can correspond in sequence to the RNAs of the invention such that hybridization between the RNA from the subject sample (or cDNA derived therefrom) and the probe occurs. In the microarray embodiments, the sample RNA can optionally be amplified before hybridization to the microarray. Prior to hybridization, the sample RNA is fluorescently labeled. Upon hybridization to the array and excitation at the appropriate wavelength, fluorescence emission is quantified. Fluorescence emission for each particular RNA is directly correlated with the amount of the particular RNA in the sample. The signal can be detected and together with its location on the support can be used to determine which probe hybridized with RNA from the subject's blood sample.

[0092] Accordingly, in certain aspects, the invention is directed to a kit or microarray for detecting the level of expression or abundance of RNAs in the subject's blood sample, where this “profile” allows for the conclusion of whether the subject has colorectal cancer or not (at a level of accuracy described herein). In another aspect, the invention relates to a probe set that allows for the detection of the RNAs associated with CRC. If these particular RNAs are present in a sample, they (or corresponding cDNA) will hybridize with their respective probe (i.e, a complementary nucleic acid sequence), which will yield a detectable signal. Probes are designed to minimize cross reactivity and false positives. In one embodiment, the probes used are given e.g. in Table 1 and Table 14 as so-called Affymetrix probe set ID numbers. An Affymetrix probe set ID number is an identifier that refers to a set of probes selected to represent expressed sequences on an array. An Affymetrix probe set ID number identifies each probe present on the array, as known to a person of skill in the art. From the sequence defined by an Affymetrix probe set ID number, the sequence of an RNA hybridizing with the probe can be deduced.

[0093] Thus, the invention in certain aspects provides a microarray, which generally comprises a solid support and a set of oligonucleotide probes. The set of probes generally contains from 5 to about 3,000 probes, including at least 3 probes selected from Table 1 or 8, and in addition may optionally contain a set of probes from Table 14. In certain embodiments, the set contains 2002 probes or less, or 1002 probes or less, 502 probes or less, or 202 probes or less. In various embodiments, at least 8, at least 10, at least 30, at least 60, or at least 102 probes are listed in Table 1 or Table 8. The set of probes may comprise, or consist essentially of, the probes for the RNAs listed in Table 8., with optionally one or more probes from Table 14. Alternatively, the set of probes includes probes that hybridize to a combination of RNAs exemplified in any one of Table 2, Table 3, Table 4, Table 5, Table 6, Table 7, Table 8, Table 9, Table 10, Table 11, Table 12, Table 13, or 15. The microarray may comprise, e.g., about 100,000 probes, some of which may be probes for providing reference data. For example, the microarray may comprise about 10,000 to 100,000 probes providing reference data in certain embodiments, together with the probes of Table 1 and optionally Table 14.

[0094] The conclusion whether the subject has colorectal cancer or not is, in one embodiment, reached on the basis of a classification algorithm, which can be developed using e.g. a support vector machine, as known in the art.

[0095] From the cross-classification of the true disease state (Positive=patient with CRC and Negative=patient without CRC) as determined by a physician and the test result as determined by the classification algorithm, the following measures for binary tests can be derived (Sullivan M S. The Statistical Evaluation of Medical Tests for Classification and Prediction. Oxford University Press, 2003), see Table E. An example is given in Table F.

TABLE E
Cross-Classification of True Disease State by Test Result

True Disease State

| Test Result | Negative | Positive | Total |
|---|---|---|---|
| Negative | n₁₁ | n₁₂ | n_{1Σ} |
| Positive | n₂₁ | n₂₂ | n_{2Σ} |
| Total | n_{Σ1} | n_{Σ2} | n_{ΣΣ} |

TABLE F
Example of a Cross-Classification of
True Disease State by Test Result

True Disease State

| Test Result | Negative | Positive | Total |
|---|---|---|---|
| Negative | 30 | 10 | 40 |
| Positive | 20 | 70 | 90 |
| Total | 50 | 80 | 130 |

[0096] “Sensitivity” (S⁺ or true positive fraction (TPF)) refers to the count of positive test results among all true positive disease states divided by the count of all true positive disease states; in terms of Table E this reads: S⁺=n₂₂/n_{Σ2}; the result form Table F would read: S⁺=70/80=0.875. “Specificity” (S⁻ or true negative fraction (TNF)) refers to the count of negative test results among all true negative disease states divided by the count of all true negative disease states; in terms of Table E this reads: S⁺=n₁₁/n_{Σ1}; the result form Table F would read: S⁻=30/50=0.6. “Correct Classification Rate” (CCR or true fraction (TF)) refers to the sum of the count of positive test results among all true positive disease states and count of negative test results among all true negative disease states divided by all the sum of all cases; in terms of Table E this reads: CCR=(n₁₁+n₂₂)/n_{ΣΣ}; the result form Table F would read: CCR=(30+70)/130≈0.769230769. The measures S⁺, S⁻, and CCR address the question: To what degree does the test reflect the true disease state?

[0097] “Positive Predictive Value” (PV⁺ or PPV) refers to the count of true positive disease states among all positive test results dived by the count of all positive test results; in terms of Table E this reads: PV⁺=n₂₂/n_{2Σ}; the result form Table F would read: PV⁺=70/90≈0.777777778. “Negative Predictive Value” (PV⁻ or NPV) refers to the count of true negative disease states among all negative test results dived by the count of all negative test results; in terms of Table E this reads: PV⁻=n₁₁/n_{1ΣΣ}; the result form Table F would read: PV⁻=30/40=0.75. The predictive values address the question: How likely is the disease given the test results?

[0098] Exact or asymptotic confidence limits (CI) for these rates or fractions can be computed using the commercially available software package SAS (SAS Institute Inc., Cary, N.C., USA; www.sas.com) or the publicly available software package R (www.r-project.org) (for literature reference see: Agresti A, Caffo B. Simple and effective confidence intervals for proportions and differences of proportions from adding two successes and two failures. The American Statistician: 54: 280-288, 2000).

[0099] The RNA molecules that can be used for screening, diagnosing and detecting colorectal cancer in a subject according to the invention can be found in Tables 1 and 14. The inventors have shown that the selection of at least 3 or more RNAs listed in Table 1 can be used to diagnose or detect colorectal cancer based on a blood sample from that subject. In an alternative embodiment, the RNA molecules that can be used for detecting, screening and diagnosing colorectal cancer are selected from the RNAs provided in Table 2, 3, 4, 5, 6, 7 or 8. In even a further embodiment, the RNAs (e.g., at least 3, at least 5, at least 8, at least 10, at least 30, or more) are selected from Table 8. In still further embodiments, at least one RNA may be additionally selected from Table 14, in combination with RNAs from Table 1, as exemplified in Table 15.

[0100] Specifically, the method of the invention may comprise at least the following steps: measuring the abundance of at least 3 RNAs in the sample, that are chosen from the RNAs listed in Table 1, and optionally from Table 14, and concluding, based on the measured abundance, whether the subject has colorectal cancer or not. Measuring the abundance of RNAs may comprise isolating RNA from blood samples as described, and hybridizing the RNA or cDNA prepared therefrom to a microarray. Alternatively, other platforms for determining RNA levels may be employed.

[0101] Examples for sets of 3 RNAs that are measured together, i.e. sequentially or preferably simultaneously, are shown in Table 2. The sets of 3 RNAs of Table 2 are defined by a common threshold of sensitivity of at least 72% and specificity of at least 90%.

[0102] In a preferred embodiment of the invention, the abundance of at least 5 RNAs in the sample is measured, wherein the 5 RNAs are chosen from the RNAs listed in Table 1. Examples for sets of 5 RNAs that can be measured together, i.e. sequentially or preferably simultaneously, to detect colorectal cancer in a human subject are shown in Table 3. The sets of 5 RNAs of Table 3 are defined by a common threshold of sensitivity of at least 83% and specificity of at least 95%.

[0103] Similarly, the abundance of at least 8 RNAs (e.g., up to 29 RNAs), of at least 30 RNAs (e.g., up to 59 RNAs), of at least 60 RNAs (e.g., up to 101 RNAs), of at least 102 RNAs (e.g., up to 201 RNAs), of at least 202 RNAs (e.g., up to 501 RNAs), of at least 502 RNAs (e.g., up to 1001 RNAs), of at least 1002 RNAs (e.g., up to 2001 RNAs), or of at least 2002 RNAs that are chosen from the RNAs listed in Table 1 can be measured in the method of the invention. In certain embodiments, the abundance of at least 8 RNAs (e.g., up to 29 RNAs), of at least 30 RNAs (e.g., up to 59 RNAs), of at least 60 RNAs (e.g., up to 101 RNAs), of at least 102 RNAs (e.g., up to 201 RNAs), of at least 202 RNAs (e.g., up to 501 RNAs), of at least 502 RNAs (e.g., up to 750 RNAs) that are chosen from the RNAs listed in Table 14 can be measured in the method of the invention together with RNAs listed in Table 1.

[0104] Three examples of a set of 8 RNAs of which the abundance can be measured in the method of the invention are listed in Table 4 with the following performance data:

| | Sensitivity | Specificity |
|---|---|---|
| Sig. 1 | 84.0% | 94.0% |
| Sig. 2 | 83.6% | 96.9% |
| Sis. 3 | 81.8% | 98.4% |

[0105] Three examples of a set of 30 RNAs of which the abundance can be measured in the method of the invention are listed in Table 5 with the following performance data:

| | Sensitivity | Specificity |
|---|---|---|
| Sig. 1 | 83.6% | 85.9% |
| Sig. 2 | 92.7% | 98.4% |
| Sig. 3 | 96.4% | 98.4% |

[0106] Three examples of a set of 60 RNAs of which the abundance can be measured in the method of the invention are listed in Table 6 with the following performance data:

| | Sensitivity | Specificity |
|---|---|---|
| Sig. 1 | 92.7% | 92.2% |
| Sig. 2 | 94.6% | 99.4% |
| Sig. 3 | 92.7% | 98.4% |

[0107] Two examples of a set of 102 RNAs of which the abundance can be measured in the method of the invention are listed in Table 7 with the following performance data:

| | Sensitivity | Specificity |
|---|---|---|
| Sig. 1 | 89.1% | 95.3% |
| Sig. 2 | 94.5% | 96.9% |
| Sig. 3 | 94.5% | 96.9% |

[0108] An example for a set of 202 RNAs of which the abundance can be measured in the method of the invention is listed in Table 8. This set of 202 RNAs is particularly preferred. The performance data are:

| | Sensitivity | Specificity |
|---|---|---|
| Sig. 1 | 90.1% | 95.3% |
| Sig. 2 | 90.1% | 98.4% |
| Sig. 3 | 92.7% | 100% |

[0109] An example for a set of 502 RNAs of which the abundance can be measured in the method of the invention is listed in Table 9 with the following performance data:

| | Sensitivity | Specificity |
|---|---|---|
| Sig. 1 | 90.1% | 96.6% |
| Sig. 2 | 90.1% | 98.4% |
| Sig. 3 | 94.5% | 98.4% |

[0110] An example for a set of 1002 RNAs of which the abundance can be measured in the method of the invention is listed in Table 10 with the following performance data:

| | Sensitivity | Specificity |
|---|---|---|
| Sig. 1 | 92.7% | 96.9% |
| Sig. 2 | 94.6% | 98.4% |
| Sig. 3 | 92.7% | 98.4% |

[0111] An example for a set of 2002 RNAs of which the abundance can be measured in the method of the invention is listed in Table 1.

[0112] In another embodiment of the invention, using the example of 202 RNAs, the inventors have shown that the method of the invention is very robust in its performance. Specifically, the inventors have shown that from the set of 202 RNAs as listed in Table 8, replacements, enlargements up to 10 times the set size of arbitrary other genes, or subtractions of RNAs can be performed without reducing the performance (sensitivity and specificity) of the detection method of the invention (see FIGS. 2 and 3).

[0113] In particular, in one embodiment of the invention, the abundance of at least 202 RNAs is measured, wherein at least 152 of the 202 measured RNAs are chosen from the list in Table 8, and up to 50 of the remaining measured RNAs are chosen from the list in Table 11, thereby replacing a fraction of the RNAs that were originally chosen (and that were listed in Table 8). Performance data of the resulting sets are:

| | Sensitivity | Specificity |
|---|---|---|
| Sig. 1 | 85.5% | 93.8% |
| Sig. 2 | 90.1% | 89.1% |
| Sig. 3 | 98.4% | 98.4% |

[0114] In one embodiment, at least 1, at least 2, at least 3, at least 4, at least 5, at least 10, at least 20, at least 25, at least 30, at least 35, at least 40, at least 45, at least 50 RNAs from Table 8 are substituted with distinct RNAs listed in Table 1.

[0115] In yet another embodiment, up to 70, up to 65, up to 60, up to 55, up to 50, up to 45, up to 40, up to 35, up to 30, up to 25, up to 20, up to 15 or up to 10 RNAs from Table 8 are substituted with distinct RNAs listed in Table 1.

[0116] In yet another aspect of the invention, the abundance of at least 1002 RNAs of Table 10 is measured, wherein at least 952 of the 1002 measured RNAs are chosen from the list in table 10, and up to 50 of the remaining RNAs are chosen from the list in Table 12. Performance data of the resulting sets are:

| | Sensitivity | Specificity |
|---|---|---|
| Sig. 1 | 92.7% | 96.9% |
| Sig. 2 | 94.5% | 98.4% |
| Sig. 3 | 94.5% | 98.4% |

[0117] In one aspect of the invention, a combination of at least two of the following markers can be excluded from the scope of the invention: BCNP1, CD 163, CDA, MS4A1, BANK1, and MCG20553. In certain embodiments, a combination of at least four of the following markers can be excluded from the profiles and/or signatures of the invention: LGALS8, VEGFA, RNF114, PHF20, SPN, AKAP13, PDZK11P1, S100A6, CTSB, CD163, and CD302.

[0118] In another aspect of the invention, intergenic-sequences were surprisingly found that can be used to detect colorectal cancer in a human subject based on RNA from blood. Without wishing to be bound by theory, it is possible that these intergenic sequences are part of pre-spliced mRNAs, alternative polyadenylation sites or part of not yet known transcripts and reflect differences in expression of the respective genes and the complexity of the transcriptome. These intergenic sequences can be found in Tables 1 and 13 and are characterized by the absence of a gene symbol and RefSeq Transcript ID. Sensitivity and specificity data for intergenic RNAs are provided in FIG. 4.

[0119] Accordingly, the invention also relates to a method for the detection of colorectal cancer in a human subject based on RNA from a blood sample obtained from the subject, comprising measuring the abundance of at least 3 RNAs in the form of intergenic sequences in the sample, that are chosen from the intergenic RNAs listed in Table 1 and 13 (i.e., without a gene symbol and RefSeq Transcript ID). In another embodiment, the present invention is directed to a method for the detection or screening of colorectal cancer in a human subject. The method entails measuring the abundance of at most 3 RNAs in the form of intergenic sequences. In a particular embodiment, the 3 RNAs are chosen from the intergenic RNAs listed in Table 1 or 13.

[0120] The present invention, in one embodiment, is directed to diagnosing and screening for CRC by measuring the abundance of intergenic RNAs, particularly the intergenic RNAs listed in Table 13, or a subset thereof. For example, in one embodiment, a method of diagnosing or screening for CRC can comprise measuring the abundance of at least 10, at least 20, at least 30, at least 40, at least 50, at least 100, at least 150, at least 200, at least 250, at least 300, at least 350, at least 400 or all 408 of the intergenic sequences provided in Table 13 (see also FIG. 4).

[0121] In another embodiment, a custom microarray is provided with oligonucleotide probes, designed to detect some or all of the intergenic RNAs provided in Table 13. For example, in one embodiment, a microarray is provided which includes oligonucleotide probes designed to hybridize to at least 10, at least 20, at least 30, at least 40, at least 50, at least 100, at least 150, at least 200, at least 250, at least 300, at least 350, at least 400 or all 408 intergenic RNA sequences (or cDNA derived therefrom) provided in Table 13.

[0122] The expression profile of RNA markers for colorectal cancer, for example the at least 3 RNAs described above, (or more RNAs as disclosed above and herein), is determined preferably by measuring the quantity of the transcribed RNA of the marker gene. This quantity of the mRNA of the marker gene can be determined for example through chip technology (microarray), (RT-) PCR (for example also on fixated material), Northern hybridization, dot-blotting, sequencing, or in situ hybridization.

[0123] The microarray technology, which is most preferred, allows for the simultaneous measurement of RNA abundance of up to many thousand RNAs and is therefore an important tool for determining differential global RNA expression, in particular between two biological samples or groups of biological samples. In order to apply the microarray technology, the RNAs of the sample need to be amplified and labeled and the hybridization and detection procedure can be performed as known to a person of skill in the art.

[0124] As will be understood by those of ordinary skill in the art, the analysis can also be performed through single reverse transcriptase-PCR, competitive PCR, real time PCR, differential display RT-PCR, Northern blot analysis, sequencing, and other related methods. In general, the larger the number of markers is that are to be measured, the more preferred is the use of the microarray technology. However, multiplex PCR, for example, real time multiplex PCR is known in the art and is amenable for use with the present invention, in order to detect the presence of 2 or more genes or RNA simultaneously.

[0125] The RNA that is measured in the method of the invention can be mRNA, cDNA, unspliced RNA, or its fragments. Measurements can be performed using the complementary DNA (cDNA) or complementary RNA (cRNA), which is produced on the basis of the RNA to be analyzed, e.g. using microarrays. A great number of different arrays as well as their manufacture are known to a person of skill in the art and are described for example in the U.S. Pat. Nos. 5,445,934; 5,532,128; 5,556,752; 5,242,974; 5,384,261; 5,405,783; 5,412,087; 5,424,186; 5,429,807; 5,436,327; 5,472,672; 5,527,681; 5,529,756; 5,545,331; 5,554,501; 5,561,071; 5,571,639; 5,593,839; 5,599,695; 5,624,711; 5,658,734; and 5,700,637, each of which is hereby incorporated by reference in its entireties.

[0126] In one embodiment, the decision whether the subject has colon cancer comprises the step of training a classification algorithm on an adequate training set of cases and controls and applying it to RNA abundance data that was experimentally determined based on the blood sample from the human subject to be diagnosed. The classification method can be a random forest method, a support vector machine (SVM), or a k-nearest neighbor method (k-NN), such as 3-NN.

[0127] For the development of a model that allows for the classification for a given set of biomarkers, such as RNAs, methods generally known to a person of skill in the art are sufficient, i.e., new algorithms need not be developed.

[0128] The major steps of such a model are:

1) condensation of the raw measurement data (for example combining probes of a microarray to probeset data, and/or normalizing measurement data against common controls);
2) training and applying a classifier (i.e. a mathematical model that generalizes properties of the different classes (carcinoma vs. healthy individual) from the training data and applies them to the test data resulting in a classification for each test sample.

[0129] For example, the raw data from microarray hybridizations can first be condensed with FARMS as shown by Hochreiter (2006, Bioinformatics 22(8): 943-9). Alternative methods for condensation such as Robust Multi-Array Analysis (RMA, GC-RMA, see Irizarry et al (2003). Exploration, Normalization, and Summaries of High Density Oligonucleotide Array Probe Level Data. Biostatistics. 4, 249-264.) could be used. Similar to condensation, classification of the test data set through a support-vector-machine or other classification algorithms is known to a person of skill in the art, like for example classification and regression trees, penalized logistic regression, sparse linear discriminant analysis, Fisher linear discriminant analysis, K-nearest neighbors, shrunken centroids, and artificial neural networks (see Wladimir Wapnik: The Nature of Statistical Learning Theory, Springer Verlag, New York, N.Y., USA, 1995; Berhard Schölkopf, Alex Smola: Learning with Kernels: Support Vector Machines, Regularization, Optimization, and Beyond, MIT Press, Cambridge, Mass., 2002; S. Kotsiantis, Supervised Machine Learning: A Review of Classification Techniques, Informatica Journal 31 (2007) 249-268).

[0130] The key component of these classifier training and classification techniques is the choice of RNA biomarkers that are used as input to the classification algorithm.

[0131] In a further aspect, the invention refers to the use of a method as described above and herein for the detection of colorectal cancer in a human subject, based on RNA from a blood sample.

[0132] In a further aspect, the invention also refers to the use of a microarray for the detection of colorectal cancer in a human subject based on RNA from a blood sample. According to the invention, such a use can comprise measuring the abundance of at least 3, or at least 8 RNAs (or more, as described above and herein) that are listed in Table 1, and optionally at least one RNA listed in Table 14. Accordingly, the microarray comprises at least 3 probes for measuring the abundance of the RNAs. It is preferred that the microarray has a set of 11 probes for each RNA. Commercially available microarrays, such as from Affymetrix, may be used. Alternatively, at most 8 RNAs are measured in a sample, in order to detect or diagnose CRC.

[0133] In another embodiment, the abundance of the at least 3 or at least 8 RNAs is measured by multiplex RT-PCR. In a further embodiment, the RT-PCR includes real time detection, e.g., with fluorescent probes such as Molecular beacons or TaqMan® probes.

[0134] In yet a further aspect, the invention also refers to a kit for the detection of colorectal cancer in a human subject based on RNA obtained from a blood sample. Such a kit comprises a means for measuring the expression of at least 3 or at least 8 RNAs that are chosen from the RNAs listed in Table 1, and optionally together with at least one RNA from Table 14. In a further embodiment, the RNAs are chosen from the RNAs listed in any of the tables provided herein, for example, the RNAs are chosen from Table 8 or 15. The means for measuring expression can be probes that allow for the detection of RNA in the sample or primers that allow for the amplification of RNA in the sample. Ways to devise probes and primers for such a kit are known to a person of skill in the art.

[0135] Further, the invention refers to the use of a kit as described above and herein for the detection of colorectal cancer in a human subject based on RNA from a blood sample comprising means for measuring the abundance of at least 3 or at least 8 RNAs that are chosen from the RNAs listed in Table 1 optionally together with at least one RNA from Table 14. In a further embodiment, the RNAs are chosen from the RNAs listed in any of the tables provided herein. The means, for example, may be a microarray or oligonucleotide primers. Such a use may comprise the following steps:
[0136] contacting the array (or primers) with RNA from a blood sample from a human subject,
[0137] measuring the abundance of at least 3 RNAs (or more as described above and herein) that are chosen from the RNAs listed in table 1 using the means for measuring the abundance of at least 3, RNAs, and
[0138] concluding, based on the measured abundance, whether the subject has colorectal cancer.

### Tables

[0139] Table 1 shows a list of 2002 RNAs that are differentially expressed in several human subjects with colorectal cancer in comparison to subject without colorectal cancer. Each marker is characterized by a SEQ. ID NO., by an Affymetrix probe set ID, and, if applicable, a HUGO ID and a Ref. Seq ID. The first 202 RNAs shown are an exemplary set of RNAs and are also shown in Table 8.

[0140] Table 1a refers to the RNAs of Table 1 and shows the expression difference between 119 control samples (non-events) and CRC cases (events). The numbers represent the differences of events (CRC positive) and non-events (CRC negative) in log 2 steps. For example, a value of 0.53 for the first probe set means an expression increase by 2̂0.53-fold for events vs. non-events. In other words, the events had a 144% expression with respect to non-events, i.e. 44% more RNA (0.44=2̂0.53-1, 1.44=2̂0.53).

[0141] Table 2 shows 5836 exemplary sets of 3 RNAs of the RNAs listed in Table 1.

[0142] Table 3 shows 3946 exemplary subsets of 5 RNAs of the RNAs listed in Table 1.

[0143] Table 4 shows three exemplary subsets of 8 RNAs of the RNAs listed in Table 1.

[0144] Performance (obtained using the leave-one-out method) (specificity/sensitivity): Sig1: 84%/94%, Sig2: 83.6%/96.9%, Sig3: 81.8%/98.45%.

[0145] Table 5 shows three exemplary subsets of 30 RNAs of the RNAs listed in Table 1. Performance (obtained using the leave-one-out method) (specificity/sensitivity): Sig1: 83.6% 85.9%, Sig2: 92.7% 98.4%; Sig3: 96.4%/98.4%.

[0146] Table 6 shows three exemplary subsets of 60 RNAs of the RNAs listed in Table 1. Performance (obtained using the leave-one-out method) (specificity/sensitivity): Sig 1: 92.7%/92.2%, Sig 2: 94.6%/98.4%, Sig 3: 92.7%/98.4%.

[0147] Table 7 shows three exemplary subsets of 102 RNAs of the RNAs listed in Table 1. Performance (obtained using the leave-one-out method) (specificity/sensitivity): Sig 1: 89.1%/95.3%, Sig 2: 94.5%/96.9%, Sig 3: 94.5%/96.9%

[0148] Table 8 shows three exemplary subsets of 202 RNAs of the RNAs listed in Table 1. Performance (specificity/sensitivity): 90.1%/95.3%,; 90.1%/98.4%; Sig. 3: 92:7%/100%).

[0149] Table 9 shows three exemplary subsets of 502 RNAs of the RNAs listed in Table 1. Performance (specificity sensitivity):

### Sig.1: 90.1%/96.9%, Sig2: 90.1% 98.4%; Sig.3: 94.5%/98.4%,

[0150] Table 10 shows three exemplary subsets of 1002 RNAs of the RNAs listed in Table 1. Performance (obtained using the leave-one-out method) (specificity/sensitivity): Sig1: 92.7%/96.9%, Sig2: 94.6%/98.4%, Sig3: 92.7%/98.4%.

[0151] Table 11 shows three exemplary sets of RNAs based on substitution of 50 RNAs from a set of 202 RNAs, Performance (obtained using the leave-one-out method) (specificity/sensitivity):

### Exchange 1: 85.5%/93.8%, Exchange 2: 90.1%/89.1%, Exchange 3: 98.4%/98.4%.

[0152] Table 12 shows three exemplary sets of RNAs based on substitution of 50 RNAs from a set of 1002 RNAs. Performance (obtained using the leave-one-out method) (specificity/sensitivity):

### Exchange 1: 92.7%/96.9%, Exchange 2: 94.5%/98.4%, Exchange 3: 94.5%/98.4%.

[0153] Table 13 shows the subset of 408 intergenic sequences from Table 1.

[0154] Table 14 shows a list of 750 RNAs that are differentially expressed in several human subjects with colorectal cancer in comparison to subjects without colorectal cancer. Each marker is characterized by a SEQ ID NO., by a probe set ID, and, if applicable, a gene symbol and a primary transcript ID. According to certain embodiments of the invention, the abundance of at least 8 RNAs from the list of RNAs shown in Table 1 is measured, optionally together with a number of RNAs taken from the list of RNAs of Table 14. Examples of signatures consisting of RNAs from Table 1 and Table 14 are given in Table 15.

[0155] Table 15 shows nine exemplary subsets consisting of RNAs listed in Table 1 and Table 14 (Combination signatures).

### Examples

### Materials and Methods

### Study Protocol

[0156] All results described herein are based on a prospective, clinical-diagnostic study protocol entitled Früherkennung kolorektaler Karzinome mit Hilfe von RNA-basierten Expression-Signaturen aus Blut—Eine multizentrische, diagnostische Studie zur Entwicklung and Validierung von Genexpressions-Signaturen zur Früherkennung kolorektaler Karzinome—Version CRC.SCR.2.BR.1 vom 06. Januar 2009″ in accordance with the Guideline for Good Clinical Practice (Directive 75/318/EEC) July 1996, version July 2002 (http://www.emea.eu.int/pdfs/human/ich/013595en.pdf). This study protocol was reviewed and approved by the local ethics authority, the “Ethik-Kommission der Landesärztekammer Brandenburg” on Jan. 14, 2009. All persons entered into this study gave written informed consent that their blood samples and associated clinical data could be used for this research endeavor. Moreover, the persons gave written, informed consent that samples and clinical data could be audited by regulatory authorities if the research results would be used in a performance evaluation study (Gesetz über Medizinprodukte. BGB111994, 1963. Neugefasst durch Bek. v. 7. 8.2002 I 3146; geändert durch Art. 109 V v. 25.11.2003 I 2304. (http://bundesrecht.juris.de/bundesrecht/mpg/)).

[0157] This study was designed as a cohort study. One cohort, the colonoscopy cohort, included persons undergoing colonoscopy. The second cohort, the surgery cohort, included patients scheduled for surgery for suspected colorectal carcinoma.

[0158] The inclusion criteria for the colonoscopy cohort were: 1) Willingness to undergo complete colonoscopy; 2) At least 55 years of age; 3) Ability to give written, informed consent; 4) Written informed consent after information about the study was given by a physician. The exclusion criteria for the colonoscopy cohort were: 1) Rectoscopy, sigmoidoscopy, or colonoscopy during the last five years prior to inclusion into the study; 2) Treatment of a malignant disease during the last five years prior to inclusion into the study, except for malignoma with low metastatic potential such as basalioma in situ of the skin.

[0159] The inclusion criteria for the surgery cohort were: 1) Age at initial diagnosis at least 18 years of age; 2) Ability to give written, informed consent; 3) (Suspected) Diagnosis of colorectal carcinoma UICC-stage I to IV; 4) Surgery is planned in such a fashion that staging according to UICC-criteria is feasible; 5) No treatment prior to surgery; 6) No treatment for a malignant disease during the last five years prior to inclusion into the study; 7) No other disease that lowers life expectancy below one year; 8) Regular follow-up examinations have to be possible; 9) Written informed consent after information about the study was given by a physician.

### Blood Drawing and Blood Sample Storage

[0160] In the colonoscopy cohort, blood was drawn after written, informed consent and prior to bowel cleaning and change of medication if necessary. In the surgery cohort, blood was drawn after written, informed consent and prior to removal of the resected tissue from the body of the patient by the surgeon. In both cohorts, colonoscopy cohort and surgery cohort, blood was drawn into PAXgene™ blood tubes (Becton Dickinson). The tubes were stored within four hours in a freezer at −20° C. until transport to the laboratory on dry ice, where the tubes were stored again in a freezer at −20° C. until RNA-extraction.

### Sample Sizes

[0161] The study protocol initially stipulated the use of 220 blood samples from the colonoscopy cohort and 220 blood samples from the surgery cohort for the discovery of the signatures. However, the study protocol was open to changes depending on the results of the discovery process. Additionally, the study protocol initially stipulated the use 220 blood samples from the colonoscopy cohort and 220 blood samples from the surgery cohort for prospective performance evaluation purposes. Again, these samples sizes were open and amenable to change.

### Quality Control of Clinical Data

[0162] All clinical data of all included persons from both cohorts were checked directly from the patient's medical records and entered into study databases, as prescribed in the study protocol. Each item in the study databases were checked independently by two persons. Patients of both cohorts together with their blood samples were withdrawn if any violation of the inclusion of exclusion criteria cited above was detected. In particular for the colonoscopy cohort, all samples and their associated clinical data were excluded from all analyses if the colonoscopy was found to be not complete. Moreover, blood samples were destroyed and clinical data were deleted if the patient decided to withdraw his/her informed consent.

### RNA Extraction

[0163] Total RNA extraction from blood was performed using the QIAGEN PAXgene Blood miRNA Kit together with the QIAcube® robot according to the manufacturer's instructions. The RNA obtained is therefore sometimes referred to as PAX-RNA.

[0164] Before starting RNA extraction, the buffers BM3 and BM4 were mixed with the specified amount of 96-100% Ethanol. Furthermore, the DNAse I (1500 Kunitz units) was dissolved in 550 μl of RNAse free water.

[0165] After thawing, the PAX-blood tubes were turned several times to ensure proper mixing and left over night (or minimal two hours) at room temperature. Then, the tubes were centrifuged for 10 minutes at 4000×g using a swing out bucket. Next, the supernatant was carefully removed from each tube, and the pellets were washed (vortexing until complete resuspension) with 4 ml RNAse free water. After centrifuging again for 10 minutes at 4000×g, the pellets were resuspended in 350 μl buffer BR1 and transferred to 2 ml processing tubes. The opened tubes were then loaded into the rotor adapters of the centrifuge. Subsequently, all buffers were placed on the respective spots of the reagent bottle holder. After closing the lid, the PAXgene Blood miRNA Part A protocol was started. When it was finished, the instrument door was opened, the RNA containing tubes were closed and subsequently placed on the shaker adaptor. After closing the instrument door again, the PAXgene Blood miRNA Part B protocol was started. When the program was finished, concentration was determined by UV-absorption measurement and the samples were stored at −70° C. until use.

[0166] For understanding of underlying principles of the automatic procedure the manual protocol is briefly described below. There is no difference between the two methods until the resuspension of the pellet.

[0167] To the resupended pellet 300 μl binding buffer (BR2) and 40 μl proteinase K solution is added and mixed by vortexing for 5 seconds. Incubation follows for 10 minutes at 55° C. using a shaker-incubator at 400-1400 rpm. After incubation, the temperature of the shaker-incubator is set to 65° C. The lysate is pipetted directly into a PAXgene Shredder spin column (lilac) placed in a 2 ml processing tube and centrifuged for 3 minutes at maximum speed (don't not to exceed 20,000×g). The entire supernatant of the flow-through fraction is carefully transferred the to a fresh 1.5 ml microcentrifuge tube without disturbing the pellet in the processing tube. 350 μl ethanol (96-100%, purity grade p.a.) is added and mixed by vortexing. The mixture is briefly (1-2 seconds at 500-1000×g) centrifuged to remove drops from the inside of the tube Lid. 700 μl of the sample is pipetted into the PAXgene RNA spin column (red) placed in a 2 ml processing tube, and centrifuged for 1 minute at 8000-20,000×g. The spin column is placed in a new 2 ml processing tube (PT), and the old processing tube containing flow-through discarded Now the remaining sample is pipetted into the PAXgene RNA spin column, and centrifuged for 1 minute at 8000-20,000×g. The spin column is placed in a new 2 ml processing tube and the old processing tube containing flow-through again discarded. Subsequently, 350 μl wash buffer 1 (BR3) is pipetted into the PAXgene RNA spin column. After centrifugation for 1 minute at 8000-20,000×g the spin column is placed in a new 2 ml processing tube and the old processing tube containing the flow-through again discarded. 10 μl DNase I stock solution is added to 70 μl DNA digestion buffer in a 1.5 ml microcentrifuge tube and mixed by gently flicking the tube followed by a brief centrifugation to collect residual liquid from the sides of the tube. The DNase I incubation mix (80 μl) is pipetted directly onto the PAXgene RNA spin column membrane, and placed on the benchtop (20-30° C.) for 15 minutes. After Incubation 350 μl wash buffer 1 (BR3) is pipetted into the PAXgene RNA spin column and centrifuged for 1 minute at 8000-20,000×g. The spin column is placed in a new 2 ml processing tube and the old processing tube containing flow-through again discarded. 500 μl wash buffer 2 (BR4) is pipetted into the PAXgene RNA spin column and centrifuged for 1 minute at 8000-20,000×g. The spin column is placed in a new 2 ml processing tube and the old processing tube containing flow-through again discarded. Another 500 μl wash buffer 2 (BR4) is added to the PAXgene RNA spin column and centrifuged for 3 minutes at 8000-20,000×g. The spin column is placed in a new 2 ml processing tube and the old processing tube containing flow-through again discarded. The column is centrifuged for 1 minute at 8000-20,000×g.

[0168] The processing tube is discarded and the column is placed on a 1.5 ml microcentrifuge tube. 40 μl elution buffer (BR5) directly pipetted onto the PAXgene RNA spin column membrane and subsequntly centrifuged for 1 minute at 8000-20,000×g to elute the RNA. The elution step is repeated using again 40 μl elution buffer (BR5) and the same 1.5 ml microcentrifuge tube. The RNA is denatured for 5 minutes at 65° C. in the shaker-incubator (see above) without shaking.

[0169] The quality control is performed on the Agilent Bioanalyzer.

[0170] Total RNA (100 ng) was labeled and hybridized onto Affymetrix U133Plus 2.0 GeneChips (Affymetrix; Santa Clara, Calif.) according to the manufacturer's instructions. Briefly, the 100 ng total RNA was used for cDNA synthesis with the Ovation® Whole Blood system (Nugen, San Carlos, Calif. 94070). After SPIA™ Amplification the cDNA was purified with a QIAquick PCR purification spin column (QIAGEN, Hilden) and then subjected to Biotin labeling with the FL-Ovation™ cDNA Biotin Module V2 (Nugen).

[0171] 5 μg cDNA was then added into the hybridization cocktail and the cocktail was applied to the probe array cartridge. After 16 hours hybridization, the array was washed with Affymetrix fluidics station 450. The array was then scanned with Affymetrix®GeneChip® Scanner. Hybridization signals were collected with the Affymetrix GCOS software (version 1.4), using the default settings and imported into R (Bioconductor package).

### Recruitment

[0172] 499 persons scheduled for colonoscopy were recruited into the study; RNA blood samples were taken prior to colonoscopy. The recruitment period for the non-CRC patients lasted from Feb. 9, 2009 until Apr. 3, 2009. In parallel, RNA blood samples were taken from patients with (suspected) diagnosis of CRC prior or during surgery for CRC.

### Discovery Set-Up

### Sample Selection for RNA-Extraction

[0173] The selection criteria of CRC-cases included availability of UICC stage information and the check that the patients did not fulfill any exclusion criteria for the MSKK-study. At this time clinical data of the non-CRC case were not available. Hence, the first 240 patients of the study were selected.

[0174] Altogether, 480 PAX-RNA samples, 240 from non-CRC persons and 240 from CRC patients, were randomized into the discovery set. Additionally, the order of processing by the laboratory was randomized. A drop-out rate of 10%, or 20 cases in each group, was assumed.

### Results of RNA-Extraction

[0175] From the RNA-extraction samples, 14 samples (2.92%) showed RNA integrity numbers (RIN) lower than 3.5, which rendered these samples unfit for microarray hybridization.

### Selection of Samples for Microarray Hybridization

[0176] Based on the results of RNA extraction and clinical information about UICC-stages and complete colonoscopy in case of non-CRC cases, 428 samples were authorized for microarray hybridization. The vast majority of drop-outs were incomplete colonoscopies.

### Microarray Pseudonymization

[0177] A pseudonymization procedure was set-up at the beginning of the hybridization. On each day microarrays were hybridized, the system administrator removed the raw scan image files from the scan computer system and placed them in a directory. The system administrator applied the program (GCOS) to compute the expression values from the raw image data and stored the computed expression values of each probe in a so-called .CEL-file. When the days' microarray production was complete and the probe expression values were all computed, the system administrator informed the project leader that the days' production was ready for pseudonomyzation. Through a program, the original .CEL-file was copied and the filename was stored within the .CEL-file, and was exchanged with a pseudonym.

[0178] Moreover, the date and time of the scan which are also stored in the .CEL-file was also replaced, since from date and time of scan the sample would be identifiable. Lastly, the pseudonomized .CEL-files was copied into a directory accessible by the bioinformatics group and authorizes these .CEL-files for microarray quality control.

### Microarray Quality Control

[0179] The microarray data authorized for quality control were checked according to a Standard Operating Procedure (SOP), and a report was given to the project leader. As of now, two scans of 128 scans (1.56%; exact two-sided 95% CI: 0.19%-5.53%), one of a MAQC control sample and one of a clinical sample did not pass quality control.

### Discovery Procedure

[0180] In brief, all raw measurement data from microarray hybridizations scheduled for a discovery (i.e., from samples selected for discovery, and measurements that passed quality control) were condensed together with the FARMS algorithm as shown by Hochreiter et al 2006 (“A new summarization method for Affymetrix probe level data.” Bioinformatics 2006 22(8):943-949, doi:10.1093/bioinformatics/bt1033), and filtered using IN/I calls shown by Talloen et al., 2007 (“I/NI-calls for the exclusion of non-informative genes: a highly effective filtering tool for microarray data.” Bioinformatics 2007; 23(21):2897-2902 doi:10.1093/bioinformatics/btm478). During this discovery, FARMS version 1.4 was used as part of the statistical software systems R (version 2.9.0) and Bioconductor (version 1.6) (for this software, see http://cran.r-project.org/, http://www.r-project.org/ and http://www.bioconductor.org, also Ross Ihaka and Robert Gentleman. R: A language for data analysis and graphics. Journal of Computational and Graphical Statistics, 5(3): 299-314, 1996; Gentleman et al 2005: Bioinformatics and Computational Biology Solutions Using R and Bioconductor, Springer, New York, N.Y.).

[0181] The resulting condensed array data were then partitioned into groups of samples in a double nested bootstrap approach (Efron (1979) Bootstrap Methods—Another Look at the Jackknifing, Ann. Statist. 7, 1-6). In the outer loop of this bootstrap, the samples were partitioned into an outer test set and an outer training set. In the inner bootstrap loop, this outer training set was partitioned again into an inner training set and an inner test set.

[0182] On the inner training set, probeset relevance was estimated through a decision-tree-analysis. The influence of each feature was determined from its contribution to the classification error: In case the error of a probeset increases due to the permutation of the values of a probeset while the values of all other probesets remain unchanged, this probeset is weighted more strongly.

[0183] The relevance evaluations of the individual inner loops were combined for each external loop and the chosen probesets were used to train a support vector machine (Bernhard Schölkopf, Alex Smola: Learning with Kernels: Support Vector Machines, Regularization, Optimization, and Beyond, MIT Press, Cambridge, Mass., 2002, also see citations above). This classifier was trained on the outer training set (which was already used for its feature selection) and applied to the outer test set of samples. For this classification, the same methods and parameters were use as for the intended application on external data (for example as part of validation): the details are described below as application for the RNAs of the invention. The whole external loop of the bootstrap procedure is a simulation of later classification of unknown data. Its average performance over all external loops gives a prospective estimate of the performance of the classification procedure (mainly based on the chosen biomarker set). The common mistake of overfitting, i.e., the overly optimistic evaluation of a classification method on its discovery set, is thereby avoided.

[0184] Finally, the results of all inner loops and of all external loops were combined to form a common biomarker set with prospective estimates of performance.

### Application of the Invention

[0185] A number of RNAs that result from the discovery above can be used with state of the art classification methods as described in the cited literature and as known by a person of skill in the art. As any classification, it will require a representative training set, which the inventors obtained through a clinical study fulfilling the requirements described above. Part of the training set is the necessary clinical information (carcinoma patient or healthy control, as defined by the clinical study). Similar to the clinical requirements, this description of the algorithmic part of the application of the invention also presupposes the described lab process and quality controls were applied.

[0186] The training set of microarray raw data was condensed by the same method as the discovery set in the section “Discovery Procedure” above: the FARMS condensation algorithm, preferentially version 1.4 (available at http://www.bioinf.jku.at/software/farms/farms.html from the author of the software, citations to the publication of this algorithm see above). A standard implementation of support vector machines, such as the one contained in Bioconductor's (see references above) package for machine learning “e1071” with parameter “kernel” set to “linear” (preferential version for this package is 1.5-19).

[0187] It is important not to present the classification information on the training data as numeric data, but as categorical data. This can be ensured by passing the corresponding arguments as an R “factor” (for example as in “svm( . . . , as.factor(clinicalData), . . . )”. Otherwise this svm algorithm will use the wrong type of classification.

[0188] To apply this svm, using the same software package, to any kind of new microarray data, a condensation step is necessary just as for the discovery data. It is possible to simply reapply the condensation method above to each individual new sample in combination with the whole discovery set. This first method approximates the preferential method well, which is to explicitly compute a condensation model or parameter based on the discovery data and apply it to the test data. This can be done with the software package on.farms, preferentially version 1.4.1, available from the author (see references above).

[0189] The application of the described svm to the thus condensed test data produces the desired decision value.

[0190] Patents, patent applications, publications, product descriptions, and protocols which are cited throughout this application are incorporated herein by reference in their entireties.

[0191] The embodiments illustrated and discussed in this specification are intended only to teach those skilled in the art the best way known to the inventors to make and use the invention. Modifications and variation of the above-described embodiments of the invention are possible without departing from the invention, as appreciated by those skilled in the art in light of the above teachings. It is therefore understood that, within the scope of the claims and their equivalents, the invention may be practiced otherwise than as specifically described.

TABLE 1

| Seq. | | Gene | RefSeq Transcript |
|---|---|---|---|
| Number | Probe Set ID | Symbol | ID |
| 1 | 1560255_at | C10ORF31 | XR_041926 |
| 2 | 238712_at | — | — |
| 3 | 227970_at | GPR157 | NM_024980 |
| 4 | 237056_at | INSC | NM_001042536.1 |
| 5 | 241981_at | FAM20A | NM_017565.2 |
| 6 | 223974_at | MGC11082 | XR_079560.1 |
| 7 | 241415_at | — | — |
| 8 | 1565544_at | RNF141 | NM_016422.3 |
| 9 | 216693_x_at | HDGFRP3 | NM_016073.2 |
| 10 | 1570264_at | — | — |
| 11 | 221044_s_at | TRIM6- | NM_001003818.1 |
| | | TRIM34 | |
| 12 | 203658_at | SLC25A20 | NM_000387 |
| 13 | 213390_at | ZC3H4 | NM_015168.1 |
| 14 | 224832_at | DUSP16 | NM_030640 |
| 15 | 212642_s_at | HIVEP2 | NM_006734.3 |
| 16 | 225005_at | PHF13 | NM_153812.2 |
| 17 | 242167_at | — | — |
| 18 | 221143_at | RPA4 | NM_013347.3 |
| 19 | 243824_at | — | — |
| 20 | 222139_at | KIAA1466 | AB040899 |
| 21 | 237315_at | — | — |
| 22 | 238360_s_at | — | — |
| 23 | 239571_at | — | — |
| 24 | 232356_at | — | — |
| 25 | 224645_at | EIF4EBP2 | NM_004096.4 |
| 26 | 1556110_at | — | — |
| 27 | 234842_at | TRA@ | — |
| 28 | 212017_at | FAM168B | NM_001009993.2 |
| 29 | 226772_s_at | SAP30L | NM_024632.5 |
| 30 | 1552648_a_at | TNFRSF10A | NM_003844.2 |
| 31 | 225840_at | TEF | NM_003216.2 |
| 32 | 202657_s_at | SERTAD2 | NM_014755.2 |
| 33 | 231764_at | CHRAC1 | NM_017444.4 |
| 34 | 232513_x_at | C20ORF107 | NM_001013646 |
| 35 | 233283_at | — | — |
| 36 | 206983_at | CCR6 | NM_031409.3 |
| 37 | 243654_at | — | — |
| 38 | 223558_at | C9ORF80 | NM_021218.1 |
| 39 | 225263_at | HS6ST1 | NM_004807.2 |
| 40 | 1563497_at | USP25 | NM_013396.3 |
| 41 | 237655_at | — | — |
| 42 | 230571_at | PLLP | NM_015993 |
| 43 | 238439_at | ANKRD22 | NM_144590.2 |
| 44 | 200666_s_at | DNAJB1 | NM_006145.1 |
| 45 | 235024_at | PHF17 | NM_199320.2 |
| 46 | 244025_at | ITPRIP | NM_033397.2 |
| 47 | 217868_s_at | METTL9 | NM_001077180.1 |
| 48 | 236229_at | ZNF814 | NM_001144989.1 |
| 49 | 202365_at | UNC119B | NM_001080533.1 |
| 50 | 208741_at | SAP18 | NM_005870.4 |
| 51 | 226585_at | NEIL2 | NM_001135747.1 |
| 52 | 219938_s_at | PSTPIP2 | NM_024430.3 |
| 53 | 1554557_at | ATP11B | NM_014616.1 |
| 54 | 244492_at | — | — |
| 55 | 243303_at | — | — |
| 56 | 216112_at | — | — |
| 57 | 225494_at | DYNLL2 | NM_080677.2 |
| 58 | 239363_at | C9ORF80 | NM_021218.1 |
| 59 | 1563975_at | RNF130 | NM_018434.4 |
| 60 | 242917_at | RASGEF1A | NM_145313.2 |
| 61 | 240661_at | LOC284475 | — |
| 62 | 226547_at | MYST3 | NM_001099413.1 |
| 63 | 231259_s_at | CCND2 | NM_001759.3 |
| 64 | 210281_s_at | ZMYM2 | NM_003453.2 |
| 65 | 235543_at | IRF2 | — |
| 66 | 202656_s_at | SERTAD2 | NM_014755 |
| 67 | 243399_at | HAAO | NM_012205.2 |
| 68 | 205321_at | EIF2S3 | NM_001415.3 |
| 69 | 230738_at | HIST2H4B | NM_001034077.4 |
| 70 | 234302_s_at | ALKBH5 | NM_017758.3 |
| 71 | 231309_at | GNA12 | NM_007353.2 |
| 72 | 201751_at | JOSD1 | NM_014876.5 |
| 73 | 221654_s_at | USP3 | NM_006537.2 |
| 74 | 235058_at | GPN2 | NM_018066.3 |
| 75 | 203609_s_at | ALDH5A1 | NM_170740.1 |
| 76 | 239845_at | — | — |
| 77 | 223637_s_at | C11ORF56 | NM_032127.3 |
| 78 | 228156_at | — | — |
| 79 | 243509_at | — | — |
| 80 | 238053_at | DHRSX | NM_145177.2 |
| 81 | 240733_at | — | — |
| 82 | 235421_at | MAP3K8 | NM_005204.2 |
| 83 | 204787_at | VSIG4 | NM_007268.2 |
| 84 | 212806_at | PRUNE2 | NM_015225.2 |
| 85 | 200759_x_at | NFE2L1 | NM_003204.2 |
| 86 | 213174_at | TTC9 | NM_015351.1 |
| 87 | 205181_at | ZNF193 | NM_006299.3 |
| 88 | 242306_at | — | — |
| 89 | 1562321_at | PDK4 | NM_002612.3 |
| 90 | 201578_at | PODXL | NM_005397.3 |
| 91 | 1554132_a_at | FAM190B | NM_018999 |
| 92 | 225545_at | EEF2K | NM_013302.3 |
| 93 | 228811_at | TMEM8B | NM_001042590.1 |
| 94 | 203879_at | PIK3CD | NM_005026.3 |
| 95 | 201170_s_at | BHLHE40 | NM_003670.2 |
| 96 | 215322_at | — | — |
| 97 | 1562110_at | — | — |
| 98 | 226804_at | FAM20A | NM_017565 |
| 99 | 1554116_s_at | PARP11 | NM_020367.4 |
| 100 | 237942_at | — | — |
| 101 | 219671_at | HPCAL4 | NM_016257.2 |
| 102 | 210104_at | MED6 | NM_005466.2 |
| 103 | 212097_at | CAV1 | NM_001172895 |
| 104 | 1558761_a_at | FAM120AOS | NM_198841.2 |
| 105 | 215888_at | PDS5B | NM_015032.2 |
| 106 | 208823_s_at | CDK16 | NM_006201 |
| 107 | 201731_s_at | TPR | NM_00329 |
| 108 | 220131_at | FXYD7 | NM_022006.1 |
| 109 | 216233_at | CD163 | NM_004244.4 |
| 110 | 236629_at | C1ORF69 | NM_001010867.2 |
| 111 | 1562260_at | — | — |
| 112 | 33494_at | ETFDH | NM_004453 |
| 113 | 228068_at | GOLGA7B | NM_001010917.1 |
| 114 | 222640_at | DNMT3A | NM_022552.3 |
| 115 | 239077_at | GALNACT2 | NM_018590 |
| 116 | 207040_s_at | ST13 | NM_003932.3 |
| 117 | 228723_at | — | — |
| 118 | 1562031_at | JAK2 | NM_004972 |
| 119 | 218771_at | PANK4 | NM_018216.1 |
| 120 | 219906_at | FLJ10213 | NM_018029.3 |
| 121 | 217286_s_at | NDRG3 | NM_032013.2 |
| 122 | 235777_at | ANKRD44 | NM_153697.1 |
| 123 | 218625_at | NRN1 | NM_016588.2 |
| 124 | 1567213_at | PNN | NM_002687.3 |
| 125 | 243276_at | ALS2CL | NM_147129.2 |
| 126 | 215210_s_at | DLST | NM_001933.3 |
| 127 | 207339_s_at | LTB | NM_002341.1 |
| 128 | 202533_s_at | DHFR | NM_000791.3 |
| 129 | 230267_at | WSB1 | NM_015626.8 |
| 130 | 218168_s_at | CABC1 | NM_020247.4 |
| 131 | 222844_s_at | SRR | NM_021947.1 |
| 132 | 233264_at | — | — |
| 133 | 214501_s_at | H2AFY | NM_001040158.1 |
| 134 | 203505_at | ABCA1 | NM_005502.2 |
| 135 | 203556_at | ZHX2 | NM_014943.3 |
| 136 | 226474_at | NLRC5 | NM_032206.3 |
| 137 | 215640_at | TBC1D2B | NM_015079.5 |
| 138 | 243902_at | — | — |
| 139 | 208109_s_at | C15ORF5 | NR_026813.1 |
| 140 | 220905_at | — | — |
| 141 | 201259_s_at | SYPL1 | NM_006754.2 |
| 142 | 221908_at | RNFT2 | NM_001109903.1 |
| 143 | 205379_at | CBR3 | NM_001236.3 |
| 144 | 229374_at | EPHA4 | NM_004438.3 |
| 145 | 1569666_s_at | — | — |
| 146 | 228216_at | SERPINC1 | NM_000488 |
| 147 | 240217_s_at | GMEB1 | NM_024482.1 |
| 148 | 218287_s_at | EIF2C1 | NM_012199.2 |
| 149 | 218517_at | PHF17 | NM_024900 |
| 150 | 244796_at | GLS | NM_014905.3 |
| 151 | 233976_at | — | — |
| 152 | 233647_s_at | CDADC1 | NM_030911.1 |
| 153 | 239489_at | UBLCP1 | NM_145049.3 |
| 154 | 238923_at | SPOP | NM_001007226.1 |
| 155 | 237018_at | AKAP13 | NM_007200.3 |
| 156 | 240176_at | — | — |
| 157 | 200860_s_at | CNOT1 | NM_016284.3 |
| 158 | 212639_x_at | TUBA1C | NM_032704.3 |
| 159 | 201236_s_at | BTG2 | NM_006763.2 |
| 160 | 205857_at | SLC18A2 | NM_003054.3 |
| 161 | 228603_at | ACTR3 | NM_005721.3 |
| 162 | 238728_at | MRPS23 | NM_016070.2 |
| 163 | 216729_at | — | — |
| 164 | 206674_at | FLT3 | NM_004119.2 |
| 165 | 238025_at | MLKL | NM_152649.2 |
| 166 | 203255_at | FBXO11 | NM_025133.3 |
| 167 | 213294_at | CCDC75 | NM_174931.2 |
| 168 | 215209_at | SEC24D | NM_014822.2 |
| 169 | 208030_s_at | ADD1 | NM_176801.1 |
| 170 | 238570_at | ZNF611 | NM_030972.2 |
| 171 | 232164_s_at | EPPK1 | NM_031308.1 |
| 172 | 209828_s_at | IL16 | NM_172217.2 |
| 173 | 222526_at | GATAD2A | NM_017660.3 |
| 174 | 203366_at | POLG | NM_002693.2 |
| 175 | 242319_at | DGKG | NM_001080745.1 |
| 176 | 223846_at | AZI2 | NM_022461.3 |
| 177 | 234402_at | TRD@ | M18414 |
| 178 | 32042_at | ENOX2 | NM_182314.1 |
| 179 | 225478_at | MFHAS1 | NM_004225.2 |
| 180 | 229754_at | — | — |
| 181 | 243514_at | — | — |
| 182 | 213484_at | ADD2 | NM_001617.2 |
| 183 | 208744_x_at | HSPH1 | NM_006644.2 |
| 184 | 1558592_at | — | — |
| 185 | 239462_at | ZNF284 | NM_001037813.2 |
| 186 | 212399_s_at | VGLL4 | NM_014667.2 |
| 187 | 236013_at | CACNA1E | NM_000721.2 |
| 188 | 211986_at | AHNAK | NM_001620.1 |
| 189 | 242803_at | — | — |
| 190 | 217815_at | SUPT16H | NM_007192.3 |
| 191 | 219120_at | C2ORF44 | NM_025203.2 |
| 192 | 242780_at | VAPA | NM_003574.5 |
| 193 | 242695_at | — | — |
| 194 | 1570394_at | XRN1 | NM_019001.3 |
| 195 | 221639_x_at | HNRNPU | NM_031844.2 |
| 196 | 217185_s_at | ZNF259 | NM_003904.3 |
| 197 | 1568964_x_at | SPN | NM_001030288.1 |
| 198 | 1556942_at | — | — |
| 199 | 200594_x_at | HNRNPU | NM_031844.2 |
| 200 | 1559739_at | CHPT1 | NM_020244.2 |
| 201 | 232157_at | SPRY3 | NM_005840.1 |
| 202 | 224855_at | PYCR2 | NM_013328.2 |
| 203 | 200796_s_at | MCL1 | NM_021960 |
| 204 | 201747_s_at | SAFB | NM_002967 |
| 205 | 205781_at | C16orf7 | NM_004913 |
| 206 | 201032_at | BLCAP | NM_006698 |
| 207 | 226687_at | PRPF40A | NM_017892 |
| 208 | 207253_s_at | UBN1 | NM_001079514 |
| 209 | 222310_at | SFRS15 | NM_001145444 |
| 210 | 203218_at | MAPK9 | NM_001135044 |
| 211 | 203409_at | DDB2 | NM_000107 |
| 212 | 217857_s_at | RBM8A | NM_005105 |
| 213 | 212428_at | KIAA0368 | NM_001080398 |
| 214 | 213266_at | TUBGCP4 | NM_014444 |
| 215 | 201652_at | COPS5 | NM_006837 |
| 216 | 204211_x_at | EIF2AK2 | NM_001135651 |
| 217 | 201051_at | ANP32A | NM_006305 |
| 218 | 230998_at | — | — |
| 219 | 230664_at | H2BFM | NM_001164416 |
| 220 | 200979_at | PDHA1 | NM_000284 |
| 221 | 228623_at | — | — |
| 222 | 200767_s_at | FAM120A | NM_014612 |
| 223 | 201721_s_at | LAPTM5 | NM_006762 |
| 224 | 200030_s_at | SLC25A3 | NM_002635 |
| 225 | 215828_at | — | — |
| 226 | 237943_at | — | — |
| 227 | 1569369_at | ZFYVE28 | NM_020972 |
| 228 | 204216_s_at | ZC3H14 | NM_001160103 |
| 229 | 202796_at | SYNPO | NM_001109974 |
| 230 | 226656_at | CRTAP | NM_006371 |
| 231 | 212234_at | ASXL1 | NM_015338 |
| 232 | 209715_at | CBX5 | NM_001127321 |
| 233 | 200016_x_at | HNRNPA1 | NM_002136 |
| 234 | 209078_s_at | TXN2 | NM_012473 |
| 235 | 204275_at | SOLH | NM_005632 |
| 236 | 1566501_at | — | — |
| 237 | 228091_at | STX17 | NM_017919 |
| 238 | 1554096_a_at | RBM33 | NM_053043 |
| 239 | 209358_at | TAF11 | NM_005643 |
| 240 | 1554628_at | ZNF57 | NM_173480 |
| 241 | 203379_at | RPS6KA1 | NM_001006665 |
| 242 | 1569999_at | — | — |
| 243 | 232628_at | — | — |
| 244 | 219004_s_at | C21orf45 | NM_018944 |
| 245 | 222043_at | CLU | NM_001831 |
| 246 | 212527_at | PPPDE2 | NM_015704 |
| 247 | 235114_x_at | HOOK3 | NM_032410 |
| 248 | 232188_at | AKAP13 | NM_006738 |
| 249 | 209735_at | ABCG2 | NM_004827 |
| 250 | 207604_s_at | SLC4A7 | NM_003615 |
| 251 | 224990_at | C4orf34 | NM_174921 |
| 252 | 235840_at | — | — |
| 253 | 232648_at | PSMA3 | NM_002788 |
| 254 | 220213_at | TSHZ2 | NM_173485 |
| 255 | 218912_at | GCC1 | NM_024523 |
| 256 | 219963_at | DUSP13 | NM_001007271 |
| 257 | 214783_s_at | ANXA11 | NM_001157 |
| 258 | 213836_s_at | WIPI1 | NM_017983 |
| 259 | 202184_s_at | NUP133 | NM_018230 |
| 260 | 237317_at | — | — |
| 261 | 214016_s_at | SFPQ | NM_005066 |
| 262 | 236901_at | — | — |
| 263 | 204025_s_at | PDCD2 | NM_002598 |
| 264 | 208740_at | SAP18 | NM_005870 |
| 265 | 201083_s_at | BCLAF1 | NM_001077440 |
| 266 | 208087_s_at | ZBP1 | NM_001160417 |
| 267 | 202941_at | NDUFV2 | NM_021074 |
| 268 | 215545_at | — | — |
| 269 | 201088_at | KPNA2 | NM_002266 |
| 270 | 1556007_s_at | — | — |
| 271 | 212859_x_at | MT1E | NM_175617 |
| 272 | 204245_s_at | RPP14 | NM_001098783 |
| 273 | 210965_x_at | CDC2L5 | NM_003718 |
| 274 | 204116_at | IL2RG | NM_000206 |
| 275 | 219409_at | SNIP1 | NM_024700 |
| 276 | 204962_s_at | CENPA | NM_001042426 |
| 277 | 221535_at | LSG1 | NM_018385 |
| 278 | 228200_at | ZNF252 | NR_023392 |
| 279 | 203905_at | PARN | NM_001134477 |
| 280 | 212415_at | 38961 | NM_015129 |
| 281 | 232427_at | ZNF224 | NM_013398 |
| 282 | 226052_at | BRD4 | NM_014299 |
| 283 | 227346_at | IKZF1 | NM_006060 |
| 284 | 201588_at | TXNL1 | NM_004786 |
| 285 | 1561880_a_at | SIGLEC16 | NR_002825 |
| 286 | 221529_s_at | PLVAP | NM_031310 |
| 287 | 224686_x_at | LRRC37A2 | NM_001006607 |
| 288 | 201762_s_at | PSME2 | NM_002818 |
| 289 | 210732_s_at | LGALS8 | NM_006499 |
| 290 | 229897_at | ZNF641 | NM_152320 |
| 291 | 203836_s_at | MAP3K5 | NM_005923 |
| 292 | 220439_at | RIN3 | NM_024832 |
| 293 | 213193_x_at | TRBC1 | — |
| 294 | 225125_at | MMGT1 | NM_173470 |
| 295 | 1555884_at | PSMD6 | NM_014814 |
| 296 | 210277_at | AP4S1 | NM_001128126 |
| 297 | 223946_at | MED23 | NM_004830 |
| 298 | 212346_s_at | MXD4 | NM_006454 |
| 299 | 203799_at | CD302 | NM_014880 |
| 300 | 228158_at | LOC645166 | NR_027238 |
| 301 | 238140_at | ARV1 | NM_022786 |
| 302 | 236703_at | NT5C2 | NM_001134373 |
| 303 | 1565651_at | ARF1 | NM_001024226 |
| 304 | 200988_s_at | PSME3 | NM_005789 |
| 305 | 206652_at | ZMYM5 | NM_001039649 |
| 306 | 202717_s_at | CDC16 | NM_001078645 |
| 307 | 1554424_at | FIP1L1 | NM_001134937 |
| 308 | 231557_at | — | — |
| 309 | 1557520_a_at | — | — |
| 310 | 200751_s_at | HNRNPC | NM_001077442 |
| 311 | 209299_x_at | PPIL2 | NM_014337 |
| 312 | 238704_at | — | — |
| 313 | 1555906_s_at | C3orf23 | NM_001029839 |
| 314 | 232034_at | LOC203274 | — |
| 315 | 1568907_at | — | — |
| 316 | 232330_at | C7orf44 | NM_018224 |
| 317 | 1563687_a_at | FRYL | NM_015030 |
| 318 | 226107_at | — | — |
| 319 | 214472_at | HIST1H2AD | NM_003530 |
| 320 | 208978_at | CRIP2 | NM_001312 |
| 321 | 222975_s_at | CSDE1 | NM_001007553 |
| 322 | 232569_at | — | — |
| 323 | 230735_at | — | — |
| 324 | 203497_at | MED1 | NM_004774 |
| 325 | 219138_at | RPL14 | NM_001034996 |
| 326 | 200815_s_at | PAFAH1B1 | NM_000430 |
| 327 | 233545_at | INPP5D | NM_001017915 |
| 328 | 208876_s_at | PAK2 | NM_002577 |
| 329 | 204533_at | CXCL10 | NM_001565 |
| 330 | 241752_at | SLC8A1 | NM_001112800 |
| 331 | 202768_at | FOSB | NM_001114171 |
| 332 | 234991_at | ZXDC | NM_001040653 |
| 333 | 228818_at | — | — |
| 334 | 218805_at | GIMAP5 | NM_018384 |
| 335 | 219001_s_at | DCAF10 | NM_024345 |
| 336 | 202386_s_at | KIAA0430 | NM_014647 |
| 337 | 228624_at | TMEM144 | NM_018342 |
| 338 | 236971_at | — | — |
| 339 | 202840_at | TAF15 | NM_003487 |
| 340 | 209124_at | MYD88 | NM_002468 |
| 341 | 210136_at | MBP | NM_001025081 |
| 342 | 202003_s_at | ACAA2 | NM_006111 |
| 343 | 238788_at | LOC494150 | — |
| 344 | 243598_at | — | — |
| 345 | 222909_s_at | BAG4 | NM_004874 |
| 346 | 218641_at | LOC65998 | NM_001144936 |
| 347 | 239104_at | MGC42157 | XR_017710 |
| 348 | 1558354_s_at | — | — |
| 349 | 238257_at | MLLT10 | NM_001009569 |
| 350 | 1568830_at | IRAK3 | NM_001142523 |
| 351 | 231937_at | — | — |
| 352 | 212766_s_at | ISG20L2 | NM_030980 |
| 353 | 1569652_at | MLLT3 | NM_004529 |
| 354 | 223832_s_at | CAPNS2 | NM_032330 |
| 355 | 227249_at | NDE1 | NM_001143979 |
| 356 | 209162_s_at | PRPF4 | NM_004697 |
| 357 | 210943_s_at | LYST | NM_000081 |
| 358 | 213963_s_at | SAP30 | NM_003864 |
| 359 | 233079_at | MERTK | NM_006343 |
| 360 | 242945_at | FAM20A | NM_017565 |
| 361 | 239213_at | SERPINB1 | NM_030666 |
| 362 | 226229_s_at | SSU72 | NM_014188 |
| 363 | 212124_at | ZMIZ1 | NM_020338 |
| 364 | 224357_s_at | MS4A4A | NM_024021 |
| 365 | 236273_at | NBPF1 | NM_017940 |
| 366 | 204526_s_at | TBC1D8 | NM_001102426 |
| 367 | 233263_at | — | — |
| 368 | 209907_s_at | ITSN2 | NM_006277 |
| 369 | 201880_at | ARIH1 | NM_005744 |
| 370 | 218448_at | C20orf11 | NM_017896 |
| 371 | 243631_at | MPHOSPH8 | NM_017520 |
| 372 | 238026_at | RPL35A | NM_000996 |
| 373 | 218454_at | PLBD1 | NM_024829 |
| 374 | 202172_at | VEZF1 | NM_007146 |
| 375 | 209161_at | PRPF4 | NM_004697 |
| 376 | 201470_at | GSTO1 | NM_004832 |
| 377 | 206335_at | GALNS | NM_000512 |
| 378 | 204061_at | PRKX | NM_005044 |
| 379 | 203368_at | CRELD1 | NM_001031717 |
| 380 | 235309_at | RPS15A | NM_001019 |
| 381 | 226874_at | KLHL8 | NM_020803 |
| 382 | 217905_at | C10orf119 | NM_024834 |
| 383 | 215175_at | PCNX | NM_014982 |
| 384 | 1555793_a_at | ZFP82 | NM_133466 |
| 385 | 235681_at | — | — |
| 386 | 243315_at | — | — |
| 387 | 205475_at | SCRG1 | NM_007281 |
| 388 | 239902_at | — | — |
| 389 | 216134_at | FRMD4B | NM_015123 |
| 390 | 235119_at | TAF3 | NM_031923 |
| 391 | 1553333_at | C1orf161 | NM_152367 |
| 392 | 203113_s_at | EEF1D | NM_001130053 |
| 393 | 235518_at | SLC8A1 | NM_001112800 |
| 394 | 217555_at | SMC1A | NM_006306 |
| 395 | 227854_at | — | — |
| 396 | 225613_at | MAST4 | NM_015183 |
| 397 | 201739_at | SGK1 | NM_001143676 |
| 398 | 201960_s_at | MYCBP2 | NM_015057 |
| 399 | 221571_at | TRAF3 | NM_003300 |
| 400 | 221819_at | RAB35 | NM_006861 |
| 401 | 203298_s_at | JARID2 | NM_004973 |
| 402 | 1558459_s_at | LOC401320 | XM_379482 |
| 403 | 57516_at | ZNF764 | NM_033410 |
| 404 | 202714_s_at | KIAA0391 | NM_014672 |
| 405 | 1559614_at | FLJ38773 | XR_001008 |
| 406 | 223027_at | SNX9 | NM_016224 |
| 407 | 201927_s_at | PKP4 | NM_001005476 |
| 408 | 200699_at | KDELR2 | NM_001100603 |
| 409 | 223189_x_at | MLL5 | NM_018682 |
| 410 | 215507_x_at | — | — |
| 411 | 219385_at | SLAMF8 | NM_020125 |
| 412 | 218039_at | NUSAP1 | NM_001129897 |
| 413 | 1567101_at | — | — |
| 414 | 1563629_a_at | — | — |
| 415 | 217894_at | KCTD3 | NM_016121 |
| 416 | 212814_at | AHCYL2 | NM_001130720 |
| 417 | 205692_s_at | CD38 | NM_001775 |
| 418 | 233186_s_at | BANP | NM_017869 |
| 419 | 219308_s_at | AK5 | NM_012093 |
| 420 | 1556750_at | LOC153577 | — |
| 421 | 203676_at | GNS | NM_002076 |
| 422 | 234865_at | LOC100293705 | XM_002346051 |
| 423 | 209555_s_at | CD36 | NM_000072 |
| 424 | 200633_at | UBB | NM_018955 |
| 425 | 203065_s_at | CAV1 | NM_001753 |
| 426 | 235959_at | — | — |
| 427 | 218047_at | OSBPL9 | NM_024586 |
| 428 | 218358_at | CRELD2 | NM_001135101 |
| 429 | 228138_at | ZNF498 | NM_145115 |
| 430 | 226913_s_at | SOX8 | NM_014587 |
| 431 | 1560705_at | — | — |
| 432 | 232821_at | GTSF1L | NM_001008901 |
| 433 | 239679_at | — | — |
| 434 | 237953_at | — | — |
| 435 | 220560_at | C11orf21 | NM_001142946 |
| 436 | 220797_at | METT10D | NM_024086 |
| 437 | 219112_at | RAPGEF6 | NM_001164386 |
| 438 | 235061_at | PPM1K | NM_152542 |
| 439 | 212945_s_at | MGA | NM_001080541 |
| 440 | 218232_at | C1QA | NM_015991 |
| 441 | 213604_at | TCEB3 | NM_003198 |
| 442 | 229659_s_at | — | — |
| 443 | 212794_s_at | KIAA1033 | NM_015275 |
| 444 | 218969_at | Magmas | NM_016069 |
| 445 | 1555487_a_at | ACTR3B | NM_001040135 |
| 446 | 207129_at | CA5B | NM_007220 |
| 447 | 244578_at | LCP2 | NM_005565 |
| 448 | 225407_at | MBP | NM_001025081 |
| 449 | 230515_at | — | — |
| 450 | 232559_at | — | — |
| 451 | 244726_at | — | — |
| 452 | 238644_at | MYSM1 | NM_001085487 |
| 453 | 203240_at | FCGBP | NM_003890 |
| 454 | 236399_at | — | — |
| 455 | 223492_s_at | LRRFIP1 | NM_001137550 |
| 456 | 203234_at | UPP1 | NM_003364 |
| 457 | 213260_at | FOXC1 | NM_001453 |
| 458 | 216142_at | — | — |
| 459 | 233072_at | NTNG2 | NM_032536 |
| 460 | 228660_x_at | SEMA4F | NM_004263 |
| 461 | 238107_at | — | — |
| 462 | 201376_s_at | HNRNPF | NM_001098204 |
| 463 | 210317_s_at | YWHAE | NM_006761 |
| 464 | 218426_s_at | RNF216 | NM_207111 |
| 465 | 239637_at | — | — |
| 466 | 224336_s_at | DUSP16 | NM_030640 |
| 467 | 244659_at | LOC100131015 | XM_001726042 |
| 468 | 1555950_a_at | CD55 | NM_000574 |
| 469 | 219284_at | HSPBAP1 | NM_024610 |
| 470 | 236007_at | AKAP10 | NM_007202 |
| 471 | 212601_at | ZZEF1 | NM_015113 |
| 472 | 233781_s_at | RIF1 | NM_018151 |
| 473 | 238109_at | — | — |
| 474 | 201305_x_at | ANP32B | NM_006401 |
| 475 | 210592_s_at | SAT1 | NM_002970 |
| 476 | 204140_at | TPST1 | NM_003596 |
| 477 | 227599_at | C3orf59 | NM_178496 |
| 478 | 1554287_at | TRIM4 | NM_033017 |
| 479 | 243470_at | — | — |
| 480 | 1562898_at | — | — |
| 481 | 239287_at | — | — |
| 482 | 1558938_at | — | — |
| 483 | 1557780_at | — | — |
| 484 | 207734_at | LAX1 | NM_001136190 |
| 485 | 214595_at | KCNG1 | NM_002237 |
| 486 | 236982_at | — | — |
| 487 | 1555608_at | CAPRIN2 | NM_001002259 |
| 488 | 228923_at | S100A6 | NM_014624 |
| 489 | 207968_s_at | MEF2C | NM_001131005 |
| 490 | 203927_at | NFKBIE | NM_004556 |
| 491 | 222306_at | — | — |
| 492 | 203130_s_at | KIF5C | NM_004522 |
| 493 | 219498_s_at | BCL11A | NM_018014 |
| 494 | 1557224_at | — | — |
| 495 | 223313_s_at | MAGED4 | NM_001098800 |
| 496 | 1555180_at | LOC100132686 | XR_078450 |
| 497 | 203632_s_at | GPRC5B | NM_016235 |
| 498 | 220387_s_at | HHLA3 | NM_001031693 |
| 499 | 217791_s_at | ALDH18A1 | NM_001017423 |
| 500 | 1559479_at | PI4K2B | NM_018323 |
| 501 | 1554600_s_at | LMNA | NM_005572 |
| 502 | 1569792_a_at | C12orf72 | NM_001135863 |
| 503 | 235071_at | WDR92 | NM_138458 |
| 504 | 243334_at | CACNA1D | NM_000720 |
| 505 | 234848_at | — | — |
| 506 | 201489_at | PPIF | NM_005729 |
| 507 | 210189_at | HSPA1L | NM_005527 |
| 508 | 221816_s_at | PHF11 | NM_001040443 |
| 509 | 231319_x_at | KIF9 | NM_001134878 |
| 510 | 202863_at | SP100 | NM_001080391 |
| 511 | 235699_at | REM2 | NM_173527 |
| 512 | 211930_at | HNRNPA3 | NM_194247 |
| 513 | 228349_at | — | — |
| 514 | 224516_s_at | CXXC5 | NM_016463 |
| 515 | 204099_at | SMARCD3 | NM_001003801 |
| 516 | 221589_s_at | ALDH6A1 | NM_005589 |
| 517 | 1569617_at | OSBP2 | NM_030758 |
| 518 | 212904_at | LRRC47 | NM_020710 |
| 519 | 203007_x_at | LYPLA1 | NM_006330 |
| 520 | 236165_at | MSL3 | NM_006800 |
| 521 | 229404_at | TWIST2 | NM_057179 |
| 522 | 222234_s_at | DBNDD1 | NM_001042610 |
| 523 | 200659_s_at | PHB | NM_002634 |
| 524 | 226668_at | WDSUB1 | NM_001128212 |
| 525 | 219669_at | CD177 | NM_020406 |
| 526 | 208778_s_at | TCP1 | NM_001008897 |
| 527 | 203320_at | SH2B3 | NM_005475 |
| 528 | 226802_s_at | LOC96610 | NR_027293 |
| 529 | 1565928_at | — | — |
| 530 | 212259_s_at | PBXIP1 | NM_020524 |
| 531 | 231816_s_at | UBE2Q1 | NM_017582 |
| 532 | 228184_at | DISP1 | NM_032890 |
| 533 | 222821_s_at | GEMIN7 | NM_001007269 |
| 534 | 217722_s_at | NGRN | NM_001033088 |
| 535 | 1566171_at | RFFL | NM_001017368 |
| 536 | 233219_at | — | — |
| 537 | 1565894_at | — | — |
| 538 | 1569599_at | SAMSN1 | NM_022136 |
| 539 | 206761_at | CD96 | NM_005816 |
| 540 | 1556253_s_at | — | — |
| 541 | 1564053_a_at | YTHDF3 | NM_152758 |
| 542 | 229199_at | SCN9A | NM_002977 |
| 543 | 226734_at | EIF4E2 | NM_004846 |
| 544 | 226447_at | ASH1L | NM_018489 |
| 545 | 202985_s_at | BAG5 | NM_001015048 |
| 546 | 208180_s_at | HIST1H4H | NM_003543 |
| 547 | 217995_at | SQRDL | NM_021199 |
| 548 | 234172_at | — | — |
| 549 | 205169_at | RBBP5 | NM_005057 |
| 550 | 212387_at | TCF4 | NM_001083962 |
| 551 | 213293_s_at | TRIM22 | NM_006074 |
| 552 | 244536_at | — | — |
| 553 | 232306_at | CDH26 | NM_021810 |
| 554 | 212838_at | DNMBP | NM_015221 |
| 555 | 235033_at | NPEPL1 | NM_024663 |
| 556 | 203460_s_at | PSEN1 | NM_000021 |
| 557 | 209409_at | GRB10 | NM_001001549 |
| 558 | 216527_at | — | — |
| 559 | 1554453_at | HNRPLL | NM_001142650 |
| 560 | 226775_at | ENY2 | NM_020189 |
| 561 | 211152_s_at | HTRA2 | NM_013247 |
| 562 | 235825_at | — | — |
| 563 | 212594_at | PDCD4 | NM_014456 |
| 564 | 206059_at | ZNF91 | NM_003430 |
| 565 | 214184_at | NPFF | NM_003717 |
| 566 | 205392_s_at | CCL14 | NM_004166 |
| 567 | 213046_at | PABPN1 | NM_004643 |
| 568 | 234883_x_at | TRBV7-3 | — |
| 569 | 228650_at | — | — |
| 570 | 227112_at | TMCC1 | NM_001017395 |
| 571 | 217431_x_at | CYBB | NM_000397 |
| 572 | 202095_s_at | BIRC5 | NM_001012270 |
| 573 | 206026_s_at | TNFAIP6 | NM_007115 |
| 574 | 226651_at | HOMER1 | NM_004272 |
| 575 | 240859_at | — | — |
| 576 | 1555634_a_at | LILRA5 | NM_021250 |
| 577 | 235207_at | — | — |
| 578 | 231695_at | — | — |
| 579 | 213524_s_at | G0S2 | NM_015714 |
| 580 | 212318_at | TNPO3 | NM_012470 |
| 581 | 227329_at | ZBTB46 | NM_025224 |
| 582 | 203050_at | TP53BP1 | NM_001141979 |
| 583 | 219975_x_at | OLAH | NM_001039702 |
| 584 | 215671_at | PDE4B | NM_001037339 |
| 585 | 231260_at | BC036928 | — |
| 586 | 217513 _at | C17orf60 | NM_001085423 |
| 587 | 1556339_a_at | — | — |
| 588 | 208774_at | CSNK1D | NM_001893 |
| 589 | 221536_s_at | LSG1 | NM_018385 |
| 590 | 231641_at | FLJ10213 | NM_018029 |
| 591 | 202551_s_at | CRIM1 | NM_016441 |
| 592 | 204110_at | HNMT | NM_001024074 |
| 593 | 201235_s_at | BTG2 | NM_006763 |
| 594 | 219633_at | TTPAL | NM_001039199 |
| 595 | 227055_at | METTL7B | NM_152637 |
| 596 | 234427_at | TRAJ17 | — |
| 597 | 239819_at | — | — |
| 598 | 230762_at | — | — |
| 599 | 201651_s_at | PACSIN2 | NM_007229 |
| 600 | 244579_at | — | — |
| 601 | 233476_at | — | — |
| 602 | 1562576_at | — | — |
| 603 | 227589_at | PITPNC1 | NM_012417 |
| 604 | 209062_x_at | NCOA3 | NM_006534 |
| 605 | 236755_at | TBC1D23 | NM_018309 |
| 606 | 223608_at | EFCAB2 | NM_001143943 |
| 607 | 204079_at | TPST2 | NM_001008566 |
| 608 | 238789_at | KANK1 | NM_015158 |
| 609 | 213172_at | TTC9 | NM_015351 |
| 610 | 224582_s_at | NUCKS1 | NM_022731 |
| 611 | 243796_at | LOC100293311 | XM_002345033 |
| 612 | 213567_at | — | — |
| 613 | 242197_x_at | CD36 | NM_000072 |
| 614 | 244177_at | — | — |
| 615 | 210873_x_at | APOBEC3A | NM_145699 |
| 616 | 238929_at | SFRS2B | NM_032102 |
| 617 | 229756_at | — | — |
| 618 | 224681_at | GNA12 | NM_007353 |
| 619 | 242423_x_at | — | — |
| 620 | 219300_s_at | CNTNAP2 | NM_014141 |
| 621 | 209477_at | EMD | NM_000117 |
| 622 | 203088_at | FBLN5 | NM_006329 |
| 623 | 242947_at | — | — |
| 624 | 210609_s_at | TP53I3 | NM_004881 |
| 625 | 203660_s_at | PCNT | NM_006031 |
| 626 | 213755_s_at | — | — |
| 627 | 216297_at | — | — |
| 628 | 1559375_s_at | — | — |
| 629 | 217866_at | CPSF7 | NM_001136040 |
| 630 | 223337_at | SDCCAG10 | NM_005869 |
| 631 | 221524_s_at | RRAGD | NM_021244 |
| 632 | 216614_at | — | — |
| 633 | 220342_x_at | EDEM3 | NM_025191 |
| 634 | 218883_s_at | MLF1IP | NM_024629 |
| 635 | 217486_s_at | ZDHHC17 | NM_015336 |
| 636 | 236572_at | — | — |
| 637 | 203188_at | B3GNT1 | NM_006876 |
| 638 | 1564231_at | IFT80 | NM_020800 |
| 639 | 209765_at | ADAM19 | NM_023038 |
| 640 | 202902_s_at | CTSS | NM_004079 |
| 641 | 224369_s_at | FBXO38 | NM_030793 |
| 642 | 218876_at | TPPP3 | NM_015964 |
| 643 | 240099_at | — | — |
| 644 | 228119_at | LRCH3 | NM_032773 |
| 645 | 239130_at | — | — |
| 646 | 1560971_a_at | — | — |
| 647 | 222820_at | TNRC6C | NM_001142640 |
| 648 | 243476_at | NF1 | NM_000267 |
| 649 | 1558697_a_at | KIAA0430 | NM_014647 |
| 650 | 1558046_x_at | LOC100132864 | XM_001713861 |
| 651 | 241275_at | CAPZA1 | NM_006135 |
| 652 | 209425_at | AMACR | NM_014324 |
| 653 | 228835_at | — | — |
| 654 | 237901_at | — | — |
| 655 | 234785_at | — | — |
| 656 | 1557193_at | — | — |
| 657 | 244447_at | — | — |
| 658 | 204950_at | CARD8 | NM_014959 |
| 659 | 227410_at | FAM43A | NM_153690 |
| 660 | 205500_at | C5 | NM_001735 |
| 661 | 228394_at | STK10 | NM_005990 |
| 662 | 1561206_at | KLHL8 | NM_020803 |
| 663 | 48808_at | DHFR | NM_000791 |
| 664 | 228253_at | LOXL3 | NM_032603 |
| 665 | 227501_at | — | — |
| 666 | 226674_at | SHISA4 | NM_198149 |
| 667 | 202290_at | PDAP1 | NM_014891 |
| 668 | 237062_at | — | — |
| 669 | 1554665_at | ZNF586 | NM_017652 |
| 670 | 237082_at | — | — |
| 671 | 201206_s_at | RRBP1 | NM_001042576 |
| 672 | 1561615_s_at | SLC8A1 | NM_001112800 |
| 673 | 201783_s _at | RELA | NM_001145138 |
| 674 | 212180_at | CRKL | NM_005207 |
| 675 | 220289_s_at | AIM1L | NM_001039775 |
| 676 | 225157_at | MLXIP | NM_014938 |
| 677 | 237627_at | — | — |
| 678 | 203052_at | C2 | NM_000063 |
| 679 | 215030_at | GRSF1 | NM_001098477 |
| 680 | 208629_s_at | HADHA | NM_000182 |
| 681 | 201757_at | NDUFS5 | NM_004552 |
| 682 | 232251_at | NUDT16P | NR_002949 |
| 683 | 228468_at | MASTL | NM_032844 |
| 684 | 226989_at | RGMB | NM_001012761 |
| 685 | 1556257_at | LOC645513 | XR_078309 |
| 686 | 223194_s_at | SLC22A23 | NM_015482 |
| 687 | 212166_at | XPO7 | NM_001100161 |
| 688 | 240233_at | — | — |
| 689 | 1563053_at | LOC729083 | XM_001133289 |
| 690 | 1568915_at | — | — |
| 691 | 223121_s_at | SFRP2 | NM_003013 |
| 692 | 204067_at | SUOX | NM_000456 |
| 693 | 226313_at | C10orf35 | NM_145306 |
| 694 | 206636_at | RASA2 | NM_006506 |
| 695 | 212457_at | TFE3 | NM_006521 |
| 696 | 1553856_s_at | P2RY10 | NM_014499 |
| 697 | 230885_at | SPG7 | NM_003119 |
| 698 | 231357_at | CLEC12B | NM_001129998 |
| 699 | 241956_at | — | — |
| 700 | 201596_x_at | KRT18 | NM_000224 |
| 701 | 244026_at | — | — |
| 702 | 211072_x_at | TUBA1B | NM_006082 |
| 703 | 230619_at | ARNT | NM_001668 |
| 704 | 1554833_at | MCTP2 | NM_001159643 |
| 705 | 212388_at | USP24 | NM_015306 |
| 706 | 1566809_a_at | — | — |
| 707 | 235310_at | GCET2 | NM_001008756 |
| 708 | 211003_x_at | TGM2 | NM_004613 |
| 709 | 230036_at | SAMD9L | NM_152703 |
| 710 | 239391_at | FAM120AOS | NM_198841 |
| 711 | 214243_s_at | SERHL | NM_014509 |
| 712 | 240806_at | RPL15 | NM_002948 |
| 713 | 1554447_at | LOC554203 | NR_024582 |
| 714 | 242501_at | — | — |
| 715 | 209865_at | SLC35A3 | NM_012243 |
| 716 | 238961_s_at | FNDC3A | NM_001079673 |
| 717 | 1557465_at | RP11- | NR_027047 |
| | | 327P2.4 | |
| 718 | 1562608_at | — | — |
| 719 | 214394_x_at | EEF1D | NM_001130053 |
| 720 | 230796_at | LOC440900 | XR_041709 |
| 721 | 220546_at | MLL | NM_005933 |
| 722 | 210640_s_at | GPER | NM_001039966 |
| 723 | 1562745_at | — | — |
| 724 | 1556323_at | CUGBP2 | NM_001025076 |
| 725 | 213208_at | KIAA0240 | NM_015349 |
| 726 | 201143_s_at | EIF2S1 | NM_004094 |
| 727 | 202087_s_at | CTSL1 | NM_001912 |
| 728 | 1558279_a_at | KDSR | NM_002035 |
| 729 | 223591_at | RNF135 | NM_032322 |
| 730 | 202005_at | ST14 | NM_021978 |
| 731 | 242031_at | — | — |
| 732 | 204889_s_at | NEURL | NM_004210 |
| 733 | 217701_x_at | — | — |
| 734 | 213774_s_at | — | — |
| 735 | 235288_at | — | — |
| 736 | 204222_s_at | GLIPR1 | NM_006851 |
| 737 | 214513_s_at | CREB1 | NM_004379 |
| 738 | 201678_s_at | C3orf37 | NM_001006109 |
| 739 | 1563348_at | — | — |
| 740 | 1561306_s_at | STRC | NM_153700 |
| 741 | 223733_s_at | PPP4R1L | NR_003505 |
| 742 | 203308_x_at | HPS1 | NM_000195 |
| 743 | 232121_at | TRDMT1 | NM_004412 |
| 744 | 1556211_a_at | — | — |
| 745 | 232033_at | USP37 | NM_020935 |
| 746 | 202601_s_at | HTATSF1 | NM_001163280 |
| 747 | 212680_x_at | PPP1R14B | NM_138689 |
| 748 | 1563466_at | MYLK | NM_053025 |
| 749 | 219676_at | ZSCAN16 | NM_025231 |
| 750 | 1558586_at | ZNF33B | NM_006955 |
| 751 | 230886_at | — | — |
| 753 | 1560034_a_at | — | — |
| 754 | 221223_x_at | CISH | NM_013324 |
| 755 | 200999_s_at | CKAP4 | NM_006825 |
| 756 | 235456_at | — | — |
| 757 | 214766_s_at | AHCTF1 | NM_015446 |
| 758 | 202706_s_at | UMPS | NM_000373 |
| 759 | 233176_at | — | — |
| 760 | 227449_at | EPHA4 | NM_004438 |
| 761 | 225655_at | UHRF1 | NM_001048201 |
| 762 | 236024_at | GPM6A | NM_005277 |
| 763 | 207654_x_at | DR1 | NM_001938 |
| 764 | 236094_at | TCF7L2 | NM_001146274 |
| 765 | 230166_at | KIAA1958 | NM_133465 |
| 766 | 229008_at | WDR60 | NM_018051 |
| 767 | 210817_s_at | CALCOCO2 | NM_005831 |
| 768 | 1560069_at | PLEKHM3 | NM_001080475 |
| 769 | 236113_at | — | — |
| 770 | 202794_at | INPP1 | NM_001128928 |
| 771 | 231174_s_at | — | — |
| 772 | 1559459_at | LOC613266 | NM_001033516 |
| 773 | 238892_at | — | — |
| 774 | 203803_at | PCYOX1 | NM_016297 |
| 775 | 221801_x_at | NEFL | NM_006158 |
| 776 | 222449_at | PMEPA1 | NM_020182 |
| 777 | 202954_at | UBE2C | NM_007019 |
| 778 | 1568997_at | — | — |
| 779 | 228769_at | ZSCAN22 | NM_181846 |
| 780 | 1557119_a_at | ZNF575 | NM_174945 |
| 781 | 200857_s_at | NCOR1 | NM_006311 |
| 782 | 234082_at | — | — |
| 783 | 243819_at | — | — |
| 784 | 206632_s_at | APOBEC3B | NM_004900 |
| 785 | 203430_at | HEBP2 | NM_014320 |
| 786 | 1555626_a_at | SLAMF1 | NM_003037 |
| 787 | 1559618_at | LOC100129447 | XM_001719594 |
| 788 | 1555058_a_at | LPGAT1 | NM_014873 |
| 789 | 221253_s_at | TXNDC5 | NM_001145549 |
| 790 | 219493_at | SHCBP1 | NM_024745 |
| 791 | 238607_at | ZNF296 | NM_145288 |
| 792 | 215411_s_at | TRAF3IP2 | NM_001164281 |
| 793 | 203616_at | POLB | NM_002690 |
| 794 | 206075_s_at | CSNK2A1 | NM_001895 |
| 795 | 232953_at | C20orf69 | NM_001104925 |
| 796 | 226652_at | USP3 | NM_006537 |
| 797 | 222413_s_at | MLL3 | NM_170606 |
| 798 | 214814_at | YTHDC1 | NM_001031732 |
| 799 | 228983_at | — | — |
| 800 | 215342_s_at | RABGAP1L | NM_001035230 |
| 801 | 227737_at | SRPRB | NM_021203 |
| 802 | 233033_at | ZEB2 | NM_014795 |
| 803 | 209378_s_at | FAM190B | NM_018999 |
| 804 | 209105_at | NCOA1 | NM_003743 |
| 805 | 221833_at | LONP2 | NM_031490 |
| 806 | 239516_at | — | — |
| 807 | 205798_at | IL7R | NM_002185 |
| 808 | 200868_s_at | RNF114 | NM_018683 |
| 809 | 1564639_at | LOC389906 | XM_001713861 |
| 810 | 203633_at | CPT1A | NM_001031847 |
| 811 | 223588_at | THAP2 | NM_031435 |
| 812 | 202349_at | TOR1A | NM_000113 |
| 813 | 200600_at | MSN | NM_002444 |
| 814 | 201196_s_at | AMD1 | NM_001033059 |
| 815 | 208642_s_at | XRCC5 | NM_021141 |
| 816 | 231340_at | — | — |
| 817 | 210253_at | HTATIP2 | NM_001098520 |
| 818 | 212624_s_at | CHN1 | NM_001025201 |
| 819 | 228478_at | — | — |
| 820 | 1569154_a_at | — | — |
| 821 | 1553857_at | IGSF22 | NM_173588 |
| 822 | 224567_x_at | MALAT1 | NR_002819 |
| 823 | 221215_s_at | RIPK4 | NM_020639 |
| 824 | 200710_at | ACADVL | NM_000018 |
| 825 | 220302_at | MAK | NM_005906 |
| 826 | 214499_s_at | BCLAF1 | NM_001077440 |
| 827 | 238836_at | — | — |
| 828 | 213256_at | MARCH3 | NM_178450 |
| 829 | 226095_s_at | ATXN1L | NM_001137675 |
| 830 | 203816_at | DGUOK | NM_080916 |
| 831 | 209307_at | SWAP70 | NM_015055 |
| 832 | 201144_s_at | EIF2S1 | NM_004094 |
| 833 | 236707_at | DAPP1 | NM_014395 |
| 834 | 240703_s_at | HERC1 | NM_003922 |
| 835 | 229720_at | BAG1 | NM_004323 |
| 836 | 238037_at | LMLN | NM_001136049 |
| 837 | 200597_at | EIF3A | NM_003750 |
| 838 | 207563_s_at | OGT | NM_181672 |
| 839 | 241441_at | — | — |
| 840 | 217961_at | SLC25A38 | NM_017875 |
| 841 | 225696_at | COPS7B | NM_022730 |
| 842 | 211721_s_at | ZNF551 | NM_138347 |
| 843 | 212095_s_at | MTUS1 | NM_001001924 |
| 844 | 242857_at | — | — |
| 845 | 241421_at | — | — |
| 846 | 225119_at | CHMP4B | NM_176812 |
| 847 | 243375_at | — | — |
| 848 | 202239_at | PARP4 | NM_006437 |
| 849 | 200819_s_at | RPS15 | NM_001018 |
| 850 | 237218_at | — | — |
| 851 | 1570124_at | — | — |
| 852 | 217225_x_at | NOMO1 | NM_001004060 |
| 853 | 215220_s_at | TPR | NM_003292 |
| 854 | 228899_at | LOC100132884 | XR_078381 |
| 855 | 222880_at | AKT3 | NM_005465 |
| 856 | 218820_at | C14orf132 | NR_023938 |
| 857 | 223892_s_at | TMBIM4 | NM_016056 |
| 858 | 229907_at | — | — |
| 859 | 209536_s_at | EHD4 | NM_139265 |
| 860 | 240899_at | — | — |
| 861 | 221267_s_at | FAM108A1 | NM_001130111 |
| 862 | 216069_at | — | — |
| 863 | 215390_at | — | — |
| 864 | 224583_at | COTL1 | NM_021149 |
| 865 | 205248_at | DOPEY2 | NM_005128 |
| 866 | 227820_at | TBC1D25 | NM_002536 |
| 867 | 208934_s_at | LGALS8 | NM_006499 |
| 868 | 229364_at | LOC646870 | XR_040282 |
| 869 | 222073_at | COL4A3 | NM_000091 |
| 870 | 219757_s_at | C14orf101 | NM_017799 |
| 871 | 226013_at | TRAK1 | NM_001042646 |
| 872 | 239922_at | CCDC142 | NM_032779 |
| 873 | 242966_x_at | — | — |
| 874 | 224229_s_at | AKT3 | NM_005465 |
| 875 | 218464_s_at | C17orf63 | NM_001077498 |
| 876 | 204924_at | TLR2 | NM_003264 |
| 877 | 228532_at | C1orf162 | NM_174896 |
| 878 | 1560060_s_at | VPS37C | NM_017966 |
| 879 | 1559282_at | — | — |
| 880 | 217380_s_at | XPNPEP1 | NM_020383 |
| 881 | 223002_s_at | XRN2 | NM_012255 |
| 882 | 229145_at | C10orf104 | NM_173473 |
| 883 | 224911_s_at | DCBLD2 | NM_080927 |
| 884 | 205466_s_at | HS3ST1 | NM_005114 |
| 885 | 203907_s_at | IQSEC1 | NM_001134382 |
| 886 | 232645_at | LOC153684 | NR_015447 |
| 887 | 233575_s_at | TLE4 | NM_007005 |
| 888 | 200019_s_at | FAU | NM_001997 |
| 889 | 225738_at | RAPGEF1 | NM_005312 |
| 890 | 1561018_at | — | — |
| 891 | 236460_at | — | — |
| 892 | 217518_at | MYOF | NM_013451 |
| 893 | 212836_at | POLD3 | NM_006591 |
| 894 | 213264_at | PCBP2 | NM_001098620 |
| 895 | 1557852_at | — | — |
| 896 | 202708_s_at | HIST2H2BE | NM_003528 |
| 897 | 231763_at | POLR3A | NM_007055 |
| 898 | 223259_at | ORMDL3 | NM_139280 |
| 899 | 213729_at | PRPF40A | NM_017892 |
| 900 | 219978_s_at | NUSAP1 | NM_001129897 |
| 901 | 222674_at | C9orf114 | NM_016390 |
| 902 | 223363_at | PSMG3 | NM_001134340 |
| 903 | 221188_s_at | CIDEB | NM_014430 |
| 904 | 223059_s_at | FAM107B | NM_031453 |
| 905 | 220557_s_at | PACS1 | NM_018026 |
| 906 | 219576_at | MAP7D3 | NM_024597 |
| 907 | 204326_x_at | MT1X | NM_005952 |
| 908 | 235575_at | — | — |
| 909 | 201256_at | COX7A2L | NM_004718 |
| 910 | 226645_at | KLF2 | NM_016270 |
| 911 | 1559050_at | HCG27 | NR_026791 |
| 912 | 212114_at | LOC552889 | NM_001136262 |
| 913 | 209948_at | KCNMB1 | NM_004137 |
| 914 | 236407_at | KCNE1 | NM_000219 |
| 915 | 240481_at | — | — |
| 916 | 208195_at | TTN | NM_003319 |
| 917 | 203728_at | BAK1 | NM_001188 |
| 918 | 227684_at | S1PR2 | NM_004230 |
| 919 | 236002_at | — | — |
| 920 | 204270_at | SKI | NM_003036 |
| 921 | 202345_s_at | FABP5 | NM_001444 |
| 922 | 219745_at | TMEM180 | NM_024789 |
| 923 | 235802_at | PLD4 | NM_138790 |
| 924 | 230375_at | SFRS18 | NM_015491 |
| 925 | 219066_at | PPCDC | NM_021823 |
| 926 | 1560339_s_at | NAP1L4 | NM_005969 |
| 927 | 203110_at | PTK2B | NM_004103 |
| 928 | 219630_at | PDZK1IP1 | NM_005764 |
| 929 | 244307_s_at | — | — |
| 930 | 238758_at | — | — |
| 931 | 214917_at | PRKAA1 | NM_006251 |
| 932 | 218276_s_at | SAV1 | NM_021818 |
| 933 | 228193_s_at | C13orf15 | NM_014059 |
| 934 | 227037_at | PLD6 | NM_178836 |
| 935 | 225831_at | LUZP1 | NM_001142546 |
| 936 | 237210_at | NFRKB | NM_001143835 |
| 937 | 221206_at | PMS2 | NM_000535 |
| 938 | 221499_s_at | STX16 | NM_001001433 |
| 939 | 222217_s_at | SLC27A3 | NM_024330 |
| 940 | 238523_at | KLHL36 | NM_024731 |
| 941 | 202048_s_at | CBX6 | NM_014292 |
| 942 | 212856_at | GRAMD4 | NM_015124 |
| 943 | 225759_x_at | CLMN | NM_024734 |
| 944 | 217606_at | — | — |
| 945 | 200973_s_at | TSPAN3 | NM_005724 |
| 946 | 230970_at | — | — |
| 947 | 228932_at | — | — |
| 948 | 209338_at | TFCP2 | NM_005653 |
| 949 | 205758_at | CD8A | NM_001145873 |
| 950 | 225065_x_at | NCRNA00188 | NM_152350 |
| 951 | 203358_s_at | EZH2 | NM_004456 |
| 952 | 209375_at | XPC | NM_001145769 |
| 953 | 232489_at | CCDC76 | NM_019083 |
| 954 | 239723_at | — | — |
| 955 | 1552641_s_at | ATAD3A | NM_018188 |
| 956 | 1558220_at | MUC20 | NM_001098516 |
| 957 | 239960_x_at | LYRM7 | NM_181705 |
| 958 | 225212_at | SLC25A25 | NM_001006641 |
| 959 | 214815_at | TRIM33 | NM_015906 |
| 960 | 212135_s_at | ATP2B4 | NM_001001396 |
| 961 | 232952_at | — | — |
| 962 | 1556053_at | DNAJC7 | NM_001144766 |
| 963 | 232346_at | LOC388692 | NR_027002 |
| 964 | 228967_at | EIF1 | NM_005801 |
| 965 | 239556_at | LOC645513 | XR_078309 |
| 966 | 226863_at | FAM110C | NM_001077710 |
| 967 | 229810_at | — | — |
| 968 | 236669_at | — | — |
| 969 | 222480_at | UBE2Q1 | NM_017582 |
| 970 | 228281_at | C11orf82 | NM_145018 |
| 971 | 216945_x_at | PASK | NM_015148 |
| 972 | 207434_s_at | FXYD2 | NM_001127489 |
| 973 | 201674_s_at | AKAP1 | NM_003488 |
| 974 | 239037_at | GNAS | NM_000516 |
| 975 | 1560434_x_at | CLTA | NM_001076677 |
| 976 | 244556_at | LCP2 | NM_005565 |
| 977 | 1552386_at | GAPT | NM_152687 |
| 978 | 222906_at | FLVCR1 | NM_014053 |
| 979 | 1554057_at | LOC645676 | NR_027023 |
| 980 | 204512_at | HIVEP1 | NM_002114 |
| 981 | 210512_s_at | VEGFA | NM_001025366 |
| 982 | 223816_at | SLC46A2 | NM_033051 |
| 983 | 239251_at | — | — |
| 984 | 208998_at | UCP2 | NM_003355 |
| 985 | 213810_s_at | LOC100292682 | XM_002345924 |
| 986 | 207194_s_at | ICAM4 | NM_001039132 |
| 987 | 226372_at | CHST11 | NM_018413 |
| 988 | 201792_at | AEBP1 | NM_001129 |
| 989 | 221203_s_at | YEATS2 | NM_018023 |
| 990 | 1562019_at | NT5DC4 | XM_001715677 |
| 991 | 205613_at | SYT17 | NM_016524 |
| 992 | 221581_s_at | LAT2 | NM_014146 |
| 993 | 244834_at | C1orf134 | — |
| 994 | 201557_at | VAMP2 | NM_014232 |
| 995 | 225549_at | DDX6 | NM_004397 |
| 996 | 201800_s_at | OSBP | NM_002556 |
| 997 | 202548_s_at | ARHGEF7 | NM_001113511 |
| 998 | 222243_s_at | TOB2 | NM_016272 |
| 999 | 2028_s_at | E2F1 | NM_005225 |
| 1000 | 223000_s_at | F11R | NM_016946 |
| 1001 | 222282_at | — | — |
| 1002 | 230252_at | LPAR5 | NM_001142961 |
| 1003 | 227152_at | C12orf35 | NM_018169 |
| 1004 | 242877_at | — | — |
| 1005 | 236908_at | — | — |
| 1006 | 201365_at | OAZ2 | NM_002537 |
| 1007 | 241117_at | LOXHD1 | NM_001145472 |
| 1008 | 230663_at | — | — |
| 1009 | 209579_s_at | MBD4 | NM_003925 |
| 1010 | 1562007_at | — | — |
| 1011 | 222672_at | LYRM4 | NM_020408 |
| 1012 | 206842_at | KCND1 | NM_004979 |
| 1013 | 213034_at | QSK | NM_025164 |
| 1014 | 203764_at | DLGAP5 | NM_001146015 |
| 1015 | 239014_at | CCAR1 | NM_018237 |
| 1016 | 204029_at | CELSR2 | NM_001408 |
| 1017 | 204711_at | KIAA0753 | NM_014804 |
| 1018 | 221595_at | — | — |
| 1019 | 1552671_a_at | SLC9A7 | NM_032591 |
| 1020 | 226066_at | MITF | NM_000248 |
| 1021 | 1553364_at | PNPLA1 | NM_001145716 |
| 1022 | 224653_at | EIF4EBP2 | NM_004096 |
| 1023 | 1564435_a_at | KRT72 | NM_001146225 |
| 1024 | 229253_at | THEM4 | NM_053055 |
| 1025 | 222044_at | PCIF1 | NM_022104 |
| 1026 | 241705_at | ABCA5 | NM_018672 |
| 1027 | 228469_at | PPID | NM_005038 |
| 1028 | 204858_s_at | TYMP | NM_001113755 |
| 1029 | 201621_at | NBL1 | NM_005380 |
| 1030 | 234492_at | — | — |
| 1031 | 212906_at | GRAMD1B | NM_020716 |
| 1032 | 231116_at | — | — |
| 1033 | 232782_at | — | — |
| 1034 | 224978_s_at | USP36 | NM_025090 |
| 1035 | 225471_s_at | AKT2 | NM_001626 |
| 1036 | 1556496_a_at | — | — |
| 1037 | 224717_s_at | C19orf42 | NM_024104 |
| 1038 | 241819_at | TNFSF8 | NM_001244 |
| 1039 | 202286_s_at | TACSTD2 | NM_002353 |
| 1040 | 219198_at | GTF3C4 | NM_012204 |
| 1041 | 202800_at | SLC1A3 | NM_004172 |
| 1042 | 208003_s_at | NFAT5 | NM_001113178 |
| 1043 | 36030_at | IFFO1 | NM_001039670 |
| 1044 | 219826_at | ZNF419 | NM_001098491 |
| 1045 | 214005_at | GGCX | NM_000821 |
| 1046 | 241669_x_at | PRKD2 | NM_001079880 |
| 1047 | 227122_at | ZNF791 | NM_153358 |
| 1048 | 205560_at | PCSK5 | NM_006200 |
| 1049 | 1564378_a_at | — | — |
| 1050 | 240721_at | — | — |
| 1051 | 228306_at | CNIH4 | NM_014184 |
| 1052 | 202074_s_at | OPTN | NM_001008211 |
| 1053 | 210559_s_at | CDC2 | NM_001130829 |
| 1054 | 206873_at | CA6 | NM_001215 |
| 1055 | 225221_at | — | — |
| 1056 | 213180_s_at | GOSR2 | NM_001012511 |
| 1057 | 200622_x_at | CALM3 | NM_005184 |
| 1058 | 229413_s_at | — | — |
| 1059 | 220466_at | CCDC15 | NM_025004 |
| 1060 | 229817_at | ZNF608 | NM_020747 |
| 1061 | 238417_at | PGM2L1 | NM_173582 |
| 1062 | 240845_at | — | — |
| 1063 | 238016_s_at | LOC100129105 | — |
| 1064 | 226765_at | SPTBN1 | NM_003128 |
| 1065 | 217856_at | RBM8A | NM_005105 |
| 1066 | 220865_s_at | PDSS1 | NM_014317 |
| 1067 | 232588_at | STAG1 | NM_005862 |
| 1068 | 201736_s_at | MARCH6 | NM_005885 |
| 1069 | 1561195_at | — | — |
| 1070 | 236422_at | — | — |
| 1071 | 209118_s_at | TUBA1A | NM_006009 |
| 1072 | 229622_at | FAM132B | XM_001130886 |
| 1073 | 227490_at | WDFY2 | NM_052950 |
| 1074 | 226517_at | BCAT1 | NM_005504 |
| 1075 | 230405_at | C5orf56 | NM_001013717 |
| 1076 | 201543_s_at | SAR1A | NM_001142648 |
| 1077 | 200855_at | C20orf191 | NM_006311 |
| 1078 | 209193_at | PIM1 | NM_002648 |
| 1079 | 216857_at | — | — |
| 1080 | 225207_at | PDK4 | NM_002612 |
| 1081 | 203969_at | PEX3 | NM_003630 |
| 1082 | 243444_at | SRD5A3 | NM_024592 |
| 1083 | 227091_at | CCDC146 | NM_020879 |
| 1084 | 1007_s_at | DDR1 | NM_001954 |
| 1085 | 205493_s_at | DPYSL4 | NM_006426 |
| 1086 | 208304_at | CCR3 | NM_001837 |
| 1087 | 210470_x_at | NONO | NM_001145408 |
| 1088 | 210947_s_at | MSH3 | NM_002439 |
| 1089 | 218561_s_at | LYRM4 | NM_020408 |
| 1090 | 208613_s_at | FLNB | NM_001164317 |
| 1091 | 227436_at | OTUD7B | NM_020205 |
| 1092 | 242729_at | — | — |
| 1093 | 237387_at | — | — |
| 1094 | 206005_s_at | KIAA1009 | NM_014895 |
| 1095 | 218807_at | VAV3 | NM_001079874 |
| 1096 | 219371_s_at | KLF2 | NM_016270 |
| 1097 | 243858_at | — | — |
| 1098 | 219412_at | RAB38 | NM_022337 |
| 1099 | 233224_at | — | — |
| 1100 | 226571_s_at | PTPRS | NM_002850 |
| 1101 | 212828_at | SYNJ2 | NM_003898 |
| 1102 | 239212_at | LTV1 | NM_032860 |
| 1103 | 241763_s_at | FBXO32 | NM_058229 |
| 1104 | 1570566_at | LOC100292 | XM_002345815 |
| | | 875 | |
| 1105 | 1554985_at | ZNF396 | NM_145756 |
| 1106 | 202291_s_at | MGP | NM_000900 |
| 1107 | 235308_at | ZBTB20 | NM_015642 |
| 1108 | 219433_at | BCOR | NM_001123383 |
| 1109 | 230023_at | NSUN4 | NM_199044 |
| 1110 | 204578_at | HISPPD2A | NM_001024463 |
| 1111 | 212599_at | AUTS2 | NM_001127231 |
| 1112 | 236836_at | — | — |
| 1113 | 234088_at | — | — |
| 1114 | 222667_s_at | ASH1L | NM_018489 |
| 1115 | 231221_at | CLEC16A | NM_015226 |
| 1116 | 202449_s_at | RXRA | NM_002957 |
| 1117 | 209455_at | FBXW11 | NM_012300 |
| 1118 | 1554237_at | SDCCAG8 | NM_006642 |
| 1119 | 1556352_at | — | — |
| 1120 | 205844_at | VNN1 | NM_004666 |
| 1121 | 1562453_at | — | — |
| 1122 | 1552613_s_at | CDC42SE2 | NM_001038702 |
| 1123 | 225204_at | PPTC7 | NM_139283 |
| 1124 | 209806_at | HIST1H2BK | NM_080593 |
| 1125 | 240154_at | — | — |
| 1126 | 239464_at | — | — |
| 1127 | 1555370_a_at | CAMTA1 | NM_015215 |
| 1128 | 225004_at | TMEM101 | NM_032376 |
| 1129 | 226893_at | ABL2 | NM_001100108 |
| 1130 | 202190_at | CSTF1 | NM_001033521 |
| 1131 | 202369_s_at | TRAM2 | NM_012288 |
| 1132 | 243973_at | — | — |
| 1133 | 242862_x_at | — | — |
| 1134 | 236327_at | — | — |
| 1135 | 235778_s_at | ANKRD44 | NM_153697 |
| 1136 | 229686_at | P2RY8 | NM_178129 |
| 1137 | 213924_at | MPPE1 | NM_023075 |
| 1138 | 239792_at | LOC440288 | XM_001714156 |
| 1139 | 206560_s_at | MIA | NM_006533 |
| 1140 | 225654_at | NSD1 | NM_022455 |
| 1141 | 228570_at | BTBD11 | NM_001017523 |
| 1142 | 231064_s_at | — | — |
| 1143 | 238126_at | — | — |
| 1144 | 212995_x_at | FAM128B | NM_025029 |
| 1145 | 214617_at | PRF1 | NM_001083116 |
| 1146 | 208269_s_at | ADAM28 | NM_014265 |
| 1147 | 1568717_a_at | FKBP15 | NM_015258 |
| 1148 | 1558854_a_at | — | — |
| 1149 | 241938_at | QKI | NM_006775 |
| 1150 | 215099_s_at | RXRB | NM_021976 |
| 1151 | 230100_x_at | PAK1 | NM_001128620 |
| 1152 | 202464_s_at | PFKFB3 | NM_001145443 |
| 1153 | 225454_at | CCDC124 | NM_001136203 |
| 1154 | 1558201_s_at | SLC4A1AP | NM_018158 |
| 1155 | 239597_at | — | — |
| 1156 | 228772_at | HNMT | NM_001024074 |
| 1157 | 227722_at | RPS23 | NM_001025 |
| 1158 | 243340_at | — | — |
| 1159 | 217769_s_at | POMP | NM_015932 |
| 1160 | 228308_at | FKBP11 | NM_001143781 |
| 1161 | 204233_s_at | CHKA | NM_001277 |
| 1162 | 204440_at | CD83 | NM_001040280 |
| 1163 | 204184_s_at | ADRBK2 | NM_005160 |
| 1164 | 212099_at | RHOB | NM_004040 |
| 1165 | 212504_at | DIP2C | NM_014974 |
| 1166 | 220266_s_at | KLF4 | NM_004235 |
| 1167 | 227750_at | KALRN | NM_001024660 |
| 1168 | 203157_s_at | GLS | NM_014905 |
| 1169 | 202804_at | ABCC1 | NM_004996 |
| 1170 | 242752_at | — | — |
| 1171 | 219799_s_at | DHRS9 | NM_001142270 |
| 1172 | 236191_at | — | — |
| 1173 | 230725_at | — | — |
| 1174 | 212137_at | LARP1 | NM_015315 |
| 1175 | 238135_at | AGTRAP | NM_001040194 |
| 1176 | 207079_s_at | MED6 | NM_005466 |
| 1177 | 203973_s_at | CEBPD | NM_005195 |
| 1178 | 228778_at | — | — |
| 1179 | 240798_at | — | — |
| 1180 | 244347_at | — | — |
| 1181 | 231093_at | FCRL3 | NM_052939 |
| 1182 | 231435_at | C7orf34 | NM_178829 |
| 1183 | 244280_at | — | — |
| 1184 | 224549_x_at | — | — |
| 1185 | 228516_at | CDAN1 | NM_138477 |
| 1186 | 233218_at | — | — |
| 1187 | 1560297_at | — | — |
| 1188 | 227114_at | RNF214 | NM_001077239 |
| 1189 | 204373_s_at | CEP350 | NM_014810 |
| 1190 | 226190_at | MAP3K13 | NM_004721 |
| 1191 | 224564_s_at | RTN3 | NM_006054 |
| 1192 | 214483_s_at | ARFIP1 | NM_001025593 |
| 1193 | 209248_at | GHITM | NM_014394 |
| 1194 | 204576_s_at | CLUAP1 | NM_015041 |
| 1195 | 209467_s_at | MKNK1 | NM_001135553 |
| 1196 | 242970_at | DIP2B | NM_173602 |
| 1197 | 230233_at | — | — |
| 1198 | 212560_at | SORL1 | NM_003105 |
| 1199 | 228786_at | LOC387647 | NR_003930 |
| 1200 | 211368_s_at | CASP1 | NM_001223 |
| 1201 | 202958_at | PTPN9 | NM_002833 |
| 1202 | 244262_x_at | — | — |
| 1203 | 244647_at | — | — |
| 1204 | 223457_at | COPG2 | NM_012133 |
| 1205 | 219260_s_at | C17orf81 | NM_015362 |
| 1206 | 236832_at | LOC221442 | NR_026938 |
| 1207 | 1552307_a_at | TTC39C | NM_001135993 |
| 1208 | 201336_at | VAMP3 | NM_004781 |
| 1209 | AFFX- | STAT1 | NM_007315 |
| | HUMISGF3A/ | | |
| | M97935_MB_at | | |
| 1210 | 227080_at | ZNF697 | NM_001080470 |
| 1211 | 227486_at | NT5E | NM_002526 |
| 1212 | 206413_s_at | TCL1B | NM_004918 |
| 1213 | 237120_at | KRT77 | NM_175078 |
| 1214 | 207091_at | P2RX7 | NM_002562 |
| 1215 | 226815_at | C3orf31 | NM_138807 |
| 1216 | 219025_at | CD248 | NM_020404 |
| 1217 | 227182_at | SUSD3 | NM_145006 |
| 1218 | 214877_at | CDKAL1 | NM_017774 |
| 1219 | 218997_at | POLR1E | NM_022490 |
| 1220 | 240861_at | — | — |
| 1221 | 204592_at | DLG4 | NM_001128827 |
| 1222 | 213406_at | WSB1 | NM_015626 |
| 1223 | 227707_at | MYLIP | NM_013262 |
| 1224 | 237538_at | — | — |
| 1225 | 218262_at | RMND5B | NM_022762 |
| 1226 | 232283_at | LYSMD1 | NM_001136543 |
| 1227 | 212249_at | PIK3R1 | NM_181504 |
| 1228 | 213672_at | MARS | NM_004990 |
| 1229 | 210052_s_at | TPX2 | NM_012112 |
| 1230 | 229893_at | FRMD3 | NM_174938 |
| 1231 | 222482_at | LOC100129321 | NM_001009955 |
| 1232 | 203129_s_at | KIF5C | NM_004522 |
| 1233 | 203418_at | CCNA2 | NM_001237 |
| 1234 | 225091_at | ZCCHC3 | NM_033089 |
| 1235 | 240718_at | LRMP | NM_006152 |
| 1236 | 81737_at | — | — |
| 1237 | 209360_s_at | RUNX1 | NM_001001890 |
| 1238 | 210912_x_at | GSTM4 | NM_000850 |
| 1239 | 203716_s_at | DPP4 | NM_001935 |
| 1240 | 225095_at | SPTLC2 | NM_004863 |
| 1241 | 213048_s_at | — | — |
| 1242 | 40016_g_at | MAST4 | NM_015183 |
| 1243 | 224965_at | GNG2 | NM_053064 |
| 1244 | 207623_at | ABCF2 | NM_005692 |
| 1245 | 226171_at | ZDHHC3 | NM_001135179 |
| 1246 | 241242_at | — | — |
| 1247 | 207535_s_at | NFKB2 | NM_001077493 |
| 1248 | 239522_at | IL12RB1 | NM_005535 |
| 1249 | 215191_at | — | — |
| 1250 | 212161_at | AP2A2 | NM_012305 |
| 1251 | 1562280_at | — | — |
| 1252 | 209122_at | PLIN2 | NM_001122 |
| 1253 | 229305_at | MLF1IP | NM_024629 |
| 1254 | 210407_at | PPM1A | NM_021003 |
| 1255 | 226614_s_at | FAM167A | NM_053279 |
| 1256 | 1555679_a_at | RTN4IP1 | NM_032730 |
| 1257 | 224697_at | DCAF5 | NM_003861 |
| 1258 | 222262_s_at | ETNK1 | NM_001039481 |
| 1259 | 227331_at | ZNF740 | NM_001004304 |
| 1260 | 227259_at | CD47 | NM_001025079 |
| 1261 | 222000_at | C1orf174 | NM_207356 |
| 1262 | 205603_s_at | DIAPH2 | NM_006729 |
| 1263 | 213021_at | GOSR1 | NM_001007024 |
| 1264 | 210149_s_at | ATP5H | NM_001003785 |
| 1265 | 240793_at | TTN | NM_003319 |
| 1266 | 200089_s_at | RPL4 | NM_000968 |
| 1267 | 217834_s_at | SYNCRIP | NM_001159673 |
| 1268 | 234396_at | — | — |
| 1269 | 1566001_at | — | — |
| 1270 | 236742_at | — | — |
| 1271 | 240231_at | — | — |
| 1272 | 200664_s_at | DNAJB1 | NM_006145 |
| 1273 | 212671_s_at | HLA-DQA1 | NM_002122 |
| 1274 | 207536_s_at | TNFRSF9 | NM_001561 |
| 1275 | 232218_at | — | — |
| 1276 | 205545_x_at | DNAJC8 | NM_014280 |
| 1277 | 239654_at | CHD9 | NM_025134 |
| 1278 | 223907_s_at | PINX1 | NM_017884 |
| 1279 | 233483_at | TBC1D27 | XM_002343481 |
| 1280 | 1556643_at | LOC100128718 | — |
| 1281 | 209502_s_at | BAIAP2 | NM_001144888 |
| 1282 | 232720_at | LINGO2 | NM_152570 |
| 1283 | 227138_at | CRTAP | NM_006371 |
| 1284 | 1559895_x_at | — | — |
| 1285 | 203554_x_at | PTTG1 | NM_004219 |
| 1286 | 220305_at | MAVS | NM_020746 |
| 1287 | 229966_at | EWSR1 | NM_001163285 |
| 1288 | 230435_at | LOC375190 | NM_001145710 |
| 1289 | 220000_at | SIGLEC5 | NM_003830 |
| 1290 | 1558094_s_at | C3orf19 | NM_016474 |
| 1291 | 233157_x_at | CCDC114 | NM_144577 |
| 1292 | 205067_at | IL1B | NM_000576 |
| 1293 | 212662_at | PVR | NM_001135768 |
| 1294 | 213028_at | NFRKB | NM_001143835 |
| 1295 | 224836_at | TP53INP2 | NM_021202 |
| 1296 | 210648_x_at | SNX3 | NM_003795 |
| 1297 | 1558105_a_at | — | — |
| 1298 | 210153_s_at | ME2 | NM_002396 |
| 1299 | 212650_at | EHBP1 | NM_001142614 |
| 1300 | 209281_s_at | ATP2B1 | NM_001001323 |
| 1301 | 239307_at | — | — |
| 1302 | 213902_at | ASAH1 | NM_001127505 |
| 1303 | 1559835_at | — | — |
| 1304 | 240070_at | TIGIT | NM_173799 |
| 1305 | 222396_at | HN1 | NM_001002032 |
| 1306 | 211781_x_at | — | — |
| 1307 | 219179_at | DACT1 | NM_001079520 |
| 1308 | 207072_at | IL18RAP | NM_003853 |
| 1309 | 224919_at | MRPS6 | NM_032476 |
| 1310 | 231547_at | ZBTB37 | NM_001122770 |
| 1311 | 227476_at | LPGAT1 | NM_014873 |
| 1312 | 218584_at | TCTN1 | NM_001082537 |
| 1313 | 209714_s_at | CDKN3 | NM_001130851 |
| 1314 | 230354_at | — | — |
| 1315 | 228831_s_at | GNG7 | NM_052847 |
| 1316 | 237522_at | FAS | NM_000043 |
| 1317 | 212663_at | FKBP15 | NM_015258 |
| 1318 | 226336_at | PPIA | NM_021130 |
| 1319 | 242673_at | — | — |
| 1320 | 232784_at | — | — |
| 1321 | 205232_s_at | PAFAH2 | NM_000437 |
| 1322 | 201364_s_at | OAZ2 | NM_002537 |
| 1323 | 1558143_a_at | BCL2L11 | NM_006538 |
| 1324 | 1569906_s_at | PHF20 | NM_016436 |
| 1325 | 244332_at | — | — |
| 1326 | 242082_at | MMAB | NM_052845 |
| 1327 | 212154_at | SDC2 | NM_002998 |
| 1328 | 1569207_s_at | TCP11L2 | NM_152772 |
| 1329 | 232257_s_at | — | — |
| 1330 | 239060_at | — | — |
| 1331 | 1563075_s_at | — | — |
| 1332 | 208645_s_at | RPS14 | NM_001025070 |
| 1333 | 244035_at | — | — |
| 1334 | 227402_s_at | UTP23 | NM_032334 |
| 1335 | 230921_s_at | — | — |
| 1336 | 227790_at | UBE2CBP | NM_198920 |
| 1337 | 242582_at | — | — |
| 1338 | 1553405_a_at | CSMD1 | NM_033225 |
| 1339 | 244886_at | LOC389641 | XM_374260 |
| 1340 | 228762_at | LFNG | NM_001040167 |
| 1341 | 220231_at | C7orf16 | NM_001145123 |
| 1342 | 202341_s_at | TRIM2 | NM_001130067 |
| 1343 | 208054_at | HERC4 | NM_015601 |
| 1344 | 228003_at | RAB30 | NM_014488 |
| 1345 | 243534_at | CC2D2B | NM_001001732 |
| 1346 | 212573_at | ENDOD1 | NM_015036 |
| 1347 | 230063_at | ZNF264 | NM_003417 |
| 1348 | 204165_at | WASF1 | NM_001024934 |
| 1349 | 238279_x_at | — | — |
| 1350 | 201842_s_at | EFEMP1 | NM_001039348 |
| 1351 | 223132_s_at | TRIM8 | NM_030912 |
| 1352 | 244043_at | — | — |
| 1353 | 206043_s_at | ATP2C2 | NM_014861 |
| 1354 | 208653_s_at | CD164 | NM_001142401 |
| 1355 | 238596_at | C10orf4 | NM_145246 |
| 1356 | 231907_at | ABL2 | NM_001100108 |
| 1357 | 1557478_at | — | — |
| 1358 | 1558906_a_at | — | — |
| 1359 | 243404_at | — | — |
| 1360 | 243526_at | WDR86 | NM_198285 |
| 1361 | 205531_s_at | GLS2 | NM_013267 |
| 1362 | 241702_at | — | — |
| 1363 | 223821_s_at | SUSD4 | NM_001037175 |
| 1364 | 242232_at | — | — |
| 1365 | 221573_at | C7orf25 | NM_001099858 |
| 1366 | 1569492_at | — | — |
| 1367 | 227897_at | — | — |
| 1368 | 231809_x_at | PDCD7 | NM_005707 |
| 1369 | 226982_at | ELL2 | NM_012081 |
| 1370 | 214876_s_at | TUBGCP5 | NM_001102610 |
| 1371 | 226957_x_at | RALBP1 | NM_006788 |
| 1372 | 204251_s_at | CEP164 | NM_014956 |
| 1373 | 229881_at | KLF12 | NM_007249 |
| 1374 | 205039_s_at | IKZF1 | NM_006060 |
| 1375 | 214000_s_at | RGS10 | NM_001005339 |
| 1376 | 204454_at | LDOC1 | NM_012317 |
| 1377 | 229821_at | — | — |
| 1378 | 202166_s_at | PPP1R2 | NM_006241 |
| 1379 | 228177_at | CREBBP | NM_001079846 |
| 1380 | 233063_s_at | — | — |
| 1381 | 204173_at | MYL6B | NM_002475 |
| 1382 | 206513_at | AIM2 | NM_004833 |
| 1383 | 218949_s_at | QRSL1 | NM_018292 |
| 1384 | 204167_at | BTD | NM_000060 |
| 1385 | 221256_s_at | HDHD3 | NM_031219 |
| 1386 | 220239_at | KLHL7 | NM_001031710 |
| 1387 | 201307_at | 40787 | NM_018243 |
| 1388 | 232530_at | PLD1 | NM_001130081 |
| 1389 | 226519_s_at | AGXT2L2 | NM_153373 |
| 1390 | 219298_at | ECHDC3 | NM_024693 |
| 1391 | 209134_s_at | RPS6 | NM_001010 |
| 1392 | 219529_at | CLIC3 | NM_004669 |
| 1393 | 202759_s_at | AKAP2 | NM_001004065 |
| 1394 | 232829_at | OR52K3P | — |
| 1395 | 1559391_s_at | — | — |
| 1396 | 203605_at | SRP54 | NM_001146282 |
| 1397 | 232636_at | SLITRK4 | NM_173078 |
| 1398 | 201061_s_at | STOM | NM_004099 |
| 1399 | 222633_at | TBL1XR1 | NM_024665 |
| 1400 | 214710_s_at | CCNB1 | NM_031966 |
| 1401 | 231866_at | LNPEP | NM_005575 |
| 1402 | 208619_at | DDB1 | NM_001923 |
| 1403 | 1566039_a_at | — | — |
| 1404 | 202891_at | NIT1 | NM_005600 |
| 1405 | 229334_at | RUFY3 | NM_001037442 |
| 1406 | 214686_at | ZNF266 | NM_006631 |
| 1407 | 1565358_at | RARA | NM_000964 |
| 1408 | 243924_at | LOC100127980 | XM_001720119 |
| 1409 | 225007_at | — | — |
| 1410 | 213285_at | TMEM30B | NM_001017970 |
| 1411 | 206592_s_at | AP3D1 | NM_001077523 |
| 1412 | 221909_at | RNFT2 | NM_001109903 |
| 1413 | 218746_at | TAPBPL | NM_018009 |
| 1414 | 235927_at | XPO1 | NM_003400 |
| 1415 | 240089_at | — | — |
| 1416 | 1554292_a_at | UHRF1BP1L | NM_001006947 |
| 1417 | 208636_at | ACTN1 | NM_001102 |
| 1418 | 206342_x_at | IDS | NM_000202 |
| 1419 | 217374_x_at | TARP | NM_001003799 |
| 1420 | 223527_s_at | CDADC1 | NM_030911 |
| 1421 | 209686_at | S100B | NM_006272 |
| 1422 | 242364_x_at | LOC100131096 | XM_001720907 |
| 1423 | 201523_x_at | UBE2N | NM_003348 |
| 1424 | 202348_s_at | TOR1A | NM_000113 |
| 1425 | 1558847_at | — | — |
| 1426 | 220363_s_at | ELMO2 | NM_133171 |
| 1427 | 234860_at | — | — |
| 1428 | 232095_at | — | — |
| 1429 | 211984_at | CALM1 | NM_006888 |
| 1430 | 201053_s_at | PSMF1 | NM_006814 |
| 1431 | 207332_s_at | TFRC | NM_001128148 |
| 1432 | 235942_at | LOC401629 | NR_002160 |
| 1433 | 218361_at | GOLPH3L | NM_018178 |
| 1434 | 205757_at | ENTPD5 | NM_001249 |
| 1435 | 220606_s_at | C17orf48 | NM_020233 |
| 1436 | 209642_at | BUB1 | NM_004336 |
| 1437 | 203264_s_at | ARHGEF9 | NM_015185 |
| 1438 | 236193_at | HIST1H2BC | NM_003526 |
| 1439 | 229274_at | GNAS | NM_000516 |
| 1440 | 225661_at | IFNAR1 | NM_000629 |
| 1441 | 202070_s_at | IDH3A | NM_005530 |
| 1442 | 201286_at | SDC1 | NM_001006946 |
| 1443 | 237229_at | JMJD5 | NM_001145348 |
| 1444 | 221776_s_at | BRD7 | NM_013263 |
| 1445 | 218312_s_at | ZSCAN18 | NM_001145542 |
| 1446 | 230444_at | — | — |
| 1447 | 205708_s_at | TRPM2 | NM_003307 |
| 1448 | 224794_s_at | CERCAM | NM_016174 |
| 1449 | 240237_at | — | — |
| 1450 | 225834_at | FAM72A | NM_001100910 |
| 1451 | 218064_s_at | AKAP8L | NM_014371 |
| 1452 | 229592_at | — | — |
| 1453 | 209445_x_at | C7orf44 | NM_018224 |
| 1454 | 208517_x_at | BTF3 | NM_001037637 |
| 1455 | 217677_at | PLEKHA2 | NM_021623 |
| 1456 | 210812_at | XRCC4 | NM_003401 |
| 1457 | 224756_s_at | BAT5 | NM_021160 |
| 1458 | 1559059_s_at | ZNF611 | NM_001161499 |
| 1459 | 225609_at | GSR | NM_000637 |
| 1460 | 242691_at | — | — |
| 1461 | 204785_x_at | IFNAR2 | NM_000874 |
| 1462 | 233191_at | RUFY2 | NM_001042417 |
| 1463 | 225987_at | STEAP4 | NM_024636 |
| 1464 | 212010_s_at | CDV3 | NM_001134422 |
| 1465 | 229398_at | RAB18 | NM_021252 |
| 1466 | 234819_at | — | — |
| 1467 | 230440_at | ZNF469 | NM_001127464 |
| 1468 | 1557186_s_at | TPCN1 | NM_001143819 |
| 1469 | 222651_s_at | TRPS1 | NM_014112 |
| 1470 | 212881_at | PIAS4 | NM_015897 |
| 1471 | 226546_at | — | — |
| 1472 | 243201_at | HNRNPH2 | NM_001032393 |
| 1473 | 204254_s_at | VDR | NM_000376 |
| 1474 | 244070_at | SYNE1 | NM_015293 |
| 1475 | 210622_x_at | CDK10 | NM_001098533 |
| 1476 | 217620_s_at | PIK3CB | NM_006219 |
| 1477 | 238573_at | — | — |
| 1478 | 201777_s_at | KIAA0494 | NM_014774 |
| 1479 | 231598_x_at | — | — |
| 1480 | 202055_at | KPNA1 | NM_002264 |
| 1481 | 226856_at | MUSTN1 | NM_205853 |
| 1482 | 1553858_at | ZBTB3 | NM_024784 |
| 1483 | 235446_at | — | — |
| 1484 | 242064_at | SDK2 | NM_001144952 |
| 1485 | 239574_at | — | — |
| 1486 | 204069_at | MEIS1 | NM_002398 |
| 1487 | 212390_at | PDE4DIP | NM_001002810 |
| 1488 | AFFX- | — | — |
| | hum_alu_at | | |
| 1489 | 212933_x_at | RPL13 | NM_000977 |
| 1490 | 212547_at | BRD3 | NM_007371 |
| 1491 | 241202_at | — | — |
| 1492 | 1562067_at | — | — |
| 1493 | 1566427_at | — | — |
| 1494 | 211717_at | ANKRD40 | NM_052855 |
| 1495 | 1552485_at | LACTB | NM_032857 |
| 1496 | 209345_s_at | PI4K2A | NM_018425 |
| 1497 | 232722_at | RNASET2 | NM_003730 |
| 1498 | 225755_at | KLHDC8B | NM_173546 |
| 1499 | 209541_at | IGF1 | NM_000618 |
| 1500 | 230669_at | RASA2 | NM_006506 |
| 1501 | 217207_s_at | BTNL3 | NM_197975 |
| 1502 | 230442_at | MTHFSD | NM_001159377 |
| 1503 | 200983_x_at | CD59 | NM_000611 |
| 1504 | 217232_x_at | HBB | NM_000518 |
| 1505 | 202738_s_at | PHKB | NM_000293 |
| 1506 | 218773_s_at | MSRB2 | NM_012228 |
| 1507 | 213343_s_at | GDPD5 | NM_030792 |
| 1508 | 233880_at | RNF213 | NM_020914 |
| 1509 | 214377_s_at | CTRL | NM_001907 |
| 1510 | 211324_s_at | RGPD5 | NM_001037866 |
| 1511 | 219055_at | SRBD1 | NM_018079 |
| 1512 | 237389_at | — | — |
| 1513 | 225729_at | C6orf89 | NM_152734 |
| 1514 | 221521_s_at | GINS2 | NM_016095 |
| 1515 | 1559449_a_at | ZNF254 | NM_203282 |
| 1516 | 1565674_at | FCGR2A | NM_001136219 |
| 1517 | 241933_at | QRSL1 | NM_018292 |
| 1518 | 215559_at | ABCC6 | NM_001079528 |
| 1519 | 221928_at | ACACB | NM_001093 |
| 1520 | 226051_at | SELM | NM_080430 |
| 1521 | 1566166_at | — | — |
| 1522 | 225208_s_at | FAM103A1 | NM_031452 |
| 1523 | 243675_at | — | — |
| 1524 | 239944_at | — | — |
| 1525 | 58780_s_at | FLJ10357 | NM_018071 |
| 1526 | 235030_at | FAM55C | NM_001134456 |
| 1527 | 239783_at | — | — |
| 1528 | 1555580_at | — | — |
| 1529 | 238494_at | TRAF3IP1 | NM_001139490 |
| 1530 | 1558719_s_at | RPAIN | NM_001033002 |
| 1531 | 41660_at | CELSR1 | NM_014246 |
| 1532 | 210971_s_at | ARNTL | NM_001030272 |
| 1533 | 201825_s_at | SCCPDH | NM_016002 |
| 1534 | 217727_x_at | VPS35 | NM_018206 |
| 1535 | 203725_at | GADD45A | NM_001924 |
| 1536 | 225490_at | ARID2 | NM_152641 |
| 1537 | 231023_at | CARS2 | NM_024537 |
| 1538 | 224524_s_at | ASB3 | NM_001164165 |
| 1539 | 232959_at | — | — |
| 1540 | 237133_at | — | — |
| 1541 | 218391_at | SNF8 | NM_007241 |
| 1542 | 227060_at | RELT | NM_032871 |
| 1543 | 200606_at | DSP | NM_001008844 |
| 1544 | 219681_s_at | RAB11FIP1 | NM_001002233 |
| 1545 | 225638_at | C1orf31 | NM_001012985 |
| 1546 | 227957_at | GSN | NM_000177 |
| 1547 | 239560_at | — | — |
| 1548 | 208936_x_at | LGALS8 | NM_006499 |
| 1549 | 226334_s_at | AHSA2 | NM_152392 |
| 1550 | 238750_at | — | — |
| 1551 | 225061_at | DNAJA4 | NM_001130182 |
| 1552 | 228096_at | C1orf151 | NM_001032363 |
| 1553 | 209709_s_at | HMMR | NM_001142556 |
| 1554 | 207277_at | CD209 | NM_001144893 |
| 1555 | 212448_at | NEDD4L | NM_001144964 |
| 1556 | 229734_at | LOC283174 | NR_024344 |
| 1557 | 237332_at | — | — |
| 1558 | 228069_at | FAM54A | NM_001099286 |
| 1559 | 1553978_at | LOC729991 | NM_001145783 |
| 1560 | 205042_at | GNE | NM_001128227 |
| 1561 | 229820_at | LOC440993 | XR_039810 |
| 1562 | 1554513_s_at | CCDC123 | NM_032816 |
| 1563 | 221877_at | IRGQ | NM_001007561 |
| 1564 | 208696_at | CCT5 | NM_012073 |
| 1565 | 240554_at | AKAP8L | NM_014371 |
| 1566 | 201589_at | SMC1A | NM_006306 |
| 1567 | 235824_at | — | — |
| 1568 | 232375_at | — | — |
| 1569 | 242384_at | — | — |
| 1570 | 203155_at | SETDB1 | NM_001145415 |
| 1571 | 243092_at | LOC100290367 | XM_002347376 |
| 1572 | 232045_at | PHACTR1 | NM_030948 |
| 1573 | 1554710_at | KCNMB1 | NM_004137 |
| 1574 | 237104_at | — | — |
| 1575 | 231223_at | CSMD1 | NM_033225 |
| 1576 | 1553920_at | C9orf84 | NM_001080551 |
| 1577 | 225901_at | PTPMT1 | NM_001143984 |
| 1578 | 212975_at | DENND3 | NM_014957 |
| 1579 | 1554365_a_at | PPP2R5C | NM_001161725 |
| 1580 | 215495_s_at | SAMD4A | NM_001161576 |
| 1581 | 206521_s_at | GTF2A1 | NM_015859 |
| 1582 | 215032_at | RREB1 | NM_001003698 |
| 1583 | 226879_at | HVCN1 | NM_001040107 |
| 1584 | 221582_at | HIST3H2A | NM_033445 |
| 1585 | 225276_at | GSPT1 | NM_001130006 |
| 1586 | 1560520_at | LOC401312 | — |
| 1587 | 214997_at | SCAI | NM_001144877 |
| 1588 | 220393_at | LGSN | NM_001143940 |
| 1589 | 230952_at | LOC730092 | NR_003370 |
| 1590 | 242279_at | — | — |
| 1591 | 222592_s_at | ACSL5 | NM_016234 |
| 1592 | 209426_s_at | AMACR | NM_014324 |
| 1593 | 231099_at | FKBP15 | NM_015258 |
| 1594 | 206860_s_at | MIOS | NM_019005 |
| 1595 | 208628_s_at | YBX1 | NM_004559 |
| 1596 | 1566447_at | CD6 | NM_006725 |
| 1597 | 236298_at | PDSS1 | NM_014317 |
| 1598 | 237426_at | SP100 | NM_001080391 |
| 1599 | 230000_at | RNF213 | NM_020914 |
| 1600 | 221815_at | ABHD2 | NM_007011 |
| 1601 | 234747_at | C4orf41 | NM_021942 |
| 1602 | 236149_at | — | — |
| 1603 | 209357_at | CITED2 | NM_006079 |
| 1604 | 225111_s_at | NAPB | NM_022080 |
| 1605 | 226270_at | EXOC2 | NM_018303 |
| 1606 | 210858_x_at | ATM | NM_000051 |
| 1607 | 212320_at | TUBB | NM_178014 |
| 1608 | 214464_at | CDC42BPA | NM_003607 |
| 1609 | 205619_s_at | MEOX1 | NM_001040002 |
| 1610 | 225606_at | BCL2L11 | NM_006538 |
| 1611 | 217774_s_at | TRMT112 | NM_016404 |
| 1612 | 228219_s_at | UPB1 | NM_016327 |
| 1613 | 243958_at | — | — |
| 1614 | 208503_s_at | GATAD1 | NM_021167 |
| 1615 | 227170_at | ZNF316 | XR_078353 |
| 1616 | 201698_s_at | SFRS9 | NM_003769 |
| 1617 | 239698_at | — | — |
| 1618 | 1555904_at | — | — |
| 1619 | 217825_s_at | UBE2J1 | NM_016021 |
| 1620 | 240247_at | — | — |
| 1621 | 218108_at | UBR7 | NM_001100417 |
| 1622 | 1559688_at | LOC400581 | NM_001129778 |
| 1623 | 218125_s_at | CCDC25 | NM_018246 |
| 1624 | 226666_at | DAAM1 | NM_014992 |
| 1625 | 230027_s_at | MRPL43 | NM_032112 |
| 1626 | 205227_at | IL1RAP | NM_002182 |
| 1627 | 228513_at | TMEM219 | NM_001083613 |
| 1628 | 1552677_a_at | DIP2A | NM_001146114 |
| 1629 | 215796_at | — | — |
| 1630 | 201903_at | UQCRC1 | NM_003365 |
| 1631 | 1560869_a_at | — | — |
| 1632 | 234852_at | — | — |
| 1633 | 227708_at | EEF1A1 | NM_001402 |
| 1634 | 1552807_a_at | SIGLEC10 | NM_033130 |
| 1635 | 229844_at | — | — |
| 1636 | 204992_s_at | PFN2 | NM_002628 |
| 1637 | 227613_at | ZNF331 | NM_001079906 |
| 1638 | 243579_at | MSI2 | NM_138962 |
| 1639 | 210146_x_at | LILRB2 | NM_001080978 |
| 1640 | 202433_at | SLC35B1 | NM_005827 |
| 1641 | 209870_s_at | APBA2 | NM_001130414 |
| 1642 | 224698_at | ESYT2 | NM_020728 |
| 1643 | 207617_at | DDX3X | NM_001356 |
| 1644 | 203445_s_at | CTDSP2 | NM_005730 |
| 1645 | 235761_at | — | — |
| 1646 | 238546_at | SLC8A1 | NM_001112800 |
| 1647 | 1554536_at | DPYD | NM_000110 |
| 1648 | 200701_at | NPC2 | NM_006432 |
| 1649 | 1558722_at | ZNF252 | NR_023392 |
| 1650 | 239033_at | — | — |
| 1651 | 201003_x_at | RNPEP | NM_001032288 |
| 1652 | 228984_at | ATPGD1 | NM_020811 |
| 1653 | 217025_s_at | DBN1 | NM_004395 |
| 1654 | 232826_at | — | — |
| 1655 | 241692_at | — | — |
| 1656 | 205826_at | MYOM2 | NM_003970 |
| 1657 | 242079_at | RGS12 | NM_002926 |
| 1658 | 242014_at | — | — |
| 1659 | 205612_at | MMRN1 | NM_007351 |
| 1660 | 225546_at | EEF2K | NM_013302 |
| 1661 | 1559284_at | — | — |
| 1662 | 202583_s_at | RANBP9 | NM_005493 |
| 1663 | 225673_at | MYADM | NM_001020818 |
| 1664 | 1556072_at | C22orf37 | XR_040827 |
| 1665 | 201190_s_at | PITPNA | NM_006224 |
| 1666 | 218751_s_at | FBXW7 | NM_001013415 |
| 1667 | 209069_s_at | H3F3B | NM_005324 |
| 1668 | 210285_x_at | WTAP | NM_004906 |
| 1669 | 209131_s_at | SNAP23 | NM_003825 |
| 1670 | 222491_at | HGSNAT | NM_152419 |
| 1671 | 213198_at | ACVR1B | NM_004302 |
| 1672 | 233006_at | 38231 | NM_004574 |
| 1673 | 1555408_at | BAGE2 | NM_181704 |
| 1674 | 243558_at | — | — |
| 1675 | 228373_at | C16orf72 | NM_014117 |
| 1676 | 231578_at | GBP1 | NM_002053 |
| 1677 | 241233_x_at | C21orf81 | NR_027270 |
| 1678 | 213851_at | TMEM110 | NM_198563 |
| 1679 | 219269_at | HMBOX1 | NM_001135726 |
| 1680 | 222276_at | — | — |
| 1681 | 217741_s_at | ZFAND5 | NM_001102420 |
| 1682 | 202080_s_at | TRAK1 | NM_001042646 |
| 1683 | 224406_s_at | FCRL5 | NM_031281 |
| 1684 | 220987_s_at | C11orf17 | NM_020642 |
| 1685 | 230618_s_at | — | — |
| 1686 | 213274_s_at | CTSB | NM_001908 |
| 1687 | 229202_at | — | — |
| 1688 | 237009_at | — | — |
| 1689 | 228125_at | ZNF397OS | NM_001112734 |
| 1690 | 225820_at | PHF17 | NM_024900 |
| 1691 | 218348_s_at | ZC3H7A | NM_014153 |
| 1692 | 232883_at | — | — |
| 1693 | 209006_s_at | C1orf63 | NM_020317 |
| 1694 | 211269_s_at | IL2RA | NM_000417 |
| 1695 | 240415_at | — | — |
| 1696 | 231219_at | CMTM1 | NM_052999 |
| 1697 | 226931_at | TMTC1 | NM_175861 |
| 1698 | 243720_at | CMIP | NM_030629 |
| 1699 | 208780_x_at | VAPA | NM_003574 |
| 1700 | 213788_s_at | NCRNA00094 | NR_015427 |
| 1701 | 200806_s_at | HSPD1 | NM_002156 |
| 1702 | 217810_x_at | LARS | NM_020117 |
| 1703 | 219489_s_at | NXN | NM_022463 |
| 1704 | 227201_at | LOC643837 | NR_015368 |
| 1705 | 202732_at | PKIG | NM_007066 |
| 1706 | 206777_s_at | CRYBB2 | NM_000496 |
| 1707 | 1568680_s_at | YTHDC2 | NM_022828 |
| 1708 | 224163_s_at | DMAP1 | NM_001034023 |
| 1709 | 1559658_at | C15orf29 | NM_024713 |
| 1710 | 228645_at | SNHG9 | NR_003142 |
| 1711 | 238946_at | — | — |
| 1712 | 202898_at | SDC3 | NM_014654 |
| 1713 | 1566485_at | — | — |
| 1714 | 1554112_a_at | ULK2 | NM_001142610 |
| 1715 | 214583_at | RSC1A1 | NM_006511 |
| 1716 | 1556202_at | SRGAP2 | NM_001042758 |
| 1717 | 212169_at | FKBP9 | NM_007270 |
| 1718 | 200950_at | ARPC1A | NM_006409 |
| 1719 | 201009_s_at | TXNIP | NM_006472 |
| 1720 | 201060_x_at | STOM | NM_004099 |
| 1721 | 244633_at | — | — |
| 1722 | 231973_s_at | ANAPC1 | NM_022662 |
| 1723 | 215013_s_at | USP34 | NM_014709 |
| 1724 | 237461_at | NLRP7 | NM_001127255 |
| 1725 | 227793_at | — | — |
| 1726 | 238952_x_at | ZNF829 | NM_001037232 |
| 1727 | 228806_at | RORC | NM_001001523 |
| 1728 | 204826_at | CCNF | NM_001761 |
| 1729 | 214132_at | ATP5C1 | NM_001001973 |
| 1730 | 213119_at | SLC36A1 | NM_078483 |
| 1731 | 1558795_at | LOC728052 | XM_001717850 |
| 1732 | 222760_at | ZNF703 | NM_025069 |
| 1733 | 211742_s_at | EVI2B | NM_006495 |
| 1734 | 243356_at | FAM7A3 | NR_026859 |
| 1735 | 203063_at | PPM1F | NM_014634 |
| 1736 | 207922_s_at | MAEA | NM_001017405 |
| 1737 | 228314_at | LRRC8C | NM_032270 |
| 1738 | 214137_at | PTPRJ | NM_001098503 |
| 1739 | 216234_s_at | PRKACA | NM_002730 |
| 1740 | 242551_at | — | — |
| 1741 | 207610_s_at | EMR2 | NM_013447 |
| 1742 | 1559205_s_at | — | — |
| 1743 | 217292_at | MTMR7 | NM_004686 |
| 1744 | 231055_at | — | — |
| 1745 | 217984_at | RNASET2 | NM_003730 |
| 1746 | 216370_s_at | TKTL1 | NM_001145933 |
| 1747 | 37433_at | PIAS2 | NM_004671 |
| 1748 | 201141_at | GPNMB | NM_001005340 |
| 1749 | 226816_s_at | KIAA1143 | NM_020696 |
| 1750 | 239175_at | — | — |
| 1751 | 209158_s_at | CYTH2 | NM_004228 |
| 1752 | 203588_s_at | TFDP2 | NM_006286 |
| 1753 | 212823_s_at | PLEKHG3 | NM_015549 |
| 1754 | 202822_at | LPP | NM_005578 |
| 1755 | 1561058_at | — | — |
| 1756 | 225802_at | TOP1MT | NM_052963 |
| 1757 | 213931_at | ID2 | NM_002166 |
| 1758 | 223666_at | SNX5 | NM_014426 |
| 1759 | 201827_at | SMARCD2 | NM_001098426 |
| 1760 | 235052_at | ZNF792 | NM_175872 |
| 1761 | 227579_at | — | — |
| 1762 | 228105_at | — | — |
| 1763 | 236292_at | RNF130 | NM_018434 |
| 1764 | 219550_at | ROBO3 | NM_022370 |
| 1765 | 242216_at | — | — |
| 1766 | 229544_at | — | — |
| 1767 | 227533_at | — | — |
| 1768 | 209442_x_at | ANK3 | NM_001149 |
| 1769 | 37145_at | GNLY | NM_006433 |
| 1770 | 225680_at | LRWD1 | NM_152892 |
| 1771 | 209239_at | NFKB1 | NM_003998 |
| 1772 | 213579_s_at | EP300 | NM_001429 |
| 1773 | 213073_at | ZFYVE26 | NM_015346 |
| 1774 | 206855_s_at | HYAL2 | NM_003773 |
| 1775 | 205277_at | PRDM2 | NM_001007257 |
| 1776 | 214076_at | GFOD2 | NM_030819 |
| 1777 | 1558167_a_at | MGC16275 | NR_026914 |
| 1778 | 1568574_x_at | SPP1 | NM_000582 |
| 1779 | 224298_s_at | UBAC2 | NM_001144072 |
| 1780 | 230795_at | — | — |
| 1781 | 221765_at | UGCG | NM_003358 |
| 1782 | 201668_x_at | MARCKS | NM_002356 |
| 1783 | 1556432_at | — | — |
| 1784 | 227203_at | FBXL17 | NM_001163315 |
| 1785 | 208743_s_at | YWHAB | NM_003404 |
| 1786 | 212008_at | UBXN4 | NM_014607 |
| 1787 | 220072_at | CSPP1 | NM_001077204 |
| 1788 | 1563467_at | — | — |
| 1789 | 224639_at | UNQ1887 | NM_139015 |
| 1790 | 230480_at | PIWIL4 | NM_152431 |
| 1791 | 1562013_a_at | — | — |
| 1792 | 204909_at | DDX6 | NM_004397 |
| 1793 | 209824_s_at | ARNTL | NM_001030272 |
| 1794 | 206409_at | TIAM1 | NM_003253 |
| 1795 | 208174_x_at | ZRSR2 | NM_005089 |
| 1796 | 211015_s_at | HSPA4 | NM_002154 |
| 1797 | 208658_at | PDIA4 | NM_004911 |
| 1798 | 213801_x_at | RPSA | NM_001012321 |
| 1799 | 225634_at | ZC3HAV1 | NM_020119 |
| 1800 | 215356_at | TDRD12 | NM_001110822 |
| 1801 | 213688_at | CALM1 | NM_006888 |
| 1802 | 200933_x_at | RPS4X | NM_001007 |
| 1803 | 242270_at | — | — |
| 1804 | 210036_s_at | KCNH2 | NM_000238 |
| 1805 | 229822_at | — | — |
| 1806 | 232739_at | SPIB | NM_003121 |
| 1807 | 201219_at | CTBP2 | NM_001083914 |
| 1808 | 1560457_x_at | LSDP5 | NM_001013706 |
| 1809 | 1558372_at | — | — |
| 1810 | 1568851_at | — | — |
| 1811 | 225849_s_at | SFT2D1 | NM_145169 |
| 1812 | 1557257_at | BCL10 | NM_003921 |
| 1813 | 231283_at | MGAT4A | NM_001160154 |
| 1814 | 239154_at | — | — |
| 1815 | 212523_s_at | KIAA0146 | NM_001080394 |
| 1816 | 231922_at | ZNF276 | NM_001113525 |
| 1817 | 213514_s_at | DIAPH1 | NM_001079812 |
| 1818 | 205129_at | NPM3 | NM_006993 |
| 1819 | 230997_at | TTC21A | NM_001105513 |
| 1820 | 208705_s_at | EIF5 | NM_001969 |
| 1821 | 203939_at | NT5E | NM_002526 |
| 1822 | 217770_at | PIGT | NM_015937 |
| 1823 | 233787_at | C6orf163 | NM_001010868 |
| 1824 | 241621_at | SMCHD1 | NM_015295 |
| 1825 | 1553750_a_at | FAM76B | NM_144664 |
| 1826 | 211018_at | LSS | NM_001001438 |
| 1827 | 200693_at | YWHAQ | NM_006826 |
| 1828 | 218662_s_at | NCAPG | NM_022346 |
| 1829 | 220990_s_at | MIR21 | NM_030938 |
| 1830 | 232149_s_at | NSMAF | NM_001144772 |
| 1831 | 232012_at | CAPN1 | NM_005186 |
| 1832 | 1562825_at | — | — |
| 1833 | 233800_at | — | — |
| 1834 | 242806_at | — | — |
| 1835 | 1557544_at | CCDC147 | NM_001008723 |
| 1836 | 203923_s_at | CYBB | NM_000397 |
| 1837 | 217978_s_at | UBE2Q1 | NM_017582 |
| 1838 | 220940_at | ANKRD36B | NM_025190 |
| 1839 | 221711_s_at | C19orf62 | NM_001033549 |
| 1840 | 222087_at | PVT1 | NR_003367 |
| 1841 | 213201_s_at | TNNT1 | NM_001126132 |
| 1842 | 219178_at | QTRTD1 | NM_024638 |
| 1843 | 213535_s_at | UBE2I | NM_003345 |
| 1844 | 204039_at | CEBPA | NM_004364 |
| 1845 | 215754_at | SCARB2 | NM_005506 |
| 1846 | 232284_at | PSMD6 | NM_014814 |
| 1847 | 204214_s_at | RAB32 | NM_006834 |
| 1848 | 219765_at | ZNF329 | NM_024620 |
| 1849 | 201938_at | CDK2AP1 | NM_004642 |
| 1850 | 230009_at | FAM118B | NM_024556 |
| 1851 | 239427_at | — | — |
| 1852 | 214717_at | DKFZp434H1419 | — |
| 1853 | 239755_at | — | — |
| 1854 | 208322_s_at | ST3GAL1 | NM_003033 |
| 1855 | 227910_at | XPNPEP3 | NM_022098 |
| 1856 | 225382_at | ZNF275 | NM_001080485 |
| 1857 | 220167_s_at | TP53TG3 | NM_001099687 |
| 1858 | 1561884_at | CEPT1 | NM_001007794 |
| 1859 | 206332_s_at | IFI16 | NM_005531 |
| 1860 | 220193_at | C1orf113 | NM_001162530 |
| 1861 | 237623_at | CST3 | NM_000099 |
| 1862 | 209410_s_at | GRB10 | NM_001001549 |
| 1863 | 214481_at | HIST1H2AM | NM_003514 |
| 1864 | 236511_at | — | — |
| 1865 | 226184_at | FMNL2 | NM_052905 |
| 1866 | 222955_s_at | FAM45A | NM_207009 |
| 1867 | 226840_at | H2AFY | NM_001040158 |
| 1868 | 227931_at | INO80D | NM_017759 |
| 1869 | 231837_at | USP28 | NM_020886 |
| 1870 | 232180_at | UGP2 | NM_001001521 |
| 1871 | 227305_s_at | SMCR8 | NM_144775 |
| 1872 | 237597_at | — | — |
| 1873 | 1555963_x_at | B3GNT7 | NM_145236 |
| 1874 | 211874_s_at | MYST4 | NM_012330 |
| 1875 | 208541_x_at | TFAM | NM_003201 |
| 1876 | 242868_at | — | — |
| 1877 | 227522_at | CMBL | NM_138809 |
| 1878 | 207324_s_at | DSC1 | NM_004948 |
| 1879 | 1560109_s_at | — | — |
| 1880 | 231644_at | — | — |
| 1881 | 1554360_at | FCHSD2 | NM_014824 |
| 1882 | 239988_at | — | — |
| 1883 | 201898_s_at | UBE2A | NM_003336 |
| 1884 | 1555420_a_at | KLF7 | NM_003709 |
| 1885 | 209691_s_at | DOK4 | NM_018110 |
| 1886 | 213596_at | CASP4 | NM_001225 |
| 1887 | 243767_at | — | — |
| 1888 | 218014_at | NUP85 | NM_024844 |
| 1889 | 208179_x_at | KIR2DL3 | NM_014511 |
| 1890 | 230761_at | — | — |
| 1891 | 217100_s_at | UBXN7 | NM_015562 |
| 1892 | 242066_at | — | — |
| 1893 | 232927_at | — | — |
| 1894 | 217933_s_at | LAP3 | NM_015907 |
| 1895 | 205929_at | GPA33 | NM_005814 |
| 1896 | 234049_at | hCG_1990547 | NR_024361 |
| 1897 | 225435_at | SSR1 | NM_003144 |
| 1898 | 203560_at | GGH | NM_003878 |
| 1899 | 1555427_s_at | SYNCRIP | NM_001159673 |
| 1900 | 215127_s_at | RBMS1 | NM_002897 |
| 1901 | 1561211_at | — | — |
| 1902 | 226509_at | ZNF641 | NM_152320 |
| 1903 | 228088_at | SESTD1 | NM_178123 |
| 1904 | 218126_at | FAM82A2 | NM_018145 |
| 1905 | 1559052_s_at | PAK2 | NM_002577 |
| 1906 | 203311_s_at | ARF6 | NM_001663 |
| 1907 | 232646_at | TTC17 | NM_018259 |
| 1908 | 218907_s_at | LRRC61 | NM_001142928 |
| 1909 | 232744_x_at | — | — |
| 1910 | 213310_at | EIF2C2 | NM_012154 |
| 1911 | 222900_at | NRIP3 | NM_020645 |
| 1912 | 1552607_at | NCRNA00204 | NR_027401 |
| 1913 | 232237_at | MDGA1 | NM_153487 |
| 1914 | 1558310_s_at | hCG_2039148 | XR_078315 |
| 1915 | 233794_at | — | — |
| 1916 | 207276_at | CDR1 | NM_004065 |
| 1917 | 228719_at | ZSWIM7 | NM_001042697 |
| 1918 | 200076_s_at | C19orf50 | NM_024069 |
| 1919 | 209750_at | NR1D2 | NM_001145425 |
| 1920 | 243033_at | TWF1 | NM_002822 |
| 1921 | 226210_s_at | MEG3 | NR_002766 |
| 1922 | 228434_at | BTNL9 | NM_152547 |
| 1923 | 204497_at | ADCY9 | NM_001116 |
| 1924 | 203339_at | SLC25A12 | NM_003705 |
| 1925 | 229980_s_at | SNX5 | NM_014426 |
| 1926 | 213531_s_at | RAB3GAP1 | NM_012233 |
| 1927 | 201487_at | CTSC | NM_001114173 |
| 1928 | 215169_at | SLC35E2 | NM_182838 |
| 1929 | 203342_at | TIMM17B | NM_005834 |
| 1930 | 222879_s_at | POLH | NM_006502 |
| 1931 | 239866_at | — | — |
| 1932 | 209110_s_at | RGL2 | NM_004761 |
| 1933 | 214083_at | PPP2R5C | NM_001161725 |
| 1934 | 205770_at | GSR | NM_000637 |
| 1935 | 219684_at | RTP4 | NM_022147 |
| 1936 | 206448_at | ZNF365 | NM_014951 |
| 1937 | 222230_s_at | ACTR10 | NM_018477 |
| 1938 | 1553689_s_at | METTL6 | NM_152396 |
| 1939 | 226032_at | CASP2 | NM_032982 |
| 1940 | 242858_at | — | — |
| 1941 | 241590_at | — | — |
| 1942 | 207113_s_at | TNF | NM_000594 |
| 1943 | 234886_at | TRBV24-1 | — |
| 1944 | 205978_at | KL | NM_004795 |
| 1945 | 243213_at | STAT3 | NM_003150 |
| 1946 | 236668_at | — | — |
| 1947 | 230683_at | ANKRD60 | XM_001134442 |
| 1948 | 217747_s_at | RPS9 | NM_001013 |
| 1949 | 1560228_at | SNAI3 | NM_178310 |
| 1950 | 233571_x_at | PPDPF | NM_024299 |
| 1951 | 222214_at | — | — |
| 1952 | 220079_s_at | USP48 | NM_001032730 |
| 1953 | 233401_at | — | — |
| 1954 | 223566_s_at | BCOR | NM_001123383 |
| 1955 | 221964_at | TULP3 | NM_001160408 |
| 1956 | 212337_at | TUG1 | NR_002323 |
| 1957 | 201192_s_at | PITPNA | NM_006224 |
| 1958 | 223217_s_at | NFKBIZ | NM_001005474 |
| 1959 | 243955_at | — | — |
| 1960 | 231810_at | BRI3BP | NM_080626 |
| 1961 | 218627_at | DRAM1 | NM_018370 |
| 1962 | 205728_at | ODZ1 | NM_001163278 |
| 1963 | 238425_at | — | — |
| 1964 | 202299_s_at | HBXIP | NM_006402 |
| 1965 | 203659_s_at | TRIM13 | NM_001007278 |
| 1966 | 207735_at | RNF125 | NM_017831 |
| 1967 | 233979_s_at | ESPN | NM_031475 |
| 1968 | 226300_at | MED19 | NM_153450 |
| 1969 | 222307_at | LOC282997 | NR_026932 |
| 1970 | 1559699_at | C20orf74 | NM_020343 |
| 1971 | 239937_at | ZNF207 | NM_001032293 |
| 1972 | 211022_s_at | ATRX | NM_000489 |
| 1973 | 203567_s_at | TRIM38 | NM_006355 |
| 1974 | 203054_s_at | TCTA | NM_022171 |
| 1975 | 202905_x_at | NBN | NM_002485 |
| 1976 | 237870_at | LOC285771 | — |
| 1977 | 232044_at | RBBP6 | NM_006910 |
| 1978 | 201931_at | ETFA | NM_000126 |
| 1979 | 203694_s_at | DHX16 | NM_001164239 |
| 1980 | 224652_at | CCNY | NM_145012 |
| 1981 | 221978_at | HLA-F | NM_001098478 |
| 1982 | 243995_at | PTAR1 | NM_001099666 |
| 1983 | 225925_s_at | USP48 | NM_001032730 |
| 1984 | 204750_s_at | DSC2 | NM_004949 |
| 1985 | 226606_s_at | GTPBP5 | NM_015666 |
| 1986 | 232141_at | U2AF1 | NM_001025203 |
| 1987 | 227535_at | C15orf24 | NM_020154 |
| 1988 | 1553829_at | C2orf58 | NR_027252 |
| 1989 | 208853_s_at | CANX | NM_001024649 |
| 1990 | 212020_s_at | MKI67 | NM_001145966 |
| 1991 | 225205_at | KIF3B | NM_004798 |
| 1992 | 232724_at | MS4A6A | NM_022349 |
| 1993 | 221139_s_at | CSAD | NM_015989 |
| 1994 | 210495_x_at | FN1 | NM_002026 |
| 1995 | 210910_s_at | POMZP3 | NM_012230 |
| 1996 | 1555920_at | CBX3 | NM_007276 |
| 1997 | 220980_s_at | ADPGK | NM_031284 |
| 1998 | 1556601_a_at | SPATA13 | NM_153023 |
| 1999 | 215236_s_at | PICALM | NM_001008660 |
| 2000 | 240031_at | MSRA | NM_001135670 |
| 2001 | 234980_at | TMEM56 | NM_152487 |
| 2002 | 1556865_at | — | — |

TABLE 1A

| | | | Non- |
|---|---|---|---|
| | | Log-2 | Log |
| Seq. | | Fold | Fold |
| Number | Probe Set ID | Change | Chng. |
| 1 | 1560255_at | 0.53 | 144% |
| 2 | 238712_at | 0.29 | 122% |
| 3 | 227970_at | −0.55 | 68% |
| 4 | 237056_at | 0.94 | 192% |
| 5 | 241981_at | 0.86 | 182% |
| 6 | 223974_at | 0.59 | 151% |
| 7 | 241415_at | 0.31 | 124% |
| 8 | 1565544_at | 0.56 | 147% |
| 9 | 216693_x_at | 0.44 | 136% |
| 10 | 1570264_at | 0.39 | 131% |
| 11 | 221044_s_at | 0.19 | 114% |
| 12 | 203658_at | 0.39 | 131% |
| 13 | 213390_at | −0.11 | 93% |
| 14 | 224832_at | −0.37 | 77% |
| 15 | 212642_s_at | −0.33 | 80% |
| 16 | 225005_at | −0.22 | 86% |
| 17 | 242167_at | 0.33 | 126% |
| 18 | 221143_at | 0.32 | 125% |
| 19 | 243824_at | 0.62 | 154% |
| 20 | 222139_at | 0.66 | 158% |
| 21 | 237315_at | 0.37 | 129% |
| 22 | 238360_s_at | 0.28 | 121% |
| 23 | 239571_at | 0.38 | 130% |
| 24 | 232356_at | 0.24 | 118% |
| 25 | 224645_at | −0.22 | 86% |
| 26 | 1556110_at | −0.21 | 86% |
| 27 | 234842_at | −0.21 | 86% |
| 28 | 212017_at | −0.24 | 85% |
| 29 | 226772_s_at | 0.23 | 117% |
| 30 | 1552648_a_at | −0.32 | 80% |
| 31 | 225840_at | −0.35 | 78% |
| 32 | 202657_s_at | −0.27 | 83% |
| 33 | 231764_at | −0.22 | 86% |
| 34 | 232513_x_at | 0.42 | 134% |
| 35 | 233283_at | 0.46 | 138% |
| 36 | 206983_at | −0.69 | 62% |
| 37 | 243654_at | 0.61 | 153% |
| 38 | 223558_at | −0.33 | 80% |
| 39 | 225263_at | −0.16 | 90% |
| 40 | 1563497_at | 0.25 | 119% |
| 41 | 237655_at | 0.65 | 157% |
| 42 | 230571_at | −0.28 | 82% |
| 43 | 238439_at | 1.42 | 268% |
| 44 | 200666_s_at | −0.18 | 88% |
| 45 | 235024_at | −0.21 | 86% |
| 46 | 244025_at | 0.15 | 111% |
| 47 | 217868_s_at | 0.23 | 117% |
| 48 | 236229_at | 0.43 | 135% |
| 49 | 202365_at | −0.24 | 85% |
| 50 | 208741_at | −0.20 | 87% |
| 51 | 226585_at | −0.30 | 81% |
| 52 | 219938_s_at | 0.34 | 127% |
| 53 | 1554557_at | 0.35 | 127% |
| 54 | 244492_at | 0.50 | 141% |
| 55 | 243303_at | 0.23 | 117% |
| 56 | 216112_at | 0.29 | 122% |
| 57 | 225494_at | −0.32 | 80% |
| 58 | 239363_at | −0.31 | 81% |
| 59 | 1563975_at | 0.67 | 159% |
| 60 | 242917_at | 0.55 | 146% |
| 61 | 240661_at | 0.37 | 129% |
| 62 | 226547_at | −0.10 | 93% |
| 63 | 231259_s_at | −0.51 | 70% |
| 64 | 210281_s_at | 0.27 | 121% |
| 65 | 235543_at | 0.33 | 126% |
| 66 | 202656_s_at | −0.18 | 88% |
| 67 | 243399_at | 0.44 | 136% |
| 68 | 205321_at | −0.32 | 80% |
| 69 | 230738_at | 0.39 | 131% |
| 70 | 234302_s_at | −0.17 | 89% |
| 71 | 231309_at | −0.33 | 80% |
| 72 | 201751_at | −0.22 | 86% |
| 73 | 221654_s_at | 0.08 | 106% |
| 74 | 235058_at | −0.26 | 84% |
| 75 | 203609_s_at | −0.41 | 75% |
| 76 | 239845_at | 0.31 | 124% |
| 77 | 223637_s_at | 0.26 | 120% |
| 78 | 228156_at | 0.23 | 117% |
| 79 | 243509_at | 0.33 | 126% |
| 80 | 238053_at | 0.45 | 137% |
| 81 | 240733_at | 0.31 | 124% |
| 82 | 235421_at | 0.21 | 116% |
| 83 | 204787_at | 0.71 | 164% |
| 84 | 212806_at | 1.21 | 231% |
| 85 | 200759_x_at | −0.08 | 95% |
| 86 | 213174_at | −0.48 | 72% |
| 87 | 205181_at | 0.23 | 117% |
| 88 | 242306_at | 0.21 | 116% |
| 89 | 1562321_at | 0.60 | 152% |
| 90 | 201578_at | 0.10 | 107% |
| 91 | 1554132_a_at | −0.21 | 86% |
| 92 | 225545_at | −0.31 | 81% |
| 93 | 228811_at | −0.47 | 72% |
| 94 | 203879_at | −0.08 | 95% |
| 95 | 201170_s_at | −0.43 | 74% |
| 96 | 215322_at | 0.38 | 130% |
| 97 | 1562110_at | 0.43 | 135% |
| 98 | 226804_at | 0.62 | 154% |
| 99 | 1554116_s_at | 0.45 | 137% |
| 100 | 237942_at | 0.24 | 118% |
| 101 | 219671_at | −0.62 | 65% |
| 102 | 210104_at | −0.16 | 90% |
| 103 | 212097_at | 0.69 | 161% |
| 104 | 1558761_a_at | 0.29 | 122% |
| 105 | 215888_at | 0.24 | 118% |
| 106 | 208823_s_at | −0.22 | 86% |
| 107 | 201731_s_at | −0.18 | 88% |
| 108 | 220131_at | −0.34 | 79% |
| 109 | 216233_at | 0.60 | 152% |
| 110 | 236629_at | −0.36 | 78% |
| 111 | 1562260_at | 0.34 | 127% |
| 112 | 33494_at | 0.18 | 113% |
| 113 | 228068_at | −0.17 | 89% |
| 114 | 222640_at | −0.17 | 89% |
| 115 | 239077_at | 0.41 | 133% |
| 116 | 207040_s_at | −0.26 | 84% |
| 117 | 228723_at | 0.22 | 116% |
| 118 | 1562031_at | 0.66 | 158% |
| 119 | 218771_at | −0.13 | 91% |
| 120 | 219906_at | 0.23 | 117% |
| 121 | 217286_s_at | −0.17 | 89% |
| 122 | 235777_at | 0.20 | 115% |
| 123 | 218625_at | 0.91 | 188% |
| 124 | 1567213_at | 0.30 | 123% |
| 125 | 243276_at | −0.43 | 74% |
| 126 | 215210_s_at | −0.23 | 85% |
| 127 | 207339_s_at | −0.32 | 80% |
| 128 | 202533_s_at | 0.12 | 109% |
| 129 | 230267_at | 0.35 | 127% |
| 130 | 218168_s_at | −0.30 | 81% |
| 131 | 222844_s_at | −0.32 | 80% |
| 132 | 233264_at | 0.33 | 126% |
| 133 | 214501_s_at | 0.15 | 111% |
| 134 | 203505_at | 0.54 | 145% |
| 135 | 203556_at | −0.15 | 90% |
| 136 | 226474_at | 0.14 | 110% |
| 137 | 215640_at | 0.29 | 122% |
| 138 | 243902_at | 0.64 | 156% |
| 139 | 208109_s_at | 0.15 | 111% |
| 140 | 220905_at | 0.21 | 116% |
| 141 | 201259_s_at | −0.20 | 87% |
| 142 | 221908_at | −0.41 | 75% |
| 143 | 205379_at | −0.66 | 63% |
| 144 | 229374_at | −0.39 | 76% |
| 145 | 1569666_s_at | 0.59 | 151% |
| 146 | 228216_at | 0.26 | 120% |
| 147 | 240217_s_at | −0.12 | 92% |
| 148 | 218287_s_at | −0.20 | 87% |
| 149 | 218517_at | −0.13 | 91% |
| 150 | 244796_at | 0.22 | 116% |
| 151 | 233976_at | 0.21 | 116% |
| 152 | 233647_s_at | 0.31 | 124% |
| 153 | 239489_at | 0.27 | 121% |
| 154 | 238923_at | −0.18 | 88% |
| 155 | 237018_at | 0.13 | 109% |
| 156 | 240176_at | 0.40 | 132% |
| 157 | 200860_s_at | −0.16 | 90% |
| 158 | 212639_x_at | −0.09 | 94% |
| 159 | 201236_s_at | −0.16 | 90% |
| 160 | 205857_at | 0.38 | 130% |
| 161 | 228603_at | 0.28 | 121% |
| 162 | 238728_at | −0.25 | 84% |
| 163 | 216729_at | 0.40 | 132% |
| 164 | 206674_at | 0.55 | 146% |
| 165 | 238025_at | 0.16 | 112% |
| 166 | 203255_at | 0.07 | 105% |
| 167 | 213294_at | 0.34 | 127% |
| 168 | 215209_at | 0.29 | 122% |
| 169 | 208030_s_at | −0.12 | 92% |
| 170 | 238570_at | −0.20 | 87% |
| 171 | 232164_s_at | −0.70 | 62% |
| 172 | 209828_s_at | −0.23 | 85% |
| 173 | 222526_at | −0.23 | 85% |
| 174 | 203366_at | −0.17 | 89% |
| 175 | 242319_at | 0.47 | 139% |
| 176 | 223846_at | 0.31 | 124% |
| 177 | 234402_at | −0.60 | 66% |
| 178 | 32042_at | −0.18 | 88% |
| 179 | 225478_at | −0.37 | 77% |
| 180 | 229754_at | 0.36 | 128% |
| 181 | 243514_at | 0.34 | 127% |
| 182 | 213484_at | −0.59 | 66% |
| 183 | 208744_x_at | −0.45 | 73% |
| 184 | 1558592_at | 0.15 | 111% |
| 185 | 239462_at | −0.32 | 80% |
| 186 | 212399_s_at | −0.16 | 90% |
| 187 | 236013_at | 0.86 | 182% |
| 188 | 211986_at | −0.18 | 88% |
| 189 | 242803_at | 0.16 | 112% |
| 190 | 217815_at | −0.07 | 95% |
| 191 | 219120_at | −0.25 | 84% |
| 192 | 242780_at | 0.27 | 121% |
| 193 | 242695_at | 0.19 | 114% |
| 194 | 1570394_at | 0.43 | 135% |
| 195 | 221639_x_at | −0.54 | 69% |
| 196 | 217185_s_at | −0.21 | 86% |
| 197 | 1568964_x_at | −0.22 | 86% |
| 198 | 1556942_at | 0.40 | 132% |
| 199 | 200594_x_at | −0.16 | 90% |
| 200 | 1559739_at | 0.35 | 127% |
| 201 | 232157_at | 0.31 | 124% |
| 202 | 224855_at | −0.21 | 86% |
| 203 | 200796_s_at | −0.26 | 84% |
| 204 | 201747_s_at | −0.12 | 92% |
| 205 | 205781_at | 0.29 | 122% |
| 206 | 201032_at | −0.15 | 90% |
| 207 | 226687_at | 0.11 | 108% |
| 208 | 207253_s_at | −0.08 | 95% |
| 209 | 222310_at | −0.04 | 97% |
| 210 | 203218_at | 0.17 | 113% |
| 211 | 203409_at | −0.03 | 98% |
| 212 | 217857_s_at | −0.09 | 94% |
| 213 | 212428_at | −0.14 | 91% |
| 214 | 213266_at | −0.11 | 93% |
| 215 | 201652_at | 0.08 | 106% |
| 216 | 204211_x_at | 0.25 | 119% |
| 217 | 201051_at | −0.03 | 98% |
| 218 | 230998_at | 0.06 | 104% |
| 219 | 230664_at | −0.09 | 94% |
| 220 | 200979_at | −0.07 | 95% |
| 221 | 228623_at | −0.02 | 99% |
| 222 | 200767_s_at | 0.01 | 101% |
| 223 | 201721_s_at | 0.00 | 100% |
| 224 | 200030_s_at | −0.07 | 95% |
| 225 | 215828_at | −0.04 | 97% |
| 226 | 237943_at | 0.16 | 112% |
| 227 | 1569369_at | −0.01 | 99% |
| 228 | 204216_s_at | −0.05 | 97% |
| 229 | 202796_at | −0.31 | 81% |
| 230 | 226656_at | −0.24 | 85% |
| 231 | 212234_at | −0.16 | 90% |
| 232 | 209715_at | −0.14 | 91% |
| 233 | 200016_x_at | −0.06 | 96% |
| 234 | 209078_s_at | −0.07 | 95% |
| 235 | 204275_at | −0.04 | 97% |
| 236 | 1566501_at | 0.12 | 109% |
| 237 | 228091_at | −0.02 | 99% |
| 238 | 1554096_a_at | 0.08 | 106% |
| 239 | 209358_at | −0.03 | 98% |
| 240 | 1554628_at | −0.10 | 93% |
| 241 | 203379_at | 0.00 | 100% |
| 242 | 1569999_at | −0.04 | 97% |
| 243 | 232628_at | 0.01 | 101% |
| 244 | 219004_s_at | −0.16 | 90% |
| 245 | 222043_at | 0.13 | 109% |
| 246 | 212527_at | 0.18 | 113% |
| 247 | 235114_x_at | 0.06 | 104% |
| 248 | 232188_at | 0.37 | 129% |
| 249 | 209735_at | 0.19 | 114% |
| 250 | 207604_s_at | −0.12 | 92% |
| 251 | 224990_at | 0.04 | 103% |
| 252 | 235840_at | 0.01 | 101% |
| 253 | 232648_at | 0.12 | 109% |
| 254 | 220213_at | −0.49 | 71% |
| 255 | 218912_at | −0.14 | 91% |
| 256 | 219963_at | 0.67 | 159% |
| 257 | 214783_s_at | 0.01 | 101% |
| 258 | 213836_s_at | 0.40 | 132% |
| 259 | 202184_s_at | −0.14 | 91% |
| 260 | 237317_at | 0.26 | 120% |
| 261 | 214016_s_at | −0.04 | 97% |
| 262 | 236901_at | 0.47 | 139% |
| 263 | 204025_s_at | −0.02 | 99% |
| 264 | 208740_at | −0.19 | 88% |
| 265 | 201083_s_at | 0.01 | 101% |
| 266 | 208087_s_at | 0.29 | 122% |
| 267 | 202941_at | 0.07 | 105% |
| 268 | 215545_at | 0.17 | 113% |
| 269 | 201088_at | 0.21 | 116% |
| 270 | 1556007_s_at | 0.29 | 122% |
| 271 | 212859_x_at | 0.53 | 144% |
| 272 | 204245_s_at | −0.20 | 87% |
| 273 | 210965_x_at | 0.01 | 101% |
| 274 | 204116_at | −0.12 | 92% |
| 275 | 219409_at | −0.20 | 87% |
| 276 | 204962_s_at | 0.27 | 121% |
| 277 | 221535_at | −0.27 | 83% |
| 278 | 228200_at | −0.21 | 86% |
| 279 | 203905_at | −0.19 | 88% |
| 280 | 212415_at | −0.20 | 87% |
| 281 | 232427_at | 0.13 | 109% |
| 282 | 226052_at | −0.06 | 96% |
| 283 | 227346_at | −0.09 | 94% |
| 284 | 201588_at | 0.03 | 102% |
| 285 | 1561880_a_at | 0.42 | 134% |
| 286 | 221529_s_at | −0.54 | 69% |
| 287 | 224686_x_at | −0.11 | 93% |
| 288 | 201762_s_at | 0.08 | 106% |
| 289 | 210732_s_at | 0.28 | 121% |
| 290 | 229897_at | 0.35 | 127% |
| 291 | 203836_s_at | 0.05 | 104% |
| 292 | 220439_at | 0.34 | 127% |
| 293 | 213193_x_at | −0.21 | 86% |
| 294 | 225125_at | −0.09 | 94% |
| 295 | 1555884_at | 0.25 | 119% |
| 296 | 210277_at | 0.04 | 103% |
| 297 | 223946_at | 0.59 | 151% |
| 298 | 212346_s_at | −0.12 | 92% |
| 299 | 203799_at | 0.11 | 108% |
| 300 | 228158_at | 0.07 | 105% |
| 301 | 238140_at | −0.21 | 86% |
| 302 | 236703_at | 0.35 | 127% |
| 303 | 1565651_at | 0.19 | 114% |
| 304 | 200988_s_at | −0.19 | 88% |
| 305 | 206652_at | 0.15 | 111% |
| 306 | 202717_s_at | −0.03 | 98% |
| 307 | 1554424_at | −0.23 | 85% |
| 308 | 231557_at | 0.51 | 142% |
| 309 | 1557520_a_at | 0.09 | 106% |
| 310 | 200751_s_at | −0.13 | 91% |
| 311 | 209299_x_at | −0.13 | 91% |
| 312 | 238704_at | −0.32 | 80% |
| 313 | 1555906_s_at | 0.07 | 105% |
| 314 | 232034_at | 0.47 | 139% |
| 315 | 1568907_at | 0.31 | 124% |
| 316 | 232330_at | 0.21 | 116% |
| 317 | 1563687_a_at | −0.21 | 86% |
| 318 | 226107_at | 0.31 | 124% |
| 319 | 214472_at | 0.52 | 143% |
| 320 | 208978_at | −0.34 | 79% |
| 321 | 222975_s_at | −0.08 | 95% |
| 322 | 232569_at | 0.46 | 138% |
| 323 | 230735_at | 0.36 | 128% |
| 324 | 203497_at | −0.21 | 86% |
| 325 | 219138_at | −0.05 | 97% |
| 326 | 200815_s_at | 0.03 | 102% |
| 327 | 233545_at | 0.14 | 110% |
| 328 | 208876_s_at | −0.07 | 95% |
| 329 | 204533_at | 0.63 | 155% |
| 330 | 241752_at | 0.38 | 130% |
| 331 | 202768_at | −0.47 | 72% |
| 332 | 234991_at | 0.29 | 122% |
| 333 | 228818_at | −0.32 | 80% |
| 334 | 218805_at | −0.19 | 88% |
| 335 | 219001_s_at | 0.25 | 119% |
| 336 | 202386_s_at | −0.11 | 93% |
| 337 | 228624_at | 0.53 | 144% |
| 338 | 236971_at | 0.29 | 122% |
| 339 | 202840_at | −0.15 | 90% |
| 340 | 209124_at | 0.10 | 107% |
| 341 | 210136_at | −0.16 | 90% |
| 342 | 202003_s_at | 0.18 | 113% |
| 343 | 238788_at | −0.11 | 93% |
| 344 | 243598_at | 0.26 | 120% |
| 345 | 222909_s_at | 0.19 | 114% |
| 346 | 218641_at | 0.14 | 110% |
| 347 | 239104_at | 0.31 | 124% |
| 348 | 1558354_s_at | 0.14 | 110% |
| 349 | 238257_at | 0.34 | 127% |
| 350 | 1568830_at | 0.67 | 159% |
| 351 | 231937_at | 0.25 | 119% |
| 352 | 212766_s_at | −0.12 | 92% |
| 353 | 1569652_at | −0.22 | 86% |
| 354 | 223832_s_at | 0.48 | 139% |
| 355 | 227249_at | −0.19 | 88% |
| 356 | 209162_s_at | −0.18 | 88% |
| 357 | 210943_s_at | 0.19 | 114% |
| 358 | 213963_s_at | 0.54 | 145% |
| 359 | 233079_at | 0.28 | 121% |
| 360 | 242945_at | 0.78 | 172% |
| 361 | 239213_at | 0.39 | 131% |
| 362 | 226229_s_at | −0.18 | 88% |
| 363 | 212124_at | −0.19 | 88% |
| 364 | 224357_s_at | 0.47 | 139% |
| 365 | 236273_at | −0.42 | 75% |
| 366 | 204526_s_at | 0.30 | 123% |
| 367 | 233263_at | 0.25 | 119% |
| 368 | 209907_s_at | 0.12 | 109% |
| 369 | 201880_at | −0.03 | 98% |
| 370 | 218448_at | −0.15 | 90% |
| 371 | 243631_at | 0.12 | 109% |
| 372 | 238026_at | −0.28 | 82% |
| 373 | 218454_at | 0.27 | 121% |
| 374 | 202172_at | 0.02 | 101% |
| 375 | 209161_at | −0.18 | 88% |
| 376 | 201470_at | 0.14 | 110% |
| 377 | 206335_at | 0.15 | 111% |
| 378 | 204061_at | −0.43 | 74% |
| 379 | 203368_at | −0.24 | 85% |
| 380 | 235309_at | −0.28 | 82% |
| 381 | 226874_at | 0.33 | 126% |
| 382 | 217905_at | 0.41 | 133% |
| 383 | 215175_at | 0.23 | 117% |
| 384 | 1555793_a_at | −0.39 | 76% |
| 385 | 235681_at | 0.32 | 125% |
| 386 | 243315_at | 0.28 | 121% |
| 387 | 205475_at | 0.51 | 142% |
| 388 | 239902_at | 0.07 | 105% |
| 389 | 216134_at | 0.32 | 125% |
| 390 | 235119_at | −0.21 | 86% |
| 391 | 1553333_at | 0.35 | 127% |
| 392 | 203113_s_at | −0.18 | 88% |
| 393 | 235518_at | 0.32 | 125% |
| 394 | 217555_at | −0.26 | 84% |
| 395 | 227854_at | 0.29 | 122% |
| 396 | 225613_at | −0.25 | 84% |
| 397 | 201739_at | −0.28 | 82% |
| 398 | 201960_s_at | −0.16 | 90% |
| 399 | 221571_at | −0.25 | 84% |
| 400 | 221819_at | −0.19 | 88% |
| 401 | 203298_s_at | −0.12 | 92% |
| 402 | 1558459_s_at | 0.18 | 113% |
| 403 | 57516_at | −0.23 | 85% |
| 404 | 202714_s_at | −0.37 | 77% |
| 405 | 1559614_at | 0.26 | 120% |
| 406 | 223027_at | −0.35 | 78% |
| 407 | 201927_s_at | −0.44 | 74% |
| 408 | 200699_at | −0.13 | 91% |
| 409 | 223189_x_at | −0.10 | 93% |
| 410 | 215507_x_at | −0.20 | 87% |
| 411 | 219385_at | 0.31 | 124% |
| 412 | 218039_at | 0.28 | 121% |
| 413 | 1567101_at | 0.58 | 149% |
| 414 | 1563629_a_at | 0.22 | 116% |
| 415 | 217894_at | 0.28 | 121% |
| 416 | 212814_at | −0.10 | 93% |
| 417 | 205692_s_at | 0.37 | 129% |
| 418 | 233186_s_at | −0.17 | 89% |
| 419 | 219308_s_at | −0.57 | 67% |
| 420 | 1556750_at | 0.25 | 119% |
| 421 | 203676_at | 0.34 | 127% |
| 422 | 234865_at | −0.81 | 57% |
| 423 | 209555_s_at | 0.40 | 132% |
| 424 | 200633_at | −0.06 | 96% |
| 425 | 203065_s_at | 0.40 | 132% |
| 426 | 235959_at | 0.22 | 116% |
| 427 | 218047_at | 0.21 | 116% |
| 428 | 218358_at | 0.01 | 101% |
| 429 | 228138_at | −0.28 | 82% |
| 430 | 226913_s_at | −0.62 | 65% |
| 431 | 1560705_at | 0.27 | 121% |
| 432 | 232821_at | −0.41 | 75% |
| 433 | 239679_at | −0.03 | 98% |
| 434 | 237953_at | −0.34 | 79% |
| 435 | 220560_at | 0.18 | 113% |
| 436 | 220797_at | −0.11 | 93% |
| 437 | 219112_at | −0.17 | 89% |
| 438 | 235061_at | −0.36 | 78% |
| 439 | 212945_s_at | −0.22 | 86% |
| 440 | 218232_at | 0.60 | 152% |
| 441 | 213604_at | −0.18 | 88% |
| 442 | 229659_s_at | −0.56 | 68% |
| 443 | 212794_s_at | 0.17 | 113% |
| 444 | 218969_at | 0.08 | 106% |
| 445 | 1555487_a_at | −0.11 | 93% |
| 446 | 207129_at | −0.28 | 82% |
| 447 | 244578_at | 0.28 | 121% |
| 448 | 225407_at | −0.08 | 95% |
| 449 | 230515_at | −0.18 | 88% |
| 450 | 232559_at | 0.19 | 114% |
| 451 | 244726_at | 0.15 | 111% |
| 452 | 238644_at | 0.24 | 118% |
| 453 | 203240_at | −0.81 | 57% |
| 454 | 236399_at | 0.43 | 135% |
| 455 | 223492_s_at | 0.22 | 116% |
| 456 | 203234_at | 0.18 | 113% |
| 457 | 213260_at | 0.40 | 132% |
| 458 | 216142_at | 0.14 | 110% |
| 459 | 233072_at | 0.37 | 129% |
| 460 | 228660_x_at | −0.11 | 93% |
| 461 | 238107_at | 0.38 | 130% |
| 462 | 201376_s_at | −0.15 | 90% |
| 463 | 210317_s_at | −0.18 | 88% |
| 464 | 218426_s_at | −0.15 | 90% |
| 465 | 239637_at | 0.15 | 111% |
| 466 | 224336_s_at | −0.25 | 84% |
| 467 | 244659_at | 0.18 | 113% |
| 468 | 1555950_a_at | 0.17 | 113% |
| 469 | 219284_at | 0.24 | 118% |
| 470 | 236007_at | 0.12 | 109% |
| 471 | 212601_at | −0.10 | 93% |
| 472 | 233781_s_at | 0.15 | 111% |
| 473 | 238109_at | 0.34 | 127% |
| 474 | 201305_x_at | −0.15 | 90% |
| 475 | 210592_s_at | 0.10 | 107% |
| 476 | 204140_at | 0.71 | 164% |
| 477 | 227599_at | −0.42 | 75% |
| 478 | 1554287_at | 0.29 | 122% |
| 479 | 243470_at | 0.08 | 106% |
| 480 | 1562898_at | 0.31 | 124% |
| 481 | 239287_at | −0.67 | 63% |
| 482 | 1558938_at | 0.22 | 116% |
| 483 | 1557780_at | 0.18 | 113% |
| 484 | 207734_at | −0.46 | 73% |
| 485 | 214595_at | −0.63 | 65% |
| 486 | 236982_at | 0.41 | 133% |
| 487 | 1555608_at | −0.30 | 81% |
| 488 | 228923_at | 0.20 | 115% |
| 489 | 207968_s_at | −0.43 | 74% |
| 490 | 203927_at | −0.06 | 96% |
| 491 | 222306_at | −0.03 | 98% |
| 492 | 203130_s_at | −0.49 | 71% |
| 493 | 219498_s_at | −0.34 | 79% |
| 494 | 1557224_at | 0.18 | 113% |
| 495 | 223313_s_at | −0.35 | 78% |
| 496 | 1555180_at | 0.35 | 127% |
| 497 | 203632_s_at | −0.83 | 56% |
| 498 | 220387_s_at | −0.33 | 80% |
| 499 | 217791_s_at | −0.13 | 91% |
| 500 | 1559479_at | 0.48 | 139% |
| 501 | 1554600_s_at | −0.17 | 89% |
| 502 | 1569792_a_at | 0.29 | 122% |
| 503 | 235071_at | −0.32 | 80% |
| 504 | 243334_at | 0.37 | 129% |
| 505 | 234848_at | −0.72 | 61% |
| 506 | 201489_at | −0.21 | 86% |
| 507 | 210189_at | 0.16 | 112% |
| 508 | 221816_s_at | 0.07 | 105% |
| 509 | 231319_x_at | −0.14 | 91% |
| 510 | 202863_at | 0.18 | 113% |
| 511 | 235699_at | 0.28 | 121% |
| 512 | 211930_at | −0.11 | 93% |
| 513 | 228349_at | 0.24 | 118% |
| 514 | 224516_s_at | −0.35 | 78% |
| 515 | 204099_at | 0.34 | 127% |
| 516 | 221589_s_at | −0.28 | 82% |
| 517 | 1569617_at | −0.31 | 81% |
| 518 | 212904_at | −0.19 | 88% |
| 519 | 203007_x_at | 0.25 | 119% |
| 520 | 236165_at | 0.25 | 119% |
| 521 | 229404_at | 0.78 | 172% |
| 522 | 222234_s_at | −0.33 | 80% |
| 523 | 200659_s_at | −0.14 | 91% |
| 524 | 226668_at | 0.28 | 121% |
| 525 | 219669_at | 1.64 | 312% |
| 526 | 208778_s_at | −0.13 | 91% |
| 527 | 203320_at | −0.18 | 88% |
| 528 | 226802_s_at | −0.24 | 85% |
| 529 | 1565928_at | −0.35 | 78% |
| 530 | 212259_s_at | −0.15 | 90% |
| 531 | 231816_s_at | −0.27 | 83% |
| 532 | 228184_at | −0.36 | 78% |
| 533 | 222821_s_at | 0.08 | 106% |
| 534 | 217722_s_at | −0.18 | 88% |
| 535 | 1566171_at | 0.14 | 110% |
| 536 | 233219_at | 0.33 | 126% |
| 537 | 1565894_at | 0.27 | 121% |
| 538 | 1569599_at | 0.69 | 161% |
| 539 | 206761_at | −0.40 | 76% |
| 540 | 1556253_s_at | 0.36 | 128% |
| 541 | 1564053_a_at | 0.08 | 106% |
| 542 | 229199_at | 0.31 | 124% |
| 543 | 226734_at | −0.24 | 85% |
| 544 | 226447_at | −0.12 | 92% |
| 545 | 202985_s_at | −0.05 | 97% |
| 546 | 208180_s_at | 0.39 | 131% |
| 547 | 217995_at | 0.12 | 109% |
| 548 | 234172_at | 0.36 | 128% |
| 549 | 205169_at | −0.13 | 91% |
| 550 | 212387_at | −0.38 | 77% |
| 551 | 213293_s_at | 0.24 | 118% |
| 552 | 244536_at | 0.16 | 112% |
| 553 | 232306_at | 0.30 | 123% |
| 554 | 212838_at | −0.18 | 88% |
| 555 | 235033_at | 0.33 | 126% |
| 556 | 203460_s_at | 0.07 | 105% |
| 557 | 209409_at | 0.38 | 130% |
| 558 | 216527_at | 0.19 | 114% |
| 559 | 1554453_at | 0.18 | 113% |
| 560 | 226775_at | 0.13 | 109% |
| 561 | 211152_s_at | 0.12 | 109% |
| 562 | 235825_at | 0.19 | 114% |
| 563 | 212594_at | −0.14 | 91% |
| 564 | 206059_at | −0.33 | 80% |
| 565 | 214184_at | 0.09 | 106% |
| 566 | 205392_s_at | 0.29 | 122% |
| 567 | 213046_at | 0.05 | 104% |
| 568 | 234883_x_at | −0.39 | 76% |
| 569 | 228650_at | −0.25 | 84% |
| 570 | 227112_at | −0.21 | 86% |
| 571 | 217431_x_at | 0.18 | 113% |
| 572 | 202095_s_at | 0.42 | 134% |
| 573 | 206026_s_at | 0.62 | 154% |
| 574 | 226651_at | 0.16 | 112% |
| 575 | 240859_at | 0.39 | 131% |
| 576 | 1555634_a_at | 0.48 | 139% |
| 577 | 235207_at | 0.12 | 109% |
| 578 | 231695_at | 0.36 | 128% |
| 579 | 213524_s_at | 0.83 | 178% |
| 580 | 212318_at | 0.08 | 106% |
| 581 | 227329_at | −0.30 | 81% |
| 582 | 203050_at | −0.22 | 86% |
| 583 | 219975_x_at | 1.02 | 203% |
| 584 | 215671_at | 0.33 | 126% |
| 585 | 231260_at | −0.39 | 76% |
| 586 | 217513_at | 0.48 | 139% |
| 587 | 1556339_a_at | 0.33 | 126% |
| 588 | 208774_at | −0.11 | 93% |
| 589 | 221536_s_at | −0.10 | 93% |
| 590 | 231641_at | 0.29 | 122% |
| 591 | 202551_s_at | 0.22 | 116% |
| 592 | 204110_at | 0.22 | 116% |
| 593 | 201235_s_at | −0.20 | 87% |
| 594 | 219633_at | 0.22 | 116% |
| 595 | 227055_at | 0.89 | 185% |
| 596 | 234427_at | −0.59 | 66% |
| 597 | 239819_at | 0.20 | 115% |
| 598 | 230762_at | 0.33 | 126% |
| 599 | 201651_s_at | −0.17 | 89% |
| 600 | 244579_at | 0.16 | 112% |
| 601 | 233476_at | 0.23 | 117% |
| 602 | 1562576_at | 0.50 | 141% |
| 603 | 227589_at | −0.19 | 88% |
| 604 | 209062_x_at | 0.34 | 127% |
| 605 | 236755_at | 0.22 | 116% |
| 606 | 223608_at | 0.51 | 142% |
| 607 | 204079_at | 0.15 | 111% |
| 608 | 238789_at | −0.74 | 60% |
| 609 | 213172_at | −0.43 | 74% |
| 610 | 224582_s_at | −0.37 | 77% |
| 611 | 243796_at | 0.22 | 116% |
| 612 | 213567_at | −0.05 | 97% |
| 613 | 242197_x_at | 0.27 | 121% |
| 614 | 244177_at | −0.06 | 96% |
| 615 | 210873_x_at | 0.37 | 129% |
| 616 | 238929_at | −0.28 | 82% |
| 617 | 229756_at | 0.40 | 132% |
| 618 | 224681_at | −0.29 | 82% |
| 619 | 242423_x_at | 0.29 | 122% |
| 620 | 219300_s_at | −0.91 | 53% |
| 621 | 209477_at | −0.15 | 90% |
| 622 | 203088_at | −0.74 | 60% |
| 623 | 242947_at | −0.45 | 73% |
| 624 | 210609_s_at | 0.49 | 140% |
| 625 | 203660_s_at | −0.22 | 86% |
| 626 | 213755_s_at | −0.39 | 76% |
| 627 | 216297_at | 0.34 | 127% |
| 628 | 1559375_s_at | 0.36 | 128% |
| 629 | 217866_at | −0.18 | 88% |
| 630 | 223337_at | −0.03 | 98% |
| 631 | 221524_s_at | 0.37 | 129% |
| 632 | 216614_at | 0.15 | 111% |
| 633 | 220342_x_at | 0.17 | 113% |
| 634 | 218883_s_at | 0.36 | 128% |
| 635 | 217486_s_at | 0.28 | 121% |
| 636 | 236572_at | 0.27 | 121% |
| 637 | 203188_at | −0.47 | 72% |
| 638 | 1564231_at | −0.48 | 72% |
| 639 | 209765_at | 0.03 | 102% |
| 640 | 202902_s_at | 0.05 | 104% |
| 641 | 224369_s_at | 0.25 | 119% |
| 642 | 218876_at | −0.66 | 63% |
| 643 | 240099_at | 0.31 | 124% |
| 644 | 228119_at | 0.17 | 113% |
| 645 | 239130_at | 0.30 | 123% |
| 646 | 1560971_a_at | −0.61 | 66% |
| 647 | 222820_at | −0.35 | 78% |
| 648 | 243476_at | 0.15 | 111% |
| 649 | 1558697_a_at | −0.14 | 91% |
| 650 | 1558046_x_at | −0.18 | 88% |
| 651 | 241275_at | 0.37 | 129% |
| 652 | 209425_at | −0.10 | 93% |
| 653 | 228835_at | 0.21 | 116% |
| 654 | 237901_at | 0.34 | 127% |
| 655 | 234785_at | 0.13 | 109% |
| 656 | 1557193_at | 0.24 | 118% |
| 657 | 244447_at | 0.22 | 116% |
| 658 | 204950_at | 0.13 | 109% |
| 659 | 227410_at | −0.25 | 84% |
| 660 | 205500_at | 0.30 | 123% |
| 661 | 228394_at | −0.20 | 87% |
| 662 | 1561206_at | 0.30 | 123% |
| 663 | 48808_at | 0.10 | 107% |
| 664 | 228253_at | 0.24 | 118% |
| 665 | 227501_at | 0.34 | 127% |
| 666 | 226674_at | −0.54 | 69% |
| 667 | 202290_at | −0.18 | 88% |
| 668 | 237062_at | 0.28 | 121% |
| 669 | 1554665_at | 0.15 | 111% |
| 670 | 237082_at | −0.34 | 79% |
| 671 | 201206_s_at | −0.04 | 97% |
| 672 | 1561615_s_at | 0.40 | 132% |
| 673 | 201783_s_at | −0.07 | 95% |
| 674 | 212180_at | −0.13 | 91% |
| 675 | 220289_s_at | 0.22 | 116% |
| 676 | 225157_at | −0.23 | 85% |
| 677 | 237627_at | −0.23 | 85% |
| 678 | 203052_at | 0.37 | 129% |
| 679 | 215030_at | −0.21 | 86% |
| 680 | 208629_s_at | −0.23 | 85% |
| 681 | 201757_at | −0.03 | 98% |
| 682 | 232251_at | 0.39 | 131% |
| 683 | 228468_at | 0.15 | 111% |
| 684 | 226989_at | −0.73 | 60% |
| 685 | 1556257_at | 0.41 | 133% |
| 686 | 223194_s_at | −0.40 | 76% |
| 687 | 212166_at | −0.18 | 88% |
| 688 | 240233_at | 0.36 | 128% |
| 689 | 1563053_at | −0.23 | 85% |
| 690 | 1568915_at | 0.25 | 119% |
| 691 | 223121_s_at | −0.64 | 64% |
| 692 | 204067_at | 0.10 | 107% |
| 693 | 226313_at | −0.49 | 71% |
| 694 | 206636_at | 0.15 | 111% |
| 695 | 212457_at | 0.01 | 101% |
| 696 | 1553856_s_at | −0.44 | 74% |
| 697 | 230885_at | −0.07 | 95% |
| 698 | 231357_at | 0.29 | 122% |
| 699 | 241956_at | 0.11 | 108% |
| 700 | 201596_x_at | −0.19 | 88% |
| 701 | 244026_at | 0.22 | 116% |
| 702 | 211072_x_at | −0.06 | 96% |
| 703 | 230619_at | −0.19 | 88% |
| 704 | 1554833_at | 0.43 | 135% |
| 705 | 212388_at | −0.06 | 96% |
| 706 | 1566809_a_at | −0.38 | 77% |
| 707 | 235310_at | −0.55 | 68% |
| 708 | 211003_x_at | −0.47 | 72% |
| 709 | 230036_at | 0.34 | 127% |
| 710 | 239391_at | 0.10 | 107% |
| 711 | 214243_s_at | −0.29 | 82% |
| 712 | 240806_at | −0.39 | 76% |
| 713 | 1554447_at | 0.25 | 119% |
| 714 | 242501_at | −0.25 | 84% |
| 715 | 209865_at | −0.19 | 88% |
| 716 | 238961_s_at | 0.25 | 119% |
| 717 | 1557465_at | 0.35 | 127% |
| 718 | 1562608_at | 0.49 | 140% |
| 719 | 214394_x_at | −0.08 | 95% |
| 720 | 230796_at | 0.36 | 128% |
| 721 | 220546_at | −0.07 | 95% |
| 722 | 210640_s_at | 0.53 | 144% |
| 723 | 1562745_at | 0.15 | 111% |
| 724 | 1556323_at | 0.31 | 124% |
| 725 | 213208_at | −0.20 | 87% |
| 726 | 201143_s_at | −0.28 | 82% |
| 727 | 202087_s_at | 0.26 | 120% |
| 728 | 1558279_a_at | −0.21 | 86% |
| 729 | 223591_at | 0.15 | 111% |
| 730 | 202005_at | 0.20 | 115% |
| 731 | 242031_at | 0.24 | 118% |
| 732 | 204889_s_at | −0.26 | 84% |
| 733 | 217701_x_at | −0.59 | 66% |
| 734 | 213774_s_at | −0.14 | 91% |
| 735 | 235288_at | 0.13 | 109% |
| 736 | 204222_s_at | 0.06 | 104% |
| 737 | 214513_s_at | −0.13 | 91% |
| 738 | 201678_s_at | −0.17 | 89% |
| 739 | 1563348_at | 0.11 | 108% |
| 740 | 1561306_s_at | −0.44 | 74% |
| 741 | 223733_s_at | 0.44 | 136% |
| 742 | 203308_x_at | 0.00 | 100% |
| 743 | 232121_at | 0.24 | 118% |
| 744 | 1556211_a_at | 0.22 | 116% |
| 745 | 232033_at | −0.23 | 85% |
| 746 | 202601_s_at | −0.22 | 86% |
| 747 | 212680_x_at | 0.15 | 111% |
| 748 | 1563466_at | −0.31 | 81% |
| 749 | 219676_at | 0.15 | 111% |
| 750 | 1558586_at | −0.27 | 83% |
| 751 | 230886_at | 0.11 | 108% |
| 752 | 240144_at | 0.14 | 110% |
| 753 | 1560034_a_at | 0.20 | 115% |
| 754 | 221223_x_at | −0.34 | 79% |
| 755 | 200999_s_at | 0.26 | 120% |
| 756 | 235456_at | 0.55 | 146% |
| 757 | 214766_s_at | 0.08 | 106% |
| 758 | 202706_s_at | −0.14 | 91% |
| 759 | 233176_at | 0.23 | 117% |
| 760 | 227449_at | −0.56 | 68% |
| 761 | 225655_at | 0.32 | 125% |
| 762 | 236024_at | −0.64 | 64% |
| 763 | 207654_x_at | 0.18 | 113% |
| 764 | 236094_at | 0.37 | 129% |
| 765 | 230166_at | 0.31 | 124% |
| 766 | 229008_at | −0.32 | 80% |
| 767 | 210817_s_at | 0.09 | 106% |
| 768 | 1560069_at | 0.09 | 106% |
| 769 | 236113_at | 0.56 | 147% |
| 770 | 202794_at | 0.08 | 106% |
| 771 | 231174_s_at | −0.34 | 79% |
| 772 | 1559459_at | −0.14 | 91% |
| 773 | 238892_at | 0.23 | 117% |
| 774 | 203803_at | −0.28 | 82% |
| 775 | 221801_x_at | −0.68 | 62% |
| 776 | 222449_at | −0.39 | 76% |
| 777 | 202954_at | 0.23 | 117% |
| 778 | 1568997_at | −0.44 | 74% |
| 779 | 228769_at | −0.12 | 92% |
| 780 | 1557119_a_at | −0.32 | 80% |
| 781 | 200857_s_at | −0.14 | 91% |
| 782 | 234082_at | 0.26 | 120% |
| 783 | 243819_at | 0.11 | 108% |
| 784 | 206632_s_at | 0.82 | 177% |
| 785 | 203430_at | 0.14 | 110% |
| 786 | 1555626_a_at | −0.52 | 70% |
| 787 | 1559618_at | −0.49 | 71% |
| 788 | 1555058_a_at | 0.40 | 132% |
| 789 | 221253_s_at | 0.30 | 123% |
| 790 | 219493_at | 0.19 | 114% |
| 791 | 238607_at | −0.30 | 81% |
| 792 | 215411_s_at | −0.19 | 88% |
| 793 | 203616_at | 0.15 | 111% |
| 794 | 206075_s_at | −0.14 | 91% |
| 795 | 232953_at | 0.44 | 136% |
| 796 | 226652_at | 0.10 | 107% |
| 797 | 222413_s_at | −0.02 | 99% |
| 798 | 214814_at | 0.31 | 124% |
| 799 | 228983_at | 0.15 | 111% |
| 800 | 215342_s_at | −0.32 | 80% |
| 801 | 227737_at | −0.33 | 80% |
| 802 | 233033_at | 0.18 | 113% |
| 803 | 209378_s_at | −0.21 | 86% |
| 804 | 209105_at | −0.17 | 89% |
| 805 | 221833_at | 0.18 | 113% |
| 806 | 239516_at | 0.13 | 109% |
| 807 | 205798_at | −0.42 | 75% |
| 808 | 200868_s_at | 0.14 | 110% |
| 809 | 1564639_at | −0.46 | 73% |
| 810 | 203633_at | 0.20 | 115% |
| 811 | 223588_at | −0.21 | 86% |
| 812 | 202349_at | 0.14 | 110% |
| 813 | 200600_at | −0.05 | 97% |
| 814 | 201196_s_at | −0.04 | 97% |
| 815 | 208642_s_at | −0.05 | 97% |
| 816 | 231340_at | 0.28 | 121% |
| 817 | 210253_at | 0.14 | 110% |
| 818 | 212624_s_at | −0.47 | 72% |
| 819 | 228478_at | 0.06 | 104% |
| 820 | 1569154_a_at | −0.28 | 82% |
| 821 | 1553857_at | −0.18 | 88% |
| 822 | 224567_x_at | 0.10 | 107% |
| 823 | 221215_s_at | 0.07 | 105% |
| 824 | 200710_at | 0.04 | 103% |
| 825 | 220302_at | −0.18 | 88% |
| 826 | 214499_s_at | −0.13 | 91% |
| 827 | 238836_at | −0.36 | 78% |
| 828 | 213256_at | −0.09 | 94% |
| 829 | 226095_s_at | −0.08 | 95% |
| 830 | 203816_at | −0.03 | 98% |
| 831 | 209307_at | −0.32 | 80% |
| 832 | 201144_s_at | −0.04 | 97% |
| 833 | 236707_at | 0.42 | 134% |
| 834 | 240703_s_at | −0.23 | 85% |
| 835 | 229720_at | −0.15 | 90% |
| 836 | 238037_at | −0.37 | 77% |
| 837 | 200597_at | −0.22 | 86% |
| 838 | 207563_s_at | 0.20 | 115% |
| 839 | 241441_at | 0.16 | 112% |
| 840 | 217961_at | −0.20 | 87% |
| 841 | 225696_at | −0.18 | 88% |
| 842 | 211721_s_at | −0.20 | 87% |
| 843 | 212095_s_at | −0.38 | 77% |
| 844 | 242857_at | −0.18 | 88% |
| 845 | 241421_at | 0.31 | 124% |
| 846 | 225119_at | −0.29 | 82% |
| 847 | 243375_at | 0.34 | 127% |
| 848 | 202239_at | 0.08 | 106% |
| 849 | 200819_s_at | −0.17 | 89% |
| 850 | 237218_at | 0.18 | 113% |
| 851 | 1570124_at | 0.16 | 112% |
| 852 | 217225_x_at | −0.13 | 91% |
| 853 | 215220_s_at | −0.11 | 93% |
| 854 | 228899_at | 0.10 | 107% |
| 855 | 222880_at | −0.37 | 77% |
| 856 | 218820_at | −0.52 | 70% |
| 857 | 223892_s_at | 0.03 | 102% |
| 858 | 229907_at | 0.51 | 142% |
| 859 | 209536_s_at | −0.18 | 88% |
| 860 | 240899_at | 0.09 | 106% |
| 861 | 221267_s_at | −0.05 | 97% |
| 862 | 216069_at | 0.26 | 120% |
| 863 | 215390_at | −0.94 | 52% |
| 864 | 224583_at | −0.05 | 97% |
| 865 | 205248_at | −0.19 | 88% |
| 866 | 227820_at | −0.13 | 91% |
| 867 | 208934_s_at | 0.16 | 112% |
| 868 | 229364_at | 0.17 | 113% |
| 869 | 222073_at | −0.54 | 69% |
| 870 | 219757_s_at | 0.33 | 126% |
| 871 | 226013_at | −0.19 | 88% |
| 872 | 239922_at | 0.04 | 103% |
| 873 | 242966_x_at | 0.16 | 112% |
| 874 | 224229_s_at | −0.18 | 88% |
| 875 | 218464_s_at | −0.15 | 90% |
| 876 | 204924_at | 0.23 | 117% |
| 877 | 228532_at | 0.09 | 106% |
| 878 | 1560060_s_at | −0.17 | 89% |
| 879 | 1559282_at | 0.38 | 130% |
| 880 | 217380_s_at | 0.26 | 120% |
| 881 | 223002_s_at | −0.12 | 92% |
| 882 | 229145_at | −0.10 | 93% |
| 883 | 224911_s_at | 0.35 | 127% |
| 884 | 205466_s_at | −0.24 | 85% |
| 885 | 203907_s_at | 0.00 | 100% |
| 886 | 232645_at | 0.13 | 109% |
| 887 | 233575_s_at | 0.14 | 110% |
| 888 | 200019_s_at | −0.09 | 94% |
| 889 | 225738_at | −0.21 | 86% |
| 890 | 1561018_at | 0.26 | 120% |
| 891 | 236460_at | −0.01 | 99% |
| 892 | 217518_at | 0.30 | 123% |
| 893 | 212836_at | −0.07 | 95% |
| 894 | 213264_at | −0.15 | 90% |
| 895 | 1557852_at | 0.40 | 132% |
| 896 | 202708_s_at | 0.14 | 110% |
| 897 | 231763_at | −0.23 | 85% |
| 898 | 223259_at | −0.28 | 82% |
| 899 | 213729_at | 0.08 | 106% |
| 900 | 219978_s_at | 0.19 | 114% |
| 901 | 222674_at | −0.11 | 93% |
| 902 | 223363_at | −0.19 | 88% |
| 903 | 221188_s_at | 0.23 | 117% |
| 904 | 223059_s_at | −0.08 | 95% |
| 905 | 220557_s_at | −0.37 | 77% |
| 906 | 219576_at | −0.09 | 94% |
| 907 | 204326_x_at | 0.13 | 109% |
| 908 | 235575_at | 0.30 | 123% |
| 909 | 201256_at | −0.01 | 99% |
| 910 | 226645_at | −0.22 | 86% |
| 911 | 1559050_at | 0.30 | 123% |
| 912 | 212114_at | −0.18 | 88% |
| 913 | 209948_at | 0.17 | 113% |
| 914 | 236407_at | 0.65 | 157% |
| 915 | 240481_at | 0.16 | 112% |
| 916 | 208195_at | −0.43 | 74% |
| 917 | 203728_at | 0.12 | 109% |
| 918 | 227684_at | −0.35 | 78% |
| 919 | 236002_at | 0.17 | 113% |
| 920 | 204270_at | −0.28 | 82% |
| 921 | 202345_s_at | 0.27 | 121% |
| 922 | 219745_at | 0.18 | 113% |
| 923 | 235802_at | −0.44 | 74% |
| 924 | 230375_at | 0.12 | 109% |
| 925 | 219066_at | −0.18 | 88% |
| 926 | 1560339_s_at | −0.18 | 88% |
| 927 | 203110_at | 0.10 | 107% |
| 928 | 219630_at | −0.30 | 81% |
| 929 | 244307_s_at | 0.13 | 109% |
| 930 | 238758_at | 0.15 | 111% |
| 931 | 214917_at | 0.10 | 107% |
| 932 | 218276_s_at | −0.36 | 78% |
| 933 | 228193_s_at | −0.28 | 82% |
| 934 | 227037_at | −0.25 | 84% |
| 935 | 225831_at | −0.26 | 84% |
| 936 | 237210_at | 0.17 | 113% |
| 937 | 221206_at | −0.11 | 93% |
| 938 | 221499_s_at | 0.18 | 113% |
| 939 | 222217_s_at | 0.04 | 103% |
| 940 | 238523_at | −0.23 | 85% |
| 941 | 202048_s_at | −0.18 | 88% |
| 942 | 212856_at | −0.12 | 92% |
| 943 | 225759_x_at | 0.29 | 122% |
| 944 | 217606_at | 0.24 | 118% |
| 945 | 200973_s_at | −0.22 | 86% |
| 946 | 230970_at | 0.34 | 127% |
| 947 | 228932_at | 0.11 | 108% |
| 948 | 209338_at | −0.21 | 86% |
| 949 | 205758_at | −0.18 | 88% |
| 950 | 225065_x_at | −0.14 | 91% |
| 951 | 203358_s_at | 0.07 | 105% |
| 952 | 209375_at | −0.07 | 95% |
| 953 | 232489_at | −0.10 | 93% |
| 954 | 239723_at | 0.46 | 138% |
| 955 | 1552641_s_at | −0.17 | 89% |
| 956 | 1558220_at | 0.21 | 116% |
| 957 | 239960_x_at | −0.19 | 88% |
| 958 | 225212_at | −0.15 | 90% |
| 959 | 214815_at | 0.11 | 108% |
| 960 | 212135_s_at | −0.19 | 88% |
| 961 | 232952_at | 0.25 | 119% |
| 962 | 1556053_at | 0.07 | 105% |
| 963 | 232346_at | 0.22 | 116% |
| 964 | 228967_at | −0.13 | 91% |
| 965 | 239556_at | 0.19 | 114% |
| 966 | 226863_at | −0.18 | 88% |
| 967 | 229810_at | −0.11 | 93% |
| 968 | 236669_at | 0.28 | 121% |
| 969 | 222480_at | −0.14 | 91% |
| 970 | 228281_at | 0.42 | 134% |
| 971 | 216945_x_at | −0.55 | 68% |
| 972 | 207434_s_at | −0.44 | 74% |
| 973 | 201674_s_at | −0.09 | 94% |
| 974 | 239037_at | 0.12 | 109% |
| 975 | 1560434_x_at | 0.20 | 115% |
| 976 | 244556_at | 0.11 | 108% |
| 977 | 1552386_at | 0.25 | 119% |
| 978 | 222906_at | −0.24 | 85% |
| 979 | 1554057_at | 0.16 | 112% |
| 980 | 204512_at | −0.13 | 91% |
| 981 | 210512_s_at | 0.49 | 140% |
| 982 | 223816_at | 0.23 | 117% |
| 983 | 239251_at | 0.30 | 123% |
| 984 | 208998_at | −0.06 | 96% |
| 985 | 213810_s_at | 0.16 | 112% |
| 986 | 207194_s_at | −0.31 | 81% |
| 987 | 226372_at | −0.11 | 93% |
| 988 | 201792_at | −0.42 | 75% |
| 989 | 221203_s_at | −0.18 | 88% |
| 990 | 1562019_at | 0.62 | 154% |
| 991 | 205613_at | −0.39 | 76% |
| 992 | 221581_s_at | 0.04 | 103% |
| 993 | 244834_at | −0.29 | 82% |
| 994 | 201557_at | −0.12 | 92% |
| 995 | 225549_at | −0.24 | 85% |
| 996 | 201800_s_at | −0.11 | 93% |
| 997 | 202548_s_at | −0.18 | 88% |
| 998 | 222243_s_at | −0.18 | 88% |
| 999 | 2028_s_at | 0.29 | 122% |
| 1000 | 223000_s_at | −0.10 | 93% |
| 1001 | 222282_at | 0.13 | 109% |
| 1002 | 230252_at | −0.29 | 82% |
| 1003 | 227152_at | 0.10 | 107% |
| 1004 | 242877_at | 0.09 | 106% |
| 1005 | 236908_at | 0.32 | 125% |
| 1006 | 201365_at | −0.08 | 95% |
| 1007 | 241117_at | 0.46 | 138% |
| 1008 | 230663_at | 0.10 | 107% |
| 1009 | 209579_s_at | 0.12 | 109% |
| 1010 | 1562007_at | −0.28 | 82% |
| 1011 | 222672_at | −0.23 | 85% |
| 1012 | 206842_at | 0.12 | 109% |
| 1013 | 213034_at | −0.09 | 94% |
| 1014 | 203764_at | 0.40 | 132% |
| 1015 | 239014_at | 0.27 | 121% |
| 1016 | 204029_at | −0.30 | 81% |
| 1017 | 204711_at | 0.05 | 104% |
| 1018 | 221595_at | −0.21 | 86% |
| 1019 | 1552671_a_at | −0.42 | 75% |
| 1020 | 226066_at | 0.35 | 127% |
| 1021 | 1553364_at | 0.57 | 148% |
| 1022 | 224653_at | −0.11 | 93% |
| 1023 | 1564435_a_at | −0.57 | 67% |
| 1024 | 229253_at | −0.37 | 77% |
| 1025 | 222044_at | 0.18 | 113% |
| 1026 | 241705_at | 0.25 | 119% |
| 1027 | 228469_at | 0.20 | 115% |
| 1028 | 204858_s_at | 0.18 | 113% |
| 1029 | 201621_at | −0.47 | 72% |
| 1030 | 234492_at | 0.26 | 120% |
| 1031 | 212906_at | 0.22 | 116% |
| 1032 | 231116_at | 0.35 | 127% |
| 1033 | 232782_at | −0.15 | 90% |
| 1034 | 224978_s_at | −0.24 | 85% |
| 1035 | 225471_s_at | −0.06 | 96% |
| 1036 | 1556496_a_at | 0.22 | 116% |
| 1037 | 224717_s_at | 0.09 | 106% |
| 1038 | 241819_at | 0.20 | 115% |
| 1039 | 202286_s_at | 0.67 | 159% |
| 1040 | 219198_at | −0.20 | 87% |
| 1041 | 202800_at | 0.48 | 139% |
| 1042 | 208003_s_at | 0.23 | 117% |
| 1043 | 36030_at | 0.11 | 108% |
| 1044 | 219826_at | −0.10 | 93% |
| 1045 | 214005_at | 0.16 | 112% |
| 1046 | 241669_x_at | −0.26 | 84% |
| 1047 | 227122_at | 0.05 | 104% |
| 1048 | 205560_at | −0.20 | 87% |
| 1049 | 1564378_a_at | 0.25 | 119% |
| 1050 | 240721_at | 0.56 | 147% |
| 1051 | 228306_at | 0.20 | 115% |
| 1052 | 202074_s_at | −0.23 | 85% |
| 1053 | 210559_s_at | 0.20 | 115% |
| 1054 | 206873_at | −0.51 | 70% |
| 1055 | 225221_at | 0.01 | 101% |
| 1056 | 213180_s_at | −0.15 | 90% |
| 1057 | 200622_x_at | −0.08 | 95% |
| 1058 | 229413_s_at | 0.26 | 120% |
| 1059 | 220466_at | −0.14 | 91% |
| 1060 | 229817_at | 0.48 | 139% |
| 1061 | 238417_at | −0.06 | 96% |
| 1062 | 240845_at | 0.32 | 125% |
| 1063 | 238016_s_at | 0.17 | 113% |
| 1064 | 226765_at | −0.23 | 85% |
| 1065 | 217856_at | −0.14 | 91% |
| 1066 | 220865_s_at | 0.21 | 116% |
| 1067 | 232588_at | 0.10 | 107% |
| 1068 | 201736_s_at | 0.15 | 111% |
| 1069 | 1561195_at | −0.29 | 82% |
| 1070 | 236422_at | 0.82 | 177% |
| 1071 | 209118_s_at | −0.09 | 94% |
| 1072 | 229622_at | 0.78 | 172% |
| 1073 | 227490_at | 0.20 | 115% |
| 1074 | 226517_at | 0.60 | 152% |
| 1075 | 230405_at | 0.18 | 113% |
| 1076 | 201543_s_at | 0.15 | 111% |
| 1077 | 200855_at | −0.08 | 95% |
| 1078 | 209193_at | −0.13 | 91% |
| 1079 | 216857_at | −0.62 | 65% |
| 1080 | 225207_at | 0.37 | 129% |
| 1081 | 203969_at | −0.08 | 95% |
| 1082 | 243444_at | −0.48 | 72% |
| 1083 | 227091_at | 0.36 | 128% |
| 1084 | 1007_s_at | −0.47 | 72% |
| 1085 | 205493_s_at | −0.62 | 65% |
| 1086 | 208304_at | −0.43 | 74% |
| 1087 | 210470_x_at | −0.14 | 91% |
| 1088 | 210947_s_at | 0.11 | 108% |
| 1089 | 218561_s_at | −0.22 | 86% |
| 1090 | 208613_s_at | −0.25 | 84% |
| 1091 | 227436_at | −0.15 | 90% |
| 1092 | 242729_at | 0.30 | 123% |
| 1093 | 237387_at | 0.34 | 127% |
| 1094 | 206005_s_at | 0.25 | 119% |
| 1095 | 218807_at | 0.24 | 118% |
| 1096 | 219371_s_at | −0.16 | 90% |
| 1097 | 243858_at | 0.25 | 119% |
| 1098 | 219412_at | 0.18 | 113% |
| 1099 | 233224_at | −0.29 | 82% |
| 1100 | 226571_s_at | −0.34 | 79% |
| 1101 | 212828_at | −0.21 | 86% |
| 1102 | 239212_at | −0.18 | 88% |
| 1103 | 241763_s_at | 0.12 | 109% |
| 1104 | 1570566_at | 0.37 | 129% |
| 1105 | 1554985_at | 0.24 | 118% |
| 1106 | 202291_s_at | 0.46 | 138% |
| 1107 | 235308_at | −0.21 | 86% |
| 1108 | 219433_at | −0.41 | 75% |
| 1109 | 230023_at | −0.25 | 84% |
| 1110 | 204578_at | −0.16 | 90% |
| 1111 | 212599_at | −0.43 | 74% |
| 1112 | 236836_at | 0.22 | 116% |
| 1113 | 234088_at | 0.21 | 116% |
| 1114 | 222667_s_at | 0.06 | 104% |
| 1115 | 231221_at | −0.15 | 90% |
| 1116 | 202449_s_at | −0.16 | 90% |
| 1117 | 209455_at | −0.09 | 94% |
| 1118 | 1554237_at | 0.22 | 116% |
| 1119 | 1556352_at | 0.04 | 103% |
| 1120 | 205844_at | 0.57 | 148% |
| 1121 | 1562453_at | −0.56 | 68% |
| 1122 | 1552613_s_at | −0.07 | 95% |
| 1123 | 225204_at | −0.09 | 94% |
| 1124 | 209806_at | 0.16 | 112% |
| 1125 | 240154_at | 0.09 | 106% |
| 1126 | 239464_at | 0.54 | 145% |
| 1127 | 1555370_a_at | −0.44 | 74% |
| 1128 | 225004_at | −0.14 | 91% |
| 1129 | 226893_at | −0.19 | 88% |
| 1130 | 202190_at | −0.07 | 95% |
| 1131 | 202369_s_at | −0.29 | 82% |
| 1132 | 243973_at | −0.19 | 88% |
| 1133 | 242862_x_at | 0.09 | 106% |
| 1134 | 236327_at | 0.28 | 121% |
| 1135 | 235778_s_at | 0.20 | 115% |
| 1136 | 229686_at | −0.13 | 91% |
| 1137 | 213924_at | 0.10 | 107% |
| 1138 | 239792_at | −0.11 | 93% |
| 1139 | 206560_s_at | −0.17 | 89% |
| 1140 | 225654_at | −0.12 | 92% |
| 1141 | 228570_at | −0.28 | 82% |
| 1142 | 231064_s_at | 0.17 | 113% |
| 1143 | 238126_at | 0.26 | 120% |
| 1144 | 212995_x_at | −0.14 | 91% |
| 1145 | 214617_at | −0.20 | 87% |
| 1146 | 208269_s_at | −0.31 | 81% |
| 1147 | 1568717_a_at | 0.16 | 112% |
| 1148 | 1558854_a_at | 0.23 | 117% |
| 1149 | 241938_at | 0.16 | 112% |
| 1150 | 215099_s_at | −0.15 | 90% |
| 1151 | 230100_x_at | 0.14 | 110% |
| 1152 | 202464_s_at | 0.13 | 109% |
| 1153 | 225454_at | −0.14 | 91% |
| 1154 | 1558201_s_at | 0.13 | 109% |
| 1155 | 239597_at | 0.18 | 113% |
| 1156 | 228772_at | 0.34 | 127% |
| 1157 | 227722_at | −0.52 | 70% |
| 1158 | 243340_at | 0.33 | 126% |
| 1159 | 217769_s_at | 0.07 | 105% |
| 1160 | 228308_at | 0.03 | 102% |
| 1161 | 204233_s_at | 0.12 | 109% |
| 1162 | 204440_at | −0.39 | 76% |
| 1163 | 204184_s_at | −0.04 | 97% |
| 1164 | 212099_at | −0.25 | 84% |
| 1165 | 212504_at | −0.45 | 73% |
| 1166 | 220266_s_at | −0.28 | 82% |
| 1167 | 227750_at | −0.47 | 72% |
| 1168 | 203157_s_at | 0.21 | 116% |
| 1169 | 202804_at | −0.15 | 90% |
| 1170 | 242752_at | −0.35 | 78% |
| 1171 | 219799_s_at | 0.46 | 138% |
| 1172 | 236191_at | 0.31 | 124% |
| 1173 | 230725_at | 0.22 | 116% |
| 1174 | 212137_at | −0.15 | 90% |
| 1175 | 238135_at | 0.31 | 124% |
| 1176 | 207079_s_at | −0.16 | 90% |
| 1177 | 203973_s_at | 0.18 | 113% |
| 1178 | 228778_at | −0.22 | 86% |
| 1179 | 240798_at | 0.18 | 113% |
| 1180 | 244347_at | −0.26 | 84% |
| 1181 | 231093_at | −0.39 | 76% |
| 1182 | 231435_at | 0.41 | 133% |
| 1183 | 244280_at | −0.33 | 80% |
| 1184 | 224549_x_at | 0.23 | 117% |
| 1185 | 228516_at | −0.13 | 91% |
| 1186 | 233218_at | 0.11 | 108% |
| 1187 | 1560297_at | 0.14 | 110% |
| 1188 | 227114_at | −0.25 | 84% |
| 1189 | 204373_s_at | −0.16 | 90% |
| 1190 | 226190_at | 0.17 | 113% |
| 1191 | 224564_s_at | 0.06 | 104% |
| 1192 | 214483_s_at | 0.24 | 118% |
| 1193 | 209248_at | 0.04 | 103% |
| 1194 | 204576_s_at | −0.25 | 84% |
| 1195 | 209467_s_at | 0.25 | 119% |
| 1196 | 242970_at | 0.25 | 119% |
| 1197 | 230233_at | −0.10 | 93% |
| 1198 | 212560_at | 0.01 | 101% |
| 1199 | 228786_at | −0.13 | 91% |
| 1200 | 211368_s_at | 0.20 | 115% |
| 1201 | 202958_at | −0.13 | 91% |
| 1202 | 244262_x_at | −0.24 | 85% |
| 1203 | 244647_at | −0.14 | 91% |
| 1204 | 223457_at | −0.11 | 93% |
| 1205 | 219260_s_at | −0.39 | 76% |
| 1206 | 236832_at | 0.16 | 112% |
| 1207 | 1552307_a_at | −0.24 | 85% |
| 1208 | 201336_at | 0.07 | 105% |
| 1209 | AFFX- | 0.31 | 124% |
| | HUMISGF3A/ | | |
| | M97935_MB_at | | |
| 1210 | 227080_at | 0.30 | 123% |
| 1211 | 227486_at | −0.64 | 64% |
| 1212 | 206413_s_at | −0.25 | 84% |
| 1213 | 237120_at | −0.50 | 71% |
| 1214 | 207091_at | 0.01 | 101% |
| 1215 | 226815_at | −0.22 | 86% |
| 1216 | 219025_at | −0.35 | 78% |
| 1217 | 227182_at | −0.22 | 86% |
| 1218 | 214877_at | −0.39 | 76% |
| 1219 | 218997_at | −0.23 | 85% |
| 1220 | 240861_at | −0.50 | 71% |
| 1221 | 204592_at | −0.02 | 99% |
| 1222 | 213406_at | 0.39 | 131% |
| 1223 | 227707_at | 0.25 | 119% |
| 1224 | 237538_at | 0.46 | 138% |
| 1225 | 218262_at | −0.03 | 98% |
| 1226 | 232283_at | 0.14 | 110% |
| 1227 | 212249_at | −0.16 | 90% |
| 1228 | 213672_at | 0.08 | 106% |
| 1229 | 210052_s_at | 0.15 | 111% |
| 1230 | 229893_at | 0.48 | 139% |
| 1231 | 222482_at | −0.33 | 80% |
| 1232 | 203129_s_at | −0.35 | 78% |
| 1233 | 203418_at | 0.14 | 110% |
| 1234 | 225091_at | −0.18 | 88% |
| 1235 | 240718_at | 0.28 | 121% |
| 1236 | 81737_at | 0.34 | 127% |
| 1237 | 209360_s_at | −0.08 | 95% |
| 1238 | 210912_x_at | −0.37 | 77% |
| 1239 | 203716_s_at | −0.41 | 75% |
| 1240 | 225095_at | 0.16 | 112% |
| 1241 | 213048_s_at | −0.10 | 93% |
| 1242 | 40016_g_at | −0.36 | 78% |
| 1243 | 224965_at | 0.21 | 116% |
| 1244 | 207623_at | −0.37 | 77% |
| 1245 | 226171_at | 0.18 | 113% |
| 1246 | 241242_at | 0.15 | 111% |
| 1247 | 207535_s_at | −0.32 | 80% |
| 1248 | 239522_at | 0.10 | 107% |
| 1249 | 215191_at | 0.27 | 121% |
| 1250 | 212161_at | −0.12 | 92% |
| 1251 | 1562280_at | 0.11 | 108% |
| 1252 | 209122_at | 0.10 | 107% |
| 1253 | 229305_at | 0.28 | 121% |
| 1254 | 210407_at | 0.27 | 121% |
| 1255 | 226614_s_at | −0.42 | 75% |
| 1256 | 1555679_a_at | −0.28 | 82% |
| 1257 | 224697_at | −0.17 | 89% |
| 1258 | 222262_s_at | 0.23 | 117% |
| 1259 | 227331_at | −0.06 | 96% |
| 1260 | 227259_at | −0.18 | 88% |
| 1261 | 222000_at | −0.12 | 92% |
| 1262 | 205603_s_at | 0.18 | 113% |
| 1263 | 213021_at | −0.12 | 92% |
| 1264 | 210149_s_at | 0.01 | 101% |
| 1265 | 240793_at | 0.35 | 127% |
| 1266 | 200089_s_at | −0.04 | 97% |
| 1267 | 217834_s_at | −0.10 | 93% |
| 1268 | 234396_at | −0.68 | 62% |
| 1269 | 1566001_at | −0.36 | 78% |
| 1270 | 236742_at | 0.06 | 104% |
| 1271 | 240231_at | 0.25 | 119% |
| 1272 | 200664_s_at | −0.07 | 95% |
| 1273 | 212671_s_at | −0.43 | 74% |
| 1274 | 207536_s_at | −0.36 | 78% |
| 1275 | 232218_at | −0.17 | 89% |
| 1276 | 205545_x_at | −0.01 | 99% |
| 1277 | 239654_at | 0.13 | 109% |
| 1278 | 223907_s_at | −0.19 | 88% |
| 1279 | 233483_at | −0.33 | 80% |
| 1280 | 1556643_at | 0.10 | 107% |
| 1281 | 209502_s_at | −0.31 | 81% |
| 1282 | 232720_at | −0.18 | 88% |
| 1283 | 227138_at | −0.22 | 86% |
| 1284 | 1559895_x_at | −0.38 | 77% |
| 1285 | 203554_x_at | 0.26 | 120% |
| 1286 | 220305_at | −0.14 | 91% |
| 1287 | 229966_at | 0.09 | 106% |
| 1288 | 230435_at | 0.20 | 115% |
| 1289 | 220000_at | 0.34 | 127% |
| 1290 | 1558094_s_at | −0.14 | 91% |
| 1291 | 233157_x_at | −0.22 | 86% |
| 1292 | 205067_at | −0.27 | 83% |
| 1293 | 212662_at | −0.28 | 82% |
| 1294 | 213028_at | −0.14 | 91% |
| 1295 | 224836_at | −0.23 | 85% |
| 1296 | 210648_x_at | 0.18 | 113% |
| 1297 | 1558105_a_at | −0.10 | 93% |
| 1298 | 210153_s_at | 0.15 | 111% |
| 1299 | 212650_at | −0.34 | 79% |
| 1300 | 209281_s_at | −0.07 | 95% |
| 1301 | 239307_at | −0.36 | 78% |
| 1302 | 213902_at | 0.33 | 126% |
| 1303 | 1559835_at | 0.32 | 125% |
| 1304 | 240070_at | −0.36 | 78% |
| 1305 | 222396_at | −0.06 | 96% |
| 1306 | 211781_x_at | −0.37 | 77% |
| 1307 | 219179_at | −0.69 | 62% |
| 1308 | 207072_at | 0.46 | 138% |
| 1309 | 224919_at | −0.14 | 91% |
| 1310 | 231547_at | 0.27 | 121% |
| 1311 | 227476_at | 0.21 | 116% |
| 1312 | 218584_at | −0.26 | 84% |
| 1313 | 209714_s_at | 0.27 | 121% |
| 1314 | 230354_at | 0.40 | 132% |
| 1315 | 228831_s_at | −0.39 | 76% |
| 1316 | 237522_at | 0.39 | 131% |
| 1317 | 212663_at | 0.03 | 102% |
| 1318 | 226336_at | −0.21 | 86% |
| 1319 | 242673_at | −0.34 | 79% |
| 1320 | 232784_at | 0.18 | 113% |
| 1321 | 205232_s_at | −0.14 | 91% |
| 1322 | 201364_s_at | −0.13 | 91% |
| 1323 | 1558143_a_at | −0.15 | 90% |
| 1324 | 1569906_s_at | −0.11 | 93% |
| 1325 | 244332_at | −0.29 | 82% |
| 1326 | 242082_at | −0.29 | 82% |
| 1327 | 212154_at | −0.32 | 80% |
| 1328 | 1569207_s_at | −0.36 | 78% |
| 1329 | 232257_s_at | 0.44 | 136% |
| 1330 | 239060_at | 0.25 | 119% |
| 1331 | 1563075_s_at | 0.18 | 113% |
| 1332 | 208645_s_at | −0.03 | 98% |
| 1333 | 244035_at | −0.31 | 81% |
| 1334 | 227402_s_at | −0.17 | 89% |
| 1335 | 230921_s_at | −0.11 | 93% |
| 1336 | 227790_at | −0.12 | 92% |
| 1337 | 242582_at | 0.37 | 129% |
| 1338 | 1553405_a_at | −0.08 | 95% |
| 1339 | 244886_at | −0.41 | 75% |
| 1340 | 228762_at | −0.17 | 89% |
| 1341 | 220231_at | −0.42 | 75% |
| 1342 | 202341_s_at | −0.24 | 85% |
| 1343 | 208054_at | 0.22 | 116% |
| 1344 | 228003_at | −0.32 | 80% |
| 1345 | 243534_at | 0.35 | 127% |
| 1346 | 212573_at | 0.06 | 104% |
| 1347 | 230063_at | −0.09 | 94% |
| 1348 | 204165_at | 0.28 | 121% |
| 1349 | 238279_x_at | 0.12 | 109% |
| 1350 | 201842_s_at | 0.16 | 112% |
| 1351 | 223132_s_at | −0.10 | 93% |
| 1352 | 244043_at | −0.38 | 77% |
| 1353 | 206043_s_at | 0.29 | 122% |
| 1354 | 208653_s_at | 0.23 | 117% |
| 1355 | 238596_at | 0.27 | 121% |
| 1356 | 231907_at | −0.21 | 86% |
| 1357 | 1557478_at | 0.12 | 109% |
| 1358 | 1558906_a_at | −0.13 | 91% |
| 1359 | 243404_at | 0.13 | 109% |
| 1360 | 243526_at | −0.39 | 76% |
| 1361 | 205531_s_at | −0.30 | 81% |
| 1362 | 241702_at | 0.16 | 112% |
| 1363 | 223821_s_at | −0.46 | 73% |
| 1364 | 242232_at | 0.29 | 122% |
| 1365 | 221573_at | 0.20 | 115% |
| 1366 | 1569492_at | 0.18 | 113% |
| 1367 | 227897_at | −0.22 | 86% |
| 1368 | 231809_x_at | −0.22 | 86% |
| 1369 | 226982_at | 0.28 | 121% |
| 1370 | 214876_s_at | −0.38 | 77% |
| 1371 | 226957_x_at | −0.08 | 95% |
| 1372 | 204251_s_at | −0.13 | 91% |
| 1373 | 229881_at | −0.53 | 69% |
| 1374 | 205039_s_at | −0.27 | 83% |
| 1375 | 214000_s_at | −0.08 | 95% |
| 1376 | 204454_at | −0.45 | 73% |
| 1377 | 229821_at | −0.73 | 60% |
| 1378 | 202166_s_at | −0.05 | 97% |
| 1379 | 228177_at | −0.08 | 95% |
| 1380 | 233063_s_at | 0.18 | 113% |
| 1381 | 204173_at | 0.14 | 110% |
| 1382 | 206513_at | 0.51 | 142% |
| 1383 | 218949_s_at | −0.29 | 82% |
| 1384 | 204167_at | −0.08 | 95% |
| 1385 | 221256_s_at | −0.25 | 84% |
| 1386 | 220239_at | 0.22 | 116% |
| 1387 | 201307_at | −0.23 | 85% |
| 1388 | 232530_at | 0.18 | 113% |
| 1389 | 226519_s_at | 0.07 | 105% |
| 1390 | 219298_at | 0.75 | 168% |
| 1391 | 209134_s_at | −0.03 | 98% |
| 1392 | 219529_at | −0.33 | 80% |
| 1393 | 202759_s_at | −0.40 | 76% |
| 1394 | 232829_at | 0.42 | 134% |
| 1395 | 1559391_s_at | 0.34 | 127% |
| 1396 | 203605_at | 0.06 | 104% |
| 1397 | 232636_at | 0.28 | 121% |
| 1398 | 201061_s_at | 0.25 | 119% |
| 1399 | 222633_at | 0.03 | 102% |
| 1400 | 214710_s_at | 0.11 | 108% |
| 1401 | 231866_at | −0.14 | 91% |
| 1402 | 208619_at | −0.06 | 96% |
| 1403 | 1566039_a_at | −0.46 | 73% |
| 1404 | 202891_at | 0.01 | 101% |
| 1405 | 229334_at | −0.03 | 98% |
| 1406 | 214686_at | −0.15 | 90% |
| 1407 | 1565358_at | −0.17 | 89% |
| 1408 | 243924_at | −0.37 | 77% |
| 1409 | 225007_at | −0.15 | 90% |
| 1410 | 213285_at | −0.17 | 89% |
| 1411 | 206592_s_at | −0.09 | 94% |
| 1412 | 221909_at | −0.36 | 78% |
| 1413 | 218746_at | 0.04 | 103% |
| 1414 | 235927_at | 0.15 | 111% |
| 1415 | 240089_at | 0.15 | 111% |
| 1416 | 1554292_a_at | 0.20 | 115% |
| 1417 | 208636_at | −0.03 | 98% |
| 1418 | 206342_x_at | −0.10 | 93% |
| 1419 | 217374_x_at | 0.23 | 117% |
| 1420 | 223527_s_at | 0.28 | 121% |
| 1421 | 209686_at | 0.20 | 115% |
| 1422 | 242364_x_at | −0.33 | 80% |
| 1423 | 201523_x_at | 0.08 | 106% |
| 1424 | 202348_s_at | 0.20 | 115% |
| 1425 | 1558847_at | −0.50 | 71% |
| 1426 | 220363_s_at | 0.08 | 106% |
| 1427 | 234860_at | −0.36 | 78% |
| 1428 | 232095_at | 0.17 | 113% |
| 1429 | 211984_at | −0.07 | 95% |
| 1430 | 201053_s_at | −0.09 | 94% |
| 1431 | 207332_s_at | 0.20 | 115% |
| 1432 | 235942_at | 0.71 | 164% |
| 1433 | 218361_at | 0.08 | 106% |
| 1434 | 205757_at | −0.23 | 85% |
| 1435 | 220606_s_at | −0.15 | 90% |
| 1436 | 209642_at | 0.25 | 119% |
| 1437 | 203264_s_at | −0.28 | 82% |
| 1438 | 236193_at | 0.29 | 122% |
| 1439 | 229274_at | 0.20 | 115% |
| 1440 | 225661_at | −0.03 | 98% |
| 1441 | 202070_s_at | −0.11 | 93% |
| 1442 | 201286_at | 0.35 | 127% |
| 1443 | 237229_at | −0.42 | 75% |
| 1444 | 221776_s_at | −0.10 | 93% |
| 1445 | 218312_s_at | −0.37 | 77% |
| 1446 | 230444_at | −0.14 | 91% |
| 1447 | 205708_s_at | 0.22 | 116% |
| 1448 | 224794_s_at | 0.03 | 102% |
| 1449 | 240237_at | 0.22 | 116% |
| 1450 | 225834_at | 0.41 | 133% |
| 1451 | 218064_s_at | −0.21 | 86% |
| 1452 | 229592_at | −0.11 | 93% |
| 1453 | 209445_x_at | 0.18 | 113% |
| 1454 | 208517_x_at | −0.06 | 96% |
| 1455 | 217677_at | −0.36 | 78% |
| 1456 | 210812_at | 0.30 | 123% |
| 1457 | 224756_s_at | 0.07 | 105% |
| 1458 | 1559059_s_at | −0.29 | 82% |
| 1459 | 225609_at | −0.23 | 85% |
| 1460 | 242691_at | −0.20 | 87% |
| 1461 | 204785_x_at | 0.14 | 110% |
| 1462 | 233191_at | −0.12 | 92% |
| 1463 | 225987_at | 0.20 | 115% |
| 1464 | 212010_s_at | −0.10 | 93% |
| 1465 | 229398_at | 0.22 | 116% |
| 1466 | 234819_at | −0.51 | 70% |
| 1467 | 230440_at | −0.39 | 76% |
| 1468 | 1557186_s_at | −0.13 | 91% |
| 1469 | 222651_s_at | 0.07 | 105% |
| 1470 | 212881_at | −0.11 | 93% |
| 1471 | 226546_at | −0.05 | 97% |
| 1472 | 243201_at | 0.24 | 118% |
| 1473 | 204254_s_at | −0.10 | 93% |
| 1474 | 244070_at | 0.36 | 128% |
| 1475 | 210622_x_at | −0.22 | 86% |
| 1476 | 217620_s_at | 0.19 | 114% |
| 1477 | 238573_at | −0.31 | 81% |
| 1478 | 201777_s_at | 0.00 | 100% |
| 1479 | 231598_x_at | 0.24 | 118% |
| 1480 | 202055_at | 0.08 | 106% |
| 1481 | 226856_at | 0.11 | 108% |
| 1482 | 1553858_at | −0.13 | 91% |
| 1483 | 235446_at | −1.26 | 42% |
| 1484 | 242064_at | −0.59 | 66% |
| 1485 | 239574_at | 0.49 | 140% |
| 1486 | 204069_at | −0.37 | 77% |
| 1487 | 212390_at | −0.46 | 73% |
| 1488 | AFFX- | 0.01 | 101% |
| | hum_alu_at | | |
| 1489 | 212933_x_at | −0.07 | 95% |
| 1490 | 212547_at | −0.12 | 92% |
| 1491 | 241202_at | −0.21 | 86% |
| 1492 | 1562067_at | 0.21 | 116% |
| 1493 | 1566427_at | −0.47 | 72% |
| 1494 | 211717_at | −0.22 | 86% |
| 1495 | 1552485_at | 0.31 | 124% |
| 1496 | 209345_s_at | −0.14 | 91% |
| 1497 | 232722_at | −0.24 | 85% |
| 1498 | 225755_at | 0.33 | 126% |
| 1499 | 209541_at | 0.21 | 116% |
| 1500 | 230669_at | 0.17 | 113% |
| 1501 | 217207_s_at | 1.46 | 275% |
| 1502 | 230442_at | 0.11 | 108% |
| 1503 | 200983_x_at | 0.29 | 122% |
| 1504 | 217232_x_at | 0.03 | 102% |
| 1505 | 202738_s_at | 0.07 | 105% |
| 1506 | 218773_s_at | 0.38 | 130% |
| 1507 | 213343_s_at | −0.27 | 83% |
| 1508 | 233880_at | 0.25 | 119% |
| 1509 | 214377_s_at | 0.19 | 114% |
| 1510 | 211324_s_at | 0.47 | 139% |
| 1511 | 219055_at | 0.19 | 114% |
| 1512 | 237389_at | −0.25 | 84% |
| 1513 | 225729_at | −0.11 | 93% |
| 1514 | 221521_s_at | 0.21 | 116% |
| 1515 | 1559449_a_at | −0.40 | 76% |
| 1516 | 1565674_at | 0.36 | 128% |
| 1517 | 241933_at | −0.34 | 79% |
| 1518 | 215559_at | 0.17 | 113% |
| 1519 | 221928_at | −0.32 | 80% |
| 1520 | 226051_at | −0.20 | 87% |
| 1521 | 1566166_at | 0.11 | 108% |
| 1522 | 225208_s_at | −0.07 | 95% |
| 1523 | 243675_at | 0.06 | 104% |
| 1524 | 239944_at | 0.30 | 123% |
| 1525 | 58780_s_at | −0.22 | 86% |
| 1526 | 235030_at | −0.20 | 87% |
| 1527 | 239783_at | 0.11 | 108% |
| 1528 | 1555580_at | −0.32 | 80% |
| 1529 | 238494_at | −0.28 | 82% |
| 1530 | 1558719_s_at | −0.44 | 74% |
| 1531 | 41660_at | −0.56 | 68% |
| 1532 | 210971_s_at | 0.10 | 107% |
| 1533 | 201825_s_at | 0.27 | 121% |
| 1534 | 217727_x_at | −0.09 | 94% |
| 1535 | 203725_at | 0.47 | 139% |
| 1536 | 225490_at | −0.18 | 88% |
| 1537 | 231023_at | 0.17 | 113% |
| 1538 | 224524_s_at | 0.08 | 106% |
| 1539 | 232959_at | 0.29 | 122% |
| 1540 | 237133_at | 0.24 | 118% |
| 1541 | 218391_at | 0.03 | 102% |
| 1542 | 227060_at | 0.16 | 112% |
| 1543 | 200606_at | −0.72 | 61% |
| 1544 | 219681_s_at | −0.07 | 95% |
| 1545 | 225638_at | 0.11 | 108% |
| 1546 | 227957_at | −0.09 | 94% |
| 1547 | 239560_at | 0.29 | 122% |
| 1548 | 208936_x_at | 0.09 | 106% |
| 1549 | 226334_s_at | 0.12 | 109% |
| 1550 | 238750_at | −0.34 | 79% |
| 1551 | 225061_at | −0.17 | 89% |
| 1552 | 228096_at | −0.28 | 82% |
| 1553 | 209709_s_at | 0.28 | 121% |
| 1554 | 207277_at | −0.04 | 97% |
| 1555 | 212448_at | −0.28 | 82% |
| 1556 | 229734_at | −0.51 | 70% |
| 1557 | 237332_at | 0.15 | 111% |
| 1558 | 228069_at | 0.20 | 115% |
| 1559 | 1553978_at | 0.19 | 114% |
| 1560 | 205042_at | −0.20 | 87% |
| 1561 | 229820_at | 0.08 | 106% |
| 1562 | 1554513_s_at | −0.14 | 91% |
| 1563 | 221877_at | −0.11 | 93% |
| 1564 | 208696_at | −0.12 | 92% |
| 1565 | 240554_at | 0.03 | 102% |
| 1566 | 201589_at | −0.15 | 90% |
| 1567 | 235824_at | −0.46 | 73% |
| 1568 | 232375_at | 0.20 | 115% |
| 1569 | 242384_at | 0.32 | 125% |
| 1570 | 203155_at | 0.01 | 101% |
| 1571 | 243092_at | 0.07 | 105% |
| 1572 | 232045_at | 0.38 | 130% |
| 1573 | 1554710_at | 0.19 | 114% |
| 1574 | 237104_at | 0.13 | 109% |
| 1575 | 231223_at | −0.32 | 80% |
| 1576 | 1553920_at | 0.44 | 136% |
| 1577 | 225901_at | −0.04 | 97% |
| 1578 | 212975_at | 0.15 | 111% |
| 1579 | 1554365_a_at | 0.02 | 101% |
| 1580 | 215495_s_at | 0.27 | 121% |
| 1581 | 206521_s_at | −0.11 | 93% |
| 1582 | 215032_at | 0.10 | 107% |
| 1583 | 226879_at | −0.23 | 85% |
| 1584 | 221582_at | −0.22 | 86% |
| 1585 | 225276_at | −0.09 | 94% |
| 1586 | 1560520_at | −0.61 | 66% |
| 1587 | 214997_at | −0.38 | 77% |
| 1588 | 220393_at | 0.27 | 121% |
| 1589 | 230952_at | −0.16 | 90% |
| 1590 | 242279_at | 0.15 | 111% |
| 1591 | 222592_s_at | 0.02 | 101% |
| 1592 | 209426_s_at | −0.16 | 90% |
| 1593 | 231099_at | 0.16 | 112% |
| 1594 | 206860_s_at | 0.02 | 101% |
| 1595 | 208628_s_at | −0.09 | 94% |
| 1596 | 1566447_at | −0.32 | 80% |
| 1597 | 236298_at | 0.08 | 106% |
| 1598 | 237426_at | 0.15 | 111% |
| 1599 | 230000_at | 0.28 | 121% |
| 1600 | 221815_at | −0.14 | 91% |
| 1601 | 234747_at | 0.03 | 102% |
| 1602 | 236149_at | −0.34 | 79% |
| 1603 | 209357_at | −0.16 | 90% |
| 1604 | 225111_s_at | 0.11 | 108% |
| 1605 | 226270_at | −0.20 | 87% |
| 1606 | 210858_x_at | −0.10 | 93% |
| 1607 | 212320_at | −0.13 | 91% |
| 1608 | 214464_at | −0.18 | 88% |
| 1609 | 205619_s_at | −0.32 | 80% |
| 1610 | 225606_at | −0.10 | 93% |
| 1611 | 217774_s_at | −0.14 | 91% |
| 1612 | 228219_s_at | 0.38 | 130% |
| 1613 | 243958_at | 0.10 | 107% |
| 1614 | 208503_s_at | 0.09 | 106% |
| 1615 | 227170_at | −0.18 | 88% |
| 1616 | 201698_s_at | 0.04 | 103% |
| 1617 | 239698_at | 0.17 | 113% |
| 1618 | 1555904_at | 0.12 | 109% |
| 1619 | 217825_s_at | 0.26 | 120% |
| 1620 | 240247_at | 0.08 | 106% |
| 1621 | 218108_at | −0.07 | 95% |
| 1622 | 1559688_at | −0.37 | 77% |
| 1623 | 218125_s_at | −0.25 | 84% |
| 1624 | 226666_at | −0.24 | 85% |
| 1625 | 230027_s_at | −0.24 | 85% |
| 1626 | 205227_at | −0.18 | 88% |
| 1627 | 228513_at | 0.03 | 102% |
| 1628 | 1552677_a_at | 0.03 | 102% |
| 1629 | 215796_at | −0.61 | 66% |
| 1630 | 201903_at | −0.18 | 88% |
| 1631 | 1560869_a_at | 0.06 | 104% |
| 1632 | 234852_at | −0.23 | 85% |
| 1633 | 227708_at | −0.24 | 85% |
| 1634 | 1552807_a_at | −0.21 | 86% |
| 1635 | 229844_at | −0.24 | 85% |
| 1636 | 204992_s_at | −0.28 | 82% |
| 1637 | 227613_at | −0.38 | 77% |
| 1638 | 243579_at | −0.11 | 93% |
| 1639 | 210146_x_at | 0.20 | 115% |
| 1640 | 202433_at | 0.06 | 104% |
| 1641 | 209870_s_at | −0.35 | 78% |
| 1642 | 224698_at | −0.21 | 86% |
| 1643 | 207617_at | −0.45 | 73% |
| 1644 | 203445_s_at | −0.07 | 95% |
| 1645 | 235761_at | 0.15 | 111% |
| 1646 | 238546_at | 0.24 | 118% |
| 1647 | 1554536_at | 0.27 | 121% |
| 1648 | 200701_at | 0.01 | 101% |
| 1649 | 1558722_at | 0.05 | 104% |
| 1650 | 239033_at | 0.15 | 111% |
| 1651 | 201003_x_at | 0.03 | 102% |
| 1652 | 228984_at | −0.45 | 73% |
| 1653 | 217025_s_at | 0.22 | 116% |
| 1654 | 232826_at | 0.20 | 115% |
| 1655 | 241692_at | 0.20 | 115% |
| 1656 | 205826_at | −0.35 | 78% |
| 1657 | 242079_at | −0.29 | 82% |
| 1658 | 242014_at | 0.16 | 112% |
| 1659 | 205612_at | 0.41 | 133% |
| 1660 | 225546_at | −0.25 | 84% |
| 1661 | 1559284_at | −0.31 | 81% |
| 1662 | 202583_s_at | 0.13 | 109% |
| 1663 | 225673_at | −0.16 | 90% |
| 1664 | 1556072_at | 0.20 | 115% |
| 1665 | 201190_s_at | −0.09 | 94% |
| 1666 | 218751_s_at | −0.09 | 94% |
| 1667 | 209069_s_at | −0.04 | 97% |
| 1668 | 210285_x_at | 0.13 | 109% |
| 1669 | 209131_s_at | 0.19 | 114% |
| 1670 | 222491_at | −0.10 | 93% |
| 1671 | 213198_at | 0.19 | 114% |
| 1672 | 233006_at | 0.22 | 116% |
| 1673 | 1555408_at | −0.12 | 92% |
| 1674 | 243558_at | −0.32 | 80% |
| 1675 | 228373_at | 0.13 | 109% |
| 1676 | 231578_at | 0.50 | 141% |
| 1677 | 241233_x_at | 0.09 | 106% |
| 1678 | 213851_at | 0.06 | 104% |
| 1679 | 219269_at | −0.05 | 97% |
| 1680 | 222276_at | −0.27 | 83% |
| 1681 | 217741_s_at | 0.17 | 113% |
| 1682 | 202080_s_at | −0.09 | 94% |
| 1683 | 224406_s_at | −0.52 | 70% |
| 1684 | 220987_s_at | −0.11 | 93% |
| 1685 | 230618_s_at | −0.16 | 90% |
| 1686 | 213274_s_at | −0.18 | 88% |
| 1687 | 229202_at | −0.35 | 78% |
| 1688 | 237009_at | 0.28 | 121% |
| 1689 | 228125_at | 0.15 | 111% |
| 1690 | 225820_at | −0.09 | 94% |
| 1691 | 218348_s_at | −0.04 | 97% |
| 1692 | 232883_at | 0.08 | 106% |
| 1693 | 209006_s_at | 0.13 | 109% |
| 1694 | 211269_s_at | −0.20 | 87% |
| 1695 | 240415_at | 0.24 | 118% |
| 1696 | 231219_at | 0.28 | 121% |
| 1697 | 226931_at | 0.72 | 165% |
| 1698 | 243720_at | 0.20 | 115% |
| 1699 | 208780_x_at | 0.05 | 104% |
| 1700 | 213788_s_at | −0.09 | 94% |
| 1701 | 200806_s_at | −0.27 | 83% |
| 1702 | 217810_x_at | −0.23 | 85% |
| 1703 | 219489_s_at | −0.30 | 81% |
| 1704 | 227201_at | −0.23 | 85% |
| 1705 | 202732_at | −0.36 | 78% |
| 1706 | 206777_s_at | −0.17 | 89% |
| 1707 | 1568680_s_at | 0.09 | 106% |
| 1708 | 224163_s_at | −0.23 | 85% |
| 1709 | 1559658_at | 0.13 | 109% |
| 1710 | 228645_at | −0.11 | 93% |
| 1711 | 238946_at | 0.41 | 133% |
| 1712 | 202898_at | 0.36 | 128% |
| 1713 | 1566485_at | −0.42 | 75% |
| 1714 | 1554112_a_at | −0.15 | 90% |
| 1715 | 214583_at | −0.19 | 88% |
| 1716 | 1556202_at | 0.23 | 117% |
| 1717 | 212169_at | 0.49 | 140% |
| 1718 | 200950_at | −0.09 | 94% |
| 1719 | 201009_s_at | −0.06 | 96% |
| 1720 | 201060_x_at | 0.18 | 113% |
| 1721 | 244633_at | 0.23 | 117% |
| 1722 | 231973_s_at | −0.02 | 99% |
| 1723 | 215013_s_at | 0.07 | 105% |
| 1724 | 237461_at | 0.25 | 119% |
| 1725 | 227793_at | 0.09 | 106% |
| 1726 | 238952_x_at | −0.33 | 80% |
| 1727 | 228806_at | −0.35 | 78% |
| 1728 | 204826_at | −0.22 | 86% |
| 1729 | 214132_at | 0.10 | 107% |
| 1730 | 213119_at | 0.22 | 116% |
| 1731 | 1558795_at | 0.41 | 133% |
| 1732 | 222760_at | −0.48 | 72% |
| 1733 | 211742_s_at | 0.05 | 104% |
| 1734 | 243356_at | 0.26 | 120% |
| 1735 | 203063_at | 0.02 | 101% |
| 1736 | 207922_s_at | 0.10 | 107% |
| 1737 | 228314_at | −0.19 | 88% |
| 1738 | 214137_at | 0.16 | 112% |
| 1739 | 216234_s_at | −0.02 | 99% |
| 1740 | 242551_at | −0.41 | 75% |
| 1741 | 207610_s_at | −0.20 | 87% |
| 1742 | 1559205_s_at | −0.49 | 71% |
| 1743 | 217292_at | 0.12 | 109% |
| 1744 | 231055_at | 0.11 | 108% |
| 1745 | 217984_at | −0.05 | 97% |
| 1746 | 216370_s_at | −0.11 | 93% |
| 1747 | 37433_at | 0.20 | 115% |
| 1748 | 201141_at | −0.37 | 77% |
| 1749 | 226816_s_at | −0.07 | 95% |
| 1750 | 239175_at | 0.27 | 121% |
| 1751 | 209158_s_at | −0.11 | 93% |
| 1752 | 203588_s_at | −0.04 | 97% |
| 1753 | 212823_s_at | −0.13 | 91% |
| 1754 | 202822_at | 0.06 | 104% |
| 1755 | 1561058_at | 0.16 | 112% |
| 1756 | 225802_at | −0.33 | 80% |
| 1757 | 213931_at | 0.12 | 109% |
| 1758 | 223666_at | 0.21 | 116% |
| 1759 | 201827_at | −0.06 | 96% |
| 1760 | 235052_at | −0.25 | 84% |
| 1761 | 227579_at | −0.15 | 90% |
| 1762 | 228105_at | 0.03 | 102% |
| 1763 | 236292_at | 0.24 | 118% |
| 1764 | 219550_at | −0.44 | 74% |
| 1765 | 242216_at | 0.12 | 109% |
| 1766 | 229544_at | −0.25 | 84% |
| 1767 | 227533_at | −0.23 | 85% |
| 1768 | 209442_x_at | −0.36 | 78% |
| 1769 | 37145_at | −0.24 | 85% |
| 1770 | 225680_at | 0.25 | 119% |
| 1771 | 209239_at | −0.19 | 88% |
| 1772 | 213579_s_at | −0.06 | 96% |
| 1773 | 213073_at | −0.01 | 99% |
| 1774 | 206855_s_at | 0.15 | 111% |
| 1775 | 205277_at | −0.14 | 91% |
| 1776 | 214076_at | 0.07 | 105% |
| 1777 | 1558167_a_at | −0.15 | 90% |
| 1778 | 1568574_x_at | −0.29 | 82% |
| 1779 | 224298_s_at | −0.04 | 97% |
| 1780 | 230795_at | 0.37 | 129% |
| 1781 | 221765_at | 0.00 | 100% |
| 1782 | 201668_x_at | −0.17 | 89% |
| 1783 | 1556432_at | 0.09 | 106% |
| 1784 | 227203_at | −0.12 | 92% |
| 1785 | 208743_s_at | −0.08 | 95% |
| 1786 | 212008_at | 0.17 | 113% |
| 1787 | 220072_at | −0.20 | 87% |
| 1788 | 1563467_at | 0.22 | 116% |
| 1789 | 224639_at | −0.07 | 95% |
| 1790 | 230480_at | 0.08 | 106% |
| 1791 | 1562013_a_at | −0.13 | 91% |
| 1792 | 204909_at | −0.08 | 95% |
| 1793 | 209824_s_at | 0.14 | 110% |
| 1794 | 206409_at | −0.47 | 72% |
| 1795 | 208174_x_at | −0.19 | 88% |
| 1796 | 211015_s_at | −0.09 | 94% |
| 1797 | 208658_at | −0.20 | 87% |
| 1798 | 213801_x_at | −0.08 | 95% |
| 1799 | 225634_at | 0.08 | 106% |
| 1800 | 215356_at | −0.15 | 90% |
| 1801 | 213688_at | −0.20 | 87% |
| 1802 | 200933_x_at | −0.06 | 96% |
| 1803 | 242270_at | 0.34 | 127% |
| 1804 | 210036_s_at | −0.24 | 85% |
| 1805 | 229822_at | −0.28 | 82% |
| 1806 | 232739_at | −0.50 | 71% |
| 1807 | 201219_at | 0.17 | 113% |
| 1808 | 1560457_x_at | 0.16 | 112% |
| 1809 | 1558372_at | 0.14 | 110% |
| 1810 | 1568851_at | 0.46 | 138% |
| 1811 | 225849_s_at | 0.12 | 109% |
| 1812 | 1557257_at | 0.39 | 131% |
| 1813 | 231283_at | −0.19 | 88% |
| 1814 | 239154_at | 0.07 | 105% |
| 1815 | 212523_s_at | 0.05 | 104% |
| 1816 | 231922_at | −0.11 | 93% |
| 1817 | 213514_s_at | −0.18 | 88% |
| 1818 | 205129_at | −0.09 | 94% |
| 1819 | 230997_at | −0.27 | 83% |
| 1820 | 208705_s_at | −0.06 | 96% |
| 1821 | 203939_at | −0.58 | 67% |
| 1822 | 217770_at | −0.07 | 95% |
| 1823 | 233787_at | 0.17 | 113% |
| 1824 | 241621_at | 0.15 | 111% |
| 1825 | 1553750_a_at | 0.13 | 109% |
| 1826 | 211018_at | −0.36 | 78% |
| 1827 | 200693_at | −0.02 | 99% |
| 1828 | 218662_s_at | 0.26 | 120% |
| 1829 | 220990_s_at | 0.07 | 105% |
| 1830 | 232149_s_at | 0.19 | 114% |
| 1831 | 232012_at | 0.03 | 102% |
| 1832 | 1562825_at | 0.33 | 126% |
| 1833 | 233800_at | 0.06 | 104% |
| 1834 | 242806_at | −0.16 | 90% |
| 1835 | 1557544_at | 0.41 | 133% |
| 1836 | 203923_s_at | 0.20 | 115% |
| 1837 | 217978_s_at | −0.07 | 95% |
| 1838 | 220940_at | 0.12 | 109% |
| 1839 | 221711_s_at | −0.12 | 92% |
| 1840 | 222087_at | −0.35 | 78% |
| 1841 | 213201_s_at | 0.32 | 125% |
| 1842 | 219178_at | −0.11 | 93% |
| 1843 | 213535_s_at | −0.17 | 89% |
| 1844 | 204039_at | 0.24 | 118% |
| 1845 | 215754_at | 0.04 | 103% |
| 1846 | 232284_at | 0.35 | 127% |
| 1847 | 204214_s_at | 0.23 | 117% |
| 1848 | 219765_at | −0.32 | 80% |
| 1849 | 201938_at | 0.09 | 106% |
| 1850 | 230009_at | 0.16 | 112% |
| 1851 | 239427_at | −0.38 | 77% |
| 1852 | 214717_at | −0.12 | 92% |
| 1853 | 239755_at | 0.02 | 101% |
| 1854 | 208322_s_at | −0.21 | 86% |
| 1855 | 227910_at | 0.06 | 104% |
| 1856 | 225382_at | −0.25 | 84% |
| 1857 | 220167_s_at | 0.22 | 116% |
| 1858 | 1561884_at | 0.17 | 113% |
| 1859 | 206332_s_at | 0.12 | 109% |
| 1860 | 220193_at | −0.09 | 94% |
| 1861 | 237623_at | 0.22 | 116% |
| 1862 | 209410_s_at | 0.53 | 144% |
| 1863 | 214481_at | 0.23 | 117% |
| 1864 | 236511_at | 0.19 | 114% |
| 1865 | 226184_at | 0.35 | 127% |
| 1866 | 222955_s_at | −0.01 | 99% |
| 1867 | 226840_at | 0.17 | 113% |
| 1868 | 227931_at | 0.09 | 106% |
| 1869 | 231837_at | −0.25 | 84% |
| 1870 | 232180_at | 0.07 | 105% |
| 1871 | 227305_s_at | −0.10 | 93% |
| 1872 | 237597_at | −0.29 | 82% |
| 1873 | 1555963_x_at | −0.38 | 77% |
| 1874 | 211874_s_at | −0.19 | 88% |
| 1875 | 208541_x_at | −0.13 | 91% |
| 1876 | 242868_at | 0.37 | 129% |
| 1877 | 227522_at | 0.68 | 160% |
| 1878 | 207324_s_at | −0.46 | 73% |
| 1879 | 1560109_s_at | 0.19 | 114% |
| 1880 | 231644_at | 0.52 | 143% |
| 1881 | 1554360_at | 0.17 | 113% |
| 1882 | 239988_at | 0.22 | 116% |
| 1883 | 201898_s_at | 0.07 | 105% |
| 1884 | 1555420_a_at | −0.07 | 95% |
| 1885 | 209691_s_at | 0.01 | 101% |
| 1886 | 213596_at | 0.27 | 121% |
| 1887 | 243767_at | 0.13 | 109% |
| 1888 | 218014_at | −0.17 | 89% |
| 1889 | 208179_x_at | −0.29 | 82% |
| 1890 | 230761_at | 0.04 | 103% |
| 1891 | 217100_s_at | −0.08 | 95% |
| 1892 | 242066_at | 0.17 | 113% |
| 1893 | 232927_at | −0.01 | 99% |
| 1894 | 217933_s_at | 0.26 | 120% |
| 1895 | 205929_at | −0.38 | 77% |
| 1896 | 234049_at | −0.16 | 90% |
| 1897 | 225435_at | −0.05 | 97% |
| 1898 | 203560_at | 0.37 | 129% |
| 1899 | 1555427_s_at | 0.04 | 103% |
| 1900 | 215127_s_at | 0.04 | 103% |
| 1901 | 1561211_at | −0.17 | 89% |
| 1902 | 226509_at | 0.17 | 113% |
| 1903 | 228088_at | 0.17 | 113% |
| 1904 | 218126_at | −0.02 | 99% |
| 1905 | 1559052_s_at | −0.11 | 93% |
| 1906 | 203311_s_at | −0.12 | 92% |
| 1907 | 232646_at | −0.02 | 99% |
| 1908 | 218907_s_at | 0.12 | 109% |
| 1909 | 232744_x_at | 0.13 | 109% |
| 1910 | 213310_at | −0.05 | 97% |
| 1911 | 222900_at | −0.12 | 92% |
| 1912 | 1552607_at | −0.06 | 96% |
| 1913 | 232237_at | −0.01 | 99% |
| 1914 | 1558310_s_at | 0.13 | 109% |
| 1915 | 233794_at | −0.33 | 80% |
| 1916 | 207276_at | −0.11 | 93% |
| 1917 | 228719_at | 0.00 | 100% |
| 1918 | 200076_s_at | 0.01 | 101% |
| 1919 | 209750_at | −0.30 | 81% |
| 1920 | 243033_at | 0.11 | 108% |
| 1921 | 226210_s_at | −0.36 | 78% |
| 1922 | 228434_at | −0.33 | 80% |
| 1923 | 204497_at | −0.24 | 85% |
| 1924 | 203339_at | 0.10 | 107% |
| 1925 | 229980_s_at | 0.06 | 104% |
| 1926 | 213531_s_at | −0.09 | 94% |
| 1927 | 201487_at | 0.11 | 108% |
| 1928 | 215169_at | −0.16 | 90% |
| 1929 | 203342_at | 0.06 | 104% |
| 1930 | 222879_s_at | −0.17 | 89% |
| 1931 | 239866_at | −0.31 | 81% |
| 1932 | 209110_s_at | 0.08 | 106% |
| 1933 | 214083_at | −0.11 | 93% |
| 1934 | 205770_at | 0.19 | 114% |
| 1935 | 219684_at | 0.30 | 123% |
| 1936 | 206448_at | −0.22 | 86% |
| 1937 | 222230_s_at | 0.10 | 107% |
| 1938 | 1553689_s_at | 0.12 | 109% |
| 1939 | 226032_at | −0.04 | 97% |
| 1940 | 242858_at | 0.08 | 106% |
| 1941 | 241590_at | 0.22 | 116% |
| 1942 | 207113_s_at | −0.24 | 85% |
| 1943 | 234886_at | −0.52 | 70% |
| 1944 | 205978_at | 0.53 | 144% |
| 1945 | 243213_at | 0.19 | 114% |
| 1946 | 236668_at | 0.11 | 108% |
| 1947 | 230683_at | 0.24 | 118% |
| 1948 | 217747_s_at | −0.07 | 95% |
| 1949 | 1560228_at | 0.18 | 113% |
| 1950 | 233571_x_at | −0.37 | 77% |
| 1951 | 222214_at | 0.02 | 101% |
| 1952 | 220079_s_at | 0.08 | 106% |
| 1953 | 233401_at | −0.20 | 87% |
| 1954 | 223566_s_at | −0.39 | 76% |
| 1955 | 221964_at | −0.20 | 87% |
| 1956 | 212337_at | 0.10 | 107% |
| 1957 | 201192_s_at | −0.10 | 93% |
| 1958 | 223217_s_at | 0.20 | 115% |
| 1959 | 243955_at | 0.50 | 141% |
| 1960 | 231810_at | −0.17 | 89% |
| 1961 | 218627_at | 0.28 | 121% |
| 1962 | 205728_at | 0.68 | 160% |
| 1963 | 238425_at | −0.23 | 85% |
| 1964 | 202299_s_at | 0.09 | 106% |
| 1965 | 203659_s_at | 0.10 | 107% |
| 1966 | 207735_at | −0.17 | 89% |
| 1967 | 233979_s_at | −0.40 | 76% |
| 1968 | 226300_at | −0.10 | 93% |
| 1969 | 222307_at | −0.17 | 89% |
| 1970 | 1559699_at | 0.34 | 127% |
| 1971 | 239937_at | 0.10 | 107% |
| 1972 | 211022_s_at | 0.00 | 100% |
| 1973 | 203567_s_at | 0.08 | 106% |
| 1974 | 203054_s_at | 0.01 | 101% |
| 1975 | 202905_x_at | 0.21 | 116% |
| 1976 | 237870_at | 0.45 | 137% |
| 1977 | 232044_at | 0.07 | 105% |
| 1978 | 201931_at | 0.12 | 109% |
| 1979 | 203694_s_at | −0.04 | 97% |
| 1980 | 224652_at | −0.07 | 95% |
| 1981 | 221978_at | 0.08 | 106% |
| 1982 | 243995_at | 0.17 | 113% |
| 1983 | 225925_s_at | 0.12 | 109% |
| 1984 | 204750_s_at | 0.34 | 127% |
| 1985 | 226606_s_at | 0.33 | 126% |
| 1986 | 232141_at | 0.18 | 113% |
| 1987 | 227535_at | 0.04 | 103% |
| 1988 | 1553829_at | 0.30 | 123% |
| 1989 | 208853_s_at | −0.11 | 93% |
| 1990 | 212020_s_at | −0.02 | 99% |
| 1991 | 225205_at | −0.14 | 91% |
| 1992 | 232724_at | 0.09 | 106% |
| 1993 | 221139_s_at | 0.21 | 116% |
| 1994 | 210495_x_at | 0.07 | 105% |
| 1995 | 210910_s_at | −0.23 | 85% |
| 1996 | 1555920_at | 0.14 | 110% |
| 1997 | 220980_s_at | 0.08 | 106% |
| 1998 | 1556601_a_at | 0.29 | 122% |
| 1999 | 215236_s_at | 0.02 | 101% |
| 2000 | 240031_at | 0.24 | 118% |
| 2001 | 234980_at | 0.53 | 144% |
| 2002 | 1556865_at | 0.33 | 126% |

TABLE 2

| Signature | 1st Marker | 2nd Marker | 3rd Marker |
|---|---|---|---|
| Number: | (SeqNumber) | (SeqNumber) | (SeqNumber) |
| 1 | 34 | 585 | 7 |
| 2 | 599 | 667 | 302 |
| 3 | 99 | 269 | 380 |
| 4 | 834 | 114 | 292 |
| 5 | 462 | 359 | 124 |
| 6 | 262 | 794 | 10 |
| 7 | 420 | 66 | 618 |
| 8 | 67 | 112 | 326 |
| 9 | 6 | 255 | 916 |
| 10 | 348 | 988 | 407 |
| 11 | 708 | 278 | 542 |
| 12 | 12 | 764 | 6 |
| 13 | 45 | 880 | 200 |
| 14 | 574 | 289 | 127 |
| 15 | 45 | 386 | 441 |
| 16 | 348 | 131 | 124 |
| 17 | 74 | 599 | 508 |
| 18 | 384 | 124 | 150 |
| 19 | 395 | 930 | 155 |
| 20 | 7 | 45 | 754 |
| 21 | 18 | 21 | 701 |
| 22 | 607 | 35 | 634 |
| 23 | 69 | 363 | 778 |
| 24 | 676 | 55 | 76 |
| 25 | 25 | 887 | 124 |
| 26 | 324 | 454 | 289 |
| 27 | 1 | 30 | 342 |
| 28 | 49 | 718 | 213 |
| 29 | 131 | 78 | 187 |
| 30 | 352 | 201 | 125 |
| 31 | 61 | 920 | 42 |
| 32 | 269 | 613 | 120 |
| 33 | 144 | 49 | 559 |
| 34 | 66 | 47 | 388 |
| 35 | 35 | 994 | 72 |
| 36 | 407 | 1000 | 439 |
| 37 | 844 | 45 | 64 |
| 38 | 771 | 83 | 379 |
| 39 | 52 | 12 | 212 |
| 40 | 866 | 32 | 658 |
| 41 | 78 | 987 | 3 |
| 42 | 42 | 920 | 363 |
| 43 | 68 | 980 | 838 |
| 44 | 44 | 183 | 49 |
| 45 | 23 | 794 | 178 |
| 46 | 562 | 905 | 118 |
| 47 | 798 | 112 | 346 |
| 48 | 614 | 76 | 47 |
| 49 | 363 | 981 | 192 |
| 50 | 166 | 360 | 15 |
| 51 | 112 | 861 | 503 |
| 52 | 342 | 461 | 25 |
| 53 | 200 | 923 | 2 |
| 54 | 367 | 574 | 360 |
| 55 | 231 | 785 | 112 |
| 56 | 121 | 319 | 112 |
| 57 | 833 | 599 | 77 |
| 58 | 478 | 203 | 185 |
| 59 | 804 | 402 | 2 |
| 60 | 3 | 494 | 24 |
| 61 | 593 | 414 | 1 |
| 62 | 233 | 112 | 95 |
| 63 | 133 | 425 | 889 |
| 64 | 872 | 6 | 955 |
| 65 | 132 | 341 | 41 |
| 66 | 416 | 500 | 81 |
| 67 | 421 | 154 | 676 |
| 68 | 500 | 127 | 57 |
| 69 | 78 | 539 | 706 |
| 70 | 534 | 112 | 642 |
| 71 | 316 | 912 | 17 |
| 72 | 818 | 538 | 2 |
| 73 | 486 | 344 | 41 |
| 74 | 682 | 255 | 566 |
| 75 | 112 | 536 | 195 |
| 76 | 981 | 22 | 379 |
| 77 | 12 | 545 | 853 |
| 78 | 50 | 149 | 30 |
| 79 | 981 | 87 | 64 |
| 80 | 19 | 190 | 7 |
| 81 | 314 | 457 | 524 |
| 82 | 43 | 17 | 743 |
| 83 | 912 | 431 | 473 |
| 84 | 351 | 407 | 118 |
| 85 | 112 | 305 | 726 |
| 86 | 583 | 32 | 566 |
| 87 | 835 | 121 | 668 |
| 88 | 12 | 31 | 731 |
| 89 | 838 | 72 | 81 |
| 90 | 256 | 579 | 124 |
| 91 | 165 | 56 | 599 |
| 92 | 167 | 302 | 204 |
| 93 | 191 | 638 | 65 |
| 94 | 352 | 707 | 40 |
| 95 | 43 | 56 | 992 |
| 96 | 10 | 533 | 165 |
| 97 | 88 | 20 | 555 |
| 98 | 206 | 775 | 78 |
| 99 | 108 | 105 | 98 |
| 100 | 23 | 9 | 853 |
| 101 | 539 | 2 | 152 |
| 102 | 110 | 86 | 717 |
| 103 | 11 | 279 | 112 |
| 104 | 771 | 303 | 5 |
| 105 | 163 | 38 | 128 |
| 106 | 157 | 722 | 124 |
| 107 | 784 | 137 | 73 |
| 108 | 990 | 118 | 268 |
| 109 | 342 | 427 | 545 |
| 110 | 360 | 885 | 459 |
| 111 | 61 | 208 | 67 |
| 112 | 351 | 428 | 3 |
| 113 | 610 | 732 | 18 |
| 114 | 125 | 544 | 124 |
| 115 | 2 | 205 | 543 |
| 116 | 127 | 98 | 349 |
| 117 | 714 | 124 | 650 |
| 118 | 4 | 25 | 24 |
| 119 | 33 | 112 | 314 |
| 120 | 112 | 124 | 179 |
| 121 | 877 | 71 | 503 |
| 122 | 419 | 203 | 594 |
| 123 | 628 | 925 | 8 |
| 124 | 641 | 255 | 29 |
| 125 | 521 | 205 | 124 |
| 126 | 3 | 261 | 574 |
| 127 | 689 | 50 | 850 |
| 128 | 284 | 56 | 60 |
| 129 | 537 | 238 | 12 |
| 130 | 153 | 27 | 211 |
| 131 | 23 | 312 | 34 |
| 132 | 152 | 545 | 93 |
| 133 | 248 | 147 | 326 |
| 134 | 45 | 237 | 151 |
| 135 | 750 | 5 | 453 |
| 136 | 844 | 191 | 607 |
| 137 | 149 | 494 | 2 |
| 138 | 316 | 994 | 746 |
| 139 | 720 | 45 | 520 |
| 140 | 106 | 112 | 323 |
| 141 | 178 | 362 | 22 |
| 142 | 187 | 745 | 124 |
| 143 | 363 | 947 | 381 |
| 144 | 112 | 536 | 869 |
| 145 | 60 | 743 | 149 |
| 146 | 96 | 3 | 470 |
| 147 | 35 | 220 | 124 |
| 148 | 98 | 881 | 900 |
| 149 | 127 | 731 | 39 |
| 150 | 2 | 375 | 401 |
| 151 | 867 | 8 | 200 |
| 152 | 843 | 121 | 151 |
| 153 | 11 | 199 | 349 |
| 154 | 125 | 370 | 79 |
| 155 | 874 | 103 | 308 |
| 156 | 84 | 865 | 2 |
| 157 | 45 | 527 | 98 |
| 158 | 618 | 127 | 311 |
| 159 | 460 | 814 | 162 |
| 160 | 272 | 10 | 657 |
| 161 | 874 | 12 | 10 |
| 162 | 824 | 375 | 838 |
| 163 | 160 | 17 | 506 |
| 164 | 429 | 406 | 402 |
| 165 | 812 | 55 | 230 |
| 166 | 41 | 825 | 510 |
| 167 | 162 | 69 | 66 |
| 168 | 644 | 231 | 304 |
| 169 | 132 | 107 | 304 |
| 170 | 412 | 250 | 22 |
| 171 | 346 | 489 | 344 |
| 172 | 25 | 520 | 76 |
| 173 | 18 | 631 | 718 |
| 174 | 609 | 124 | 9 |
| 175 | 30 | 260 | 3 |
| 176 | 159 | 58 | 817 |
| 177 | 112 | 640 | 228 |
| 178 | 621 | 448 | 109 |
| 179 | 61 | 39 | 732 |
| 180 | 102 | 112 | 924 |
| 181 | 281 | 360 | 827 |
| 182 | 349 | 35 | 39 |
| 183 | 368 | 147 | 35 |
| 184 | 593 | 1 | 206 |
| 185 | 12 | 292 | 950 |
| 186 | 764 | 472 | 45 |
| 187 | 504 | 576 | 124 |
| 188 | 438 | 351 | 86 |
| 189 | 94 | 302 | 797 |
| 190 | 522 | 112 | 414 |
| 191 | 344 | 12 | 994 |
| 192 | 52 | 397 | 773 |
| 193 | 198 | 11 | 967 |
| 194 | 176 | 224 | 35 |
| 195 | 132 | 501 | 589 |
| 196 | 459 | 169 | 256 |
| 197 | 574 | 418 | 66 |
| 198 | 559 | 605 | 36 |
| 199 | 605 | 104 | 112 |
| 200 | 12 | 102 | 899 |
| 201 | 297 | 831 | 282 |
| 202 | 2 | 572 | 723 |
| 203 | 520 | 43 | 42 |
| 204 | 823 | 112 | 896 |
| 205 | 133 | 39 | 53 |
| 206 | 112 | 835 | 848 |
| 207 | 706 | 35 | 609 |
| 208 | 602 | 562 | 912 |
| 209 | 607 | 750 | 8 |
| 210 | 871 | 100 | 112 |
| 211 | 19 | 679 | 248 |
| 212 | 833 | 19 | 115 |
| 213 | 61 | 889 | 813 |
| 214 | 826 | 16 | 959 |
| 215 | 740 | 795 | 2 |
| 216 | 124 | 535 | 219 |
| 217 | 662 | 112 | 28 |
| 218 | 61 | 342 | 526 |
| 219 | 127 | 24 | 464 |
| 220 | 37 | 215 | 107 |
| 221 | 907 | 66 | 123 |
| 222 | 99 | 134 | 22 |
| 223 | 124 | 416 | 937 |
| 224 | 691 | 50 | 83 |
| 225 | 410 | 51 | 536 |
| 226 | 38 | 308 | 417 |
| 227 | 18 | 756 | 3 |
| 228 | 706 | 446 | 163 |
| 229 | 607 | 38 | 923 |
| 230 | 564 | 890 | 3 |
| 231 | 924 | 344 | 3 |
| 232 | 113 | 112 | 578 |
| 233 | 418 | 416 | 297 |
| 234 | 594 | 51 | 47 |
| 235 | 880 | 409 | 303 |
| 236 | 786 | 838 | 816 |
| 237 | 15 | 506 | 378 |
| 238 | 59 | 32 | 92 |
| 239 | 41 | 305 | 49 |
| 240 | 124 | 128 | 476 |
| 241 | 755 | 56 | 401 |
| 242 | 108 | 418 | 22 |
| 243 | 16 | 521 | 899 |
| 244 | 321 | 389 | 18 |
| 245 | 863 | 262 | 35 |
| 246 | 777 | 154 | 124 |
| 247 | 586 | 99 | 145 |
| 248 | 382 | 925 | 283 |
| 249 | 232 | 264 | 3 |
| 250 | 974 | 16 | 408 |
| 251 | 119 | 61 | 805 |
| 252 | 511 | 25 | 132 |
| 253 | 17 | 195 | 351 |
| 254 | 37 | 558 | 76 |
| 255 | 207 | 444 | 389 |
| 256 | 496 | 550 | 802 |
| 257 | 140 | 83 | 12 |
| 258 | 602 | 405 | 3 |
| 259 | 1 | 463 | 336 |
| 260 | 32 | 368 | 645 |
| 261 | 544 | 395 | 598 |
| 262 | 711 | 112 | 396 |
| 263 | 604 | 12 | 1 |
| 264 | 971 | 920 | 256 |
| 265 | 556 | 593 | 8 |
| 266 | 7 | 292 | 629 |
| 267 | 371 | 771 | 709 |
| 268 | 266 | 112 | 154 |
| 269 | 127 | 701 | 275 |
| 270 | 367 | 185 | 988 |
| 271 | 199 | 346 | 588 |
| 272 | 18 | 21 | 27 |
| 273 | 400 | 248 | 864 |
| 274 | 2 | 118 | 121 |
| 275 | 717 | 694 | 12 |
| 276 | 228 | 118 | 73 |
| 277 | 644 | 535 | 3 |
| 278 | 10 | 86 | 502 |
| 279 | 412 | 566 | 3 |
| 280 | 348 | 703 | 112 |
| 281 | 830 | 34 | 55 |
| 282 | 163 | 712 | 35 |
| 283 | 118 | 773 | 21 |
| 284 | 30 | 561 | 124 |
| 285 | 808 | 47 | 140 |
| 286 | 78 | 201 | 112 |
| 287 | 90 | 834 | 187 |
| 288 | 355 | 722 | 931 |
| 289 | 747 | 32 | 10 |
| 290 | 354 | 53 | 32 |
| 291 | 445 | 99 | 61 |
| 292 | 805 | 187 | 119 |
| 293 | 316 | 431 | 45 |
| 294 | 983 | 571 | 112 |
| 295 | 50 | 376 | 38 |
| 296 | 208 | 258 | 502 |
| 297 | 565 | 130 | 42 |
| 298 | 125 | 379 | 5 |
| 299 | 810 | 18 | 34 |
| 300 | 690 | 856 | 158 |
| 301 | 624 | 34 | 318 |
| 302 | 2 | 847 | 86 |
| 303 | 718 | 253 | 36 |
| 304 | 5 | 179 | 508 |
| 305 | 248 | 394 | 112 |
| 306 | 139 | 561 | 5 |
| 307 | 4 | 791 | 877 |
| 308 | 920 | 932 | 10 |
| 309 | 501 | 6 | 163 |
| 310 | 679 | 12 | 477 |
| 311 | 95 | 318 | 101 |
| 312 | 508 | 45 | 691 |
| 313 | 43 | 338 | 39 |
| 314 | 431 | 43 | 653 |
| 315 | 124 | 402 | 779 |
| 316 | 10 | 406 | 472 |
| 317 | 64 | 159 | 25 |
| 318 | 722 | 58 | 3 |
| 319 | 97 | 35 | 661 |
| 320 | 963 | 611 | 33 |
| 321 | 477 | 509 | 16 |
| 322 | 121 | 248 | 92 |
| 323 | 506 | 442 | 185 |
| 324 | 148 | 79 | 21 |
| 325 | 453 | 5 | 893 |
| 326 | 599 | 96 | 383 |
| 327 | 207 | 380 | 81 |
| 328 | 25 | 118 | 517 |
| 329 | 80 | 599 | 117 |
| 330 | 282 | 104 | 877 |
| 331 | 632 | 282 | 32 |
| 332 | 473 | 49 | 120 |
| 333 | 197 | 35 | 124 |
| 334 | 12 | 178 | 645 |
| 335 | 55 | 44 | 416 |
| 336 | 137 | 837 | 152 |
| 337 | 9 | 411 | 4 |
| 338 | 207 | 459 | 205 |
| 339 | 571 | 152 | 561 |
| 340 | 47 | 198 | 195 |
| 341 | 473 | 90 | 364 |
| 342 | 347 | 89 | 876 |
| 343 | 124 | 384 | 529 |
| 344 | 163 | 852 | 483 |
| 345 | 963 | 199 | 69 |
| 346 | 64 | 285 | 49 |
| 347 | 140 | 737 | 43 |
| 348 | 124 | 634 | 747 |
| 349 | 793 | 302 | 599 |
| 350 | 113 | 12 | 115 |
| 351 | 192 | 599 | 291 |
| 352 | 489 | 112 | 791 |
| 353 | 656 | 9 | 43 |
| 354 | 46 | 69 | 154 |
| 355 | 877 | 558 | 21 |
| 356 | 457 | 285 | 270 |
| 357 | 271 | 139 | 514 |
| 358 | 889 | 389 | 35 |
| 359 | 2 | 119 | 599 |
| 360 | 124 | 764 | 86 |
| 361 | 35 | 815 | 446 |
| 362 | 352 | 283 | 18 |
| 363 | 159 | 643 | 3 |
| 364 | 139 | 396 | 2 |
| 365 | 94 | 899 | 256 |
| 366 | 155 | 807 | 50 |
| 367 | 150 | 431 | 14 |
| 368 | 438 | 568 | 2 |
| 369 | 962 | 509 | 106 |
| 370 | 111 | 5 | 113 |
| 371 | 188 | 45 | 802 |
| 372 | 18 | 35 | 108 |
| 373 | 94 | 191 | 32 |
| 374 | 43 | 107 | 931 |
| 375 | 968 | 47 | 844 |
| 376 | 921 | 910 | 1 |
| 377 | 12 | 988 | 837 |
| 378 | 56 | 112 | 60 |
| 379 | 111 | 771 | 917 |
| 380 | 117 | 718 | 1 |
| 381 | 500 | 614 | 185 |
| 382 | 126 | 470 | 30 |
| 383 | 16 | 336 | 583 |
| 384 | 2 | 331 | 573 |
| 385 | 965 | 207 | 32 |
| 386 | 9 | 137 | 146 |
| 387 | 605 | 201 | 372 |
| 388 | 407 | 16 | 454 |
| 389 | 612 | 66 | 192 |
| 390 | 337 | 35 | 178 |
| 391 | 210 | 112 | 452 |
| 392 | 665 | 658 | 84 |
| 393 | 470 | 903 | 50 |
| 394 | 435 | 954 | 54 |
| 395 | 48 | 810 | 1 |
| 396 | 60 | 219 | 33 |
| 397 | 448 | 391 | 346 |
| 398 | 226 | 3 | 859 |
| 399 | 255 | 435 | 576 |
| 400 | 403 | 509 | 12 |
| 401 | 316 | 520 | 585 |
| 402 | 851 | 69 | 5 |
| 403 | 5 | 873 | 216 |
| 404 | 588 | 809 | 1 |
| 405 | 817 | 198 | 599 |
| 406 | 6 | 112 | 755 |
| 407 | 146 | 63 | 132 |
| 408 | 45 | 322 | 318 |
| 409 | 457 | 121 | 24 |
| 410 | 52 | 96 | 4 |
| 411 | 166 | 67 | 39 |
| 412 | 184 | 112 | 523 |
| 413 | 591 | 62 | 25 |
| 414 | 490 | 124 | 453 |
| 415 | 648 | 892 | 36 |
| 416 | 382 | 186 | 533 |
| 417 | 145 | 157 | 412 |
| 418 | 302 | 114 | 593 |
| 419 | 821 | 24 | 127 |
| 420 | 166 | 78 | 366 |
| 421 | 47 | 64 | 710 |
| 422 | 65 | 783 | 814 |
| 423 | 588 | 304 | 60 |
| 424 | 57 | 115 | 25 |
| 425 | 39 | 533 | 387 |
| 426 | 403 | 905 | 316 |
| 427 | 676 | 426 | 2 |
| 428 | 54 | 414 | 65 |
| 429 | 114 | 431 | 79 |
| 430 | 763 | 91 | 118 |
| 431 | 827 | 289 | 457 |
| 432 | 35 | 625 | 489 |
| 433 | 185 | 987 | 56 |
| 434 | 118 | 107 | 644 |
| 435 | 459 | 1000 | 649 |
| 436 | 12 | 751 | 359 |
| 437 | 50 | 55 | 965 |
| 438 | 400 | 148 | 35 |
| 439 | 292 | 495 | 3 |
| 440 | 32 | 4 | 379 |
| 441 | 990 | 78 | 935 |
| 442 | 759 | 18 | 859 |
| 443 | 578 | 700 | 1000 |
| 444 | 112 | 151 | 247 |
| 445 | 251 | 34 | 130 |
| 446 | 443 | 19 | 25 |
| 447 | 418 | 112 | 134 |
| 448 | 50 | 899 | 297 |
| 449 | 713 | 360 | 663 |
| 450 | 43 | 2 | 561 |
| 451 | 459 | 416 | 55 |
| 452 | 195 | 244 | 548 |
| 453 | 363 | 37 | 69 |
| 454 | 24 | 7 | 926 |
| 455 | 425 | 47 | 573 |
| 456 | 1 | 38 | 901 |
| 457 | 636 | 337 | 24 |
| 458 | 697 | 34 | 345 |
| 459 | 371 | 95 | 69 |
| 460 | 158 | 35 | 308 |
| 461 | 64 | 912 | 599 |
| 462 | 127 | 665 | 24 |
| 463 | 7 | 565 | 756 |
| 464 | 32 | 169 | 374 |
| 465 | 8 | 726 | 459 |
| 466 | 79 | 89 | 37 |
| 467 | 6 | 35 | 176 |
| 468 | 60 | 785 | 18 |
| 469 | 99 | 3 | 458 |
| 470 | 50 | 470 | 719 |
| 471 | 107 | 371 | 171 |
| 472 | 441 | 582 | 29 |
| 473 | 538 | 838 | 120 |
| 474 | 278 | 770 | 3 |
| 475 | 3 | 560 | 732 |
| 476 | 413 | 124 | 568 |
| 477 | 154 | 37 | 665 |
| 478 | 153 | 364 | 3 |
| 479 | 124 | 441 | 405 |
| 480 | 18 | 749 | 185 |
| 481 | 5 | 735 | 834 |
| 482 | 6 | 52 | 341 |
| 483 | 116 | 128 | 50 |
| 484 | 76 | 118 | 414 |
| 485 | 513 | 22 | 71 |
| 486 | 25 | 862 | 690 |
| 487 | 5 | 346 | 362 |
| 488 | 1 | 55 | 3 |
| 489 | 437 | 37 | 20 |
| 490 | 991 | 96 | 533 |
| 491 | 543 | 275 | 368 |
| 492 | 124 | 112 | 582 |
| 493 | 112 | 554 | 295 |
| 494 | 303 | 12 | 183 |
| 495 | 582 | 112 | 491 |
| 496 | 114 | 112 | 20 |
| 497 | 460 | 527 | 124 |
| 498 | 69 | 924 | 7 |
| 499 | 39 | 289 | 118 |
| 500 | 642 | 382 | 17 |
| 501 | 171 | 167 | 39 |
| 502 | 842 | 53 | 447 |
| 503 | 224 | 117 | 112 |
| 504 | 378 | 414 | 18 |
| 505 | 28 | 120 | 45 |
| 506 | 884 | 6 | 652 |
| 507 | 35 | 774 | 636 |
| 508 | 564 | 316 | 195 |
| 509 | 124 | 256 | 988 |
| 510 | 569 | 18 | 397 |
| 511 | 390 | 473 | 342 |
| 512 | 159 | 495 | 21 |
| 513 | 793 | 627 | 137 |
| 514 | 332 | 6 | 57 |
| 515 | 39 | 90 | 980 |
| 516 | 35 | 75 | 772 |
| 517 | 185 | 360 | 18 |
| 518 | 949 | 315 | 152 |
| 519 | 789 | 1 | 11 |
| 520 | 342 | 407 | 121 |
| 521 | 921 | 375 | 35 |
| 522 | 315 | 435 | 49 |
| 523 | 121 | 530 | 128 |
| 524 | 55 | 394 | 461 |
| 525 | 151 | 112 | 912 |
| 526 | 979 | 404 | 2 |
| 527 | 473 | 498 | 363 |
| 528 | 135 | 546 | 384 |
| 529 | 129 | 55 | 446 |
| 530 | 12 | 221 | 6 |
| 531 | 112 | 62 | 937 |
| 532 | 2 | 418 | 367 |
| 533 | 56 | 810 | 649 |
| 534 | 22 | 320 | 37 |
| 535 | 184 | 867 | 58 |
| 536 | 961 | 225 | 126 |
| 537 | 93 | 323 | 846 |
| 538 | 192 | 12 | 16 |
| 539 | 596 | 43 | 3 |
| 540 | 574 | 6 | 156 |
| 541 | 351 | 702 | 187 |
| 542 | 64 | 889 | 29 |
| 543 | 169 | 367 | 294 |
| 544 | 739 | 112 | 941 |
| 545 | 382 | 851 | 124 |
| 546 | 18 | 629 | 68 |
| 547 | 358 | 931 | 416 |
| 548 | 66 | 549 | 467 |
| 549 | 53 | 124 | 957 |
| 550 | 298 | 61 | 22 |
| 551 | 59 | 401 | 950 |
| 552 | 836 | 1 | 201 |
| 553 | 771 | 124 | 802 |
| 554 | 649 | 98 | 105 |
| 555 | 34 | 980 | 192 |
| 556 | 978 | 480 | 99 |
| 557 | 195 | 159 | 11 |
| 558 | 593 | 178 | 665 |
| 559 | 268 | 618 | 534 |
| 560 | 637 | 58 | 656 |
| 561 | 777 | 8 | 921 |
| 562 | 112 | 319 | 622 |
| 563 | 674 | 745 | 478 |
| 564 | 733 | 17 | 289 |
| 565 | 5 | 19 | 121 |
| 566 | 113 | 121 | 136 |
| 567 | 10 | 96 | 518 |
| 568 | 73 | 226 | 55 |
| 569 | 813 | 594 | 52 |
| 570 | 154 | 83 | 61 |
| 571 | 92 | 558 | 560 |
| 572 | 453 | 95 | 354 |
| 573 | 998 | 275 | 473 |
| 574 | 139 | 6 | 936 |
| 575 | 448 | 117 | 386 |
| 576 | 391 | 98 | 12 |
| 577 | 829 | 12 | 41 |
| 578 | 18 | 38 | 339 |
| 579 | 3 | 144 | 128 |
| 580 | 496 | 158 | 43 |
| 581 | 11 | 282 | 325 |
| 582 | 901 | 112 | 490 |
| 583 | 437 | 552 | 99 |
| 584 | 83 | 85 | 15 |
| 585 | 446 | 24 | 389 |
| 586 | 638 | 918 | 45 |
| 587 | 473 | 337 | 35 |
| 588 | 204 | 709 | 480 |
| 589 | 78 | 43 | 32 |
| 590 | 657 | 554 | 35 |
| 591 | 42 | 124 | 889 |
| 592 | 12 | 100 | 584 |
| 593 | 418 | 579 | 23 |
| 594 | 45 | 596 | 187 |
| 595 | 475 | 348 | 593 |
| 596 | 90 | 112 | 423 |
| 597 | 805 | 159 | 8 |
| 598 | 558 | 446 | 78 |
| 599 | 34 | 567 | 190 |
| 600 | 241 | 145 | 540 |
| 601 | 32 | 112 | 557 |
| 602 | 100 | 35 | 530 |
| 603 | 427 | 90 | 667 |
| 604 | 61 | 292 | 918 |
| 605 | 644 | 535 | 44 |
| 606 | 599 | 399 | 521 |
| 607 | 18 | 871 | 324 |
| 608 | 873 | 994 | 121 |
| 609 | 41 | 673 | 336 |
| 610 | 295 | 282 | 149 |
| 611 | 43 | 90 | 661 |
| 612 | 155 | 464 | 456 |
| 613 | 227 | 17 | 3 |
| 614 | 599 | 2 | 241 |
| 615 | 352 | 98 | 297 |
| 616 | 304 | 716 | 576 |
| 617 | 829 | 837 | 207 |
| 618 | 613 | 527 | 11 |
| 619 | 32 | 944 | 524 |
| 620 | 6 | 170 | 10 |
| 621 | 124 | 105 | 476 |
| 622 | 137 | 370 | 561 |
| 623 | 98 | 395 | 43 |
| 624 | 439 | 854 | 435 |
| 625 | 401 | 958 | 175 |
| 626 | 499 | 2 | 36 |
| 627 | 124 | 98 | 160 |
| 628 | 754 | 136 | 199 |
| 629 | 21 | 345 | 988 |
| 630 | 255 | 598 | 336 |
| 631 | 695 | 233 | 112 |
| 632 | 129 | 831 | 371 |
| 633 | 126 | 810 | 83 |
| 634 | 61 | 653 | 168 |
| 635 | 491 | 40 | 206 |
| 636 | 551 | 5 | 485 |
| 637 | 124 | 586 | 216 |
| 638 | 99 | 5 | 416 |
| 639 | 889 | 112 | 583 |
| 640 | 924 | 12 | 52 |
| 641 | 18 | 728 | 611 |
| 642 | 354 | 76 | 94 |
| 643 | 336 | 1 | 524 |
| 644 | 354 | 925 | 67 |
| 645 | 338 | 16 | 464 |
| 646 | 132 | 915 | 94 |
| 647 | 60 | 337 | 255 |
| 648 | 127 | 275 | 67 |
| 649 | 651 | 454 | 45 |
| 650 | 124 | 932 | 906 |
| 651 | 191 | 110 | 414 |
| 652 | 839 | 12 | 131 |
| 653 | 733 | 585 | 470 |
| 654 | 476 | 94 | 43 |
| 655 | 104 | 516 | 593 |
| 656 | 78 | 738 | 367 |
| 657 | 44 | 5 | 917 |
| 658 | 199 | 746 | 35 |
| 659 | 127 | 824 | 305 |
| 660 | 49 | 9 | 58 |
| 661 | 928 | 2 | 43 |
| 662 | 612 | 424 | 43 |
| 663 | 43 | 7 | 898 |
| 664 | 81 | 346 | 689 |
| 665 | 99 | 921 | 637 |
| 666 | 6 | 883 | 629 |
| 667 | 478 | 172 | 163 |
| 668 | 5 | 255 | 468 |
| 669 | 18 | 274 | 96 |
| 670 | 880 | 295 | 272 |
| 671 | 10 | 945 | 486 |
| 672 | 633 | 112 | 224 |
| 673 | 437 | 12 | 833 |
| 674 | 66 | 955 | 5 |
| 675 | 624 | 706 | 361 |
| 676 | 400 | 455 | 35 |
| 677 | 6 | 311 | 71 |
| 678 | 376 | 275 | 105 |
| 679 | 647 | 337 | 25 |
| 680 | 37 | 508 | 17 |
| 681 | 171 | 666 | 38 |
| 682 | 354 | 112 | 329 |
| 683 | 158 | 36 | 111 |
| 684 | 193 | 126 | 2 |
| 685 | 838 | 826 | 137 |
| 686 | 470 | 725 | 50 |
| 687 | 599 | 609 | 537 |
| 688 | 124 | 364 | 78 |
| 689 | 727 | 3 | 731 |
| 690 | 338 | 79 | 994 |
| 691 | 124 | 397 | 976 |
| 692 | 822 | 12 | 565 |
| 693 | 756 | 305 | 83 |
| 694 | 919 | 16 | 109 |
| 695 | 370 | 105 | 403 |
| 696 | 7 | 865 | 107 |
| 697 | 733 | 65 | 569 |
| 698 | 331 | 155 | 941 |
| 699 | 46 | 878 | 472 |
| 700 | 765 | 199 | 255 |
| 701 | 59 | 893 | 195 |
| 702 | 50 | 275 | 718 |
| 703 | 599 | 21 | 698 |
| 704 | 191 | 34 | 717 |
| 705 | 55 | 466 | 897 |
| 706 | 722 | 281 | 31 |
| 707 | 508 | 394 | 5 |
| 708 | 81 | 522 | 45 |
| 709 | 513 | 45 | 540 |
| 710 | 981 | 1 | 397 |
| 711 | 466 | 316 | 34 |
| 712 | 12 | 315 | 981 |
| 713 | 217 | 35 | 119 |
| 714 | 102 | 118 | 319 |
| 715 | 5 | 48 | 994 |
| 716 | 60 | 255 | 827 |
| 717 | 86 | 469 | 478 |
| 718 | 297 | 596 | 467 |
| 719 | 508 | 118 | 236 |
| 720 | 532 | 731 | 934 |
| 721 | 56 | 253 | 345 |
| 722 | 741 | 370 | 32 |
| 723 | 167 | 3 | 5 |
| 724 | 801 | 114 | 7 |
| 725 | 887 | 43 | 39 |
| 726 | 336 | 1 | 79 |
| 727 | 482 | 112 | 602 |
| 728 | 872 | 124 | 997 |
| 729 | 10 | 30 | 363 |
| 730 | 43 | 366 | 558 |
| 731 | 901 | 47 | 64 |
| 732 | 4 | 124 | 112 |
| 733 | 401 | 114 | 375 |
| 734 | 945 | 351 | 28 |
| 735 | 108 | 688 | 12 |
| 736 | 27 | 79 | 566 |
| 737 | 413 | 95 | 349 |
| 738 | 115 | 298 | 750 |
| 739 | 5 | 67 | 921 |
| 740 | 59 | 115 | 58 |
| 741 | 956 | 500 | 484 |
| 742 | 3 | 292 | 791 |
| 743 | 338 | 390 | 94 |
| 744 | 71 | 764 | 707 |
| 745 | 319 | 71 | 836 |
| 746 | 897 | 6 | 3 |
| 747 | 687 | 35 | 172 |
| 748 | 700 | 5 | 397 |
| 749 | 34 | 18 | 940 |
| 750 | 45 | 375 | 275 |
| 751 | 10 | 375 | 976 |
| 752 | 163 | 304 | 714 |
| 753 | 986 | 272 | 168 |
| 754 | 96 | 76 | 3 |
| 755 | 446 | 915 | 488 |
| 756 | 45 | 834 | 242 |
| 757 | 693 | 872 | 124 |
| 758 | 11 | 60 | 701 |
| 759 | 10 | 70 | 643 |
| 760 | 45 | 372 | 520 |
| 761 | 768 | 23 | 258 |
| 762 | 831 | 579 | 69 |
| 763 | 36 | 496 | 642 |
| 764 | 632 | 407 | 132 |
| 765 | 411 | 616 | 45 |
| 766 | 323 | 107 | 694 |
| 767 | 43 | 74 | 621 |
| 768 | 840 | 614 | 18 |
| 769 | 18 | 6 | 57 |
| 770 | 360 | 207 | 96 |
| 771 | 115 | 121 | 252 |
| 772 | 756 | 352 | 83 |
| 773 | 133 | 27 | 595 |
| 774 | 464 | 352 | 628 |
| 775 | 346 | 124 | 476 |
| 776 | 578 | 495 | 154 |
| 777 | 599 | 381 | 521 |
| 778 | 193 | 704 | 112 |
| 779 | 551 | 98 | 579 |
| 780 | 112 | 327 | 352 |
| 781 | 474 | 112 | 3 |
| 782 | 1 | 203 | 679 |
| 783 | 349 | 5 | 114 |
| 784 | 897 | 253 | 36 |
| 785 | 676 | 35 | 558 |
| 786 | 344 | 149 | 702 |
| 787 | 233 | 112 | 873 |
| 788 | 873 | 880 | 2 |
| 789 | 12 | 510 | 302 |
| 790 | 12 | 658 | 780 |
| 791 | 401 | 371 | 745 |
| 792 | 12 | 399 | 579 |
| 793 | 85 | 129 | 112 |
| 794 | 155 | 628 | 18 |
| 795 | 324 | 67 | 473 |
| 796 | 301 | 166 | 45 |
| 797 | 127 | 112 | 751 |
| 798 | 356 | 120 | 555 |
| 799 | 66 | 774 | 335 |
| 800 | 112 | 124 | 523 |
| 801 | 282 | 40 | 145 |
| 802 | 459 | 45 | 926 |
| 803 | 145 | 25 | 160 |
| 804 | 160 | 44 | 804 |
| 805 | 680 | 948 | 61 |
| 806 | 197 | 996 | 12 |
| 807 | 147 | 880 | 3 |
| 808 | 713 | 452 | 45 |
| 809 | 899 | 297 | 50 |
| 810 | 124 | 348 | 869 |
| 811 | 848 | 112 | 769 |
| 812 | 599 | 322 | 381 |
| 813 | 126 | 2 | 366 |
| 814 | 69 | 318 | 350 |
| 815 | 409 | 985 | 7 |
| 816 | 255 | 22 | 912 |
| 817 | 476 | 12 | 352 |
| 818 | 363 | 84 | 2 |
| 819 | 544 | 706 | 302 |
| 820 | 157 | 509 | 189 |
| 821 | 175 | 204 | 144 |
| 822 | 551 | 34 | 355 |
| 823 | 484 | 870 | 99 |
| 824 | 32 | 157 | 478 |
| 825 | 17 | 124 | 265 |
| 826 | 79 | 109 | 63 |
| 827 | 30 | 78 | 401 |
| 828 | 93 | 349 | 124 |
| 829 | 437 | 207 | 528 |
| 830 | 131 | 463 | 112 |
| 831 | 743 | 443 | 43 |
| 832 | 948 | 69 | 674 |
| 833 | 446 | 355 | 67 |
| 834 | 521 | 3 | 645 |
| 835 | 156 | 960 | 160 |
| 836 | 128 | 457 | 10 |
| 837 | 97 | 561 | 324 |
| 838 | 69 | 363 | 8 |
| 839 | 169 | 637 | 43 |
| 840 | 433 | 804 | 9 |
| 841 | 834 | 931 | 596 |
| 842 | 2 | 328 | 36 |
| 843 | 137 | 69 | 151 |
| 844 | 132 | 128 | 2 |
| 845 | 176 | 742 | 124 |
| 846 | 427 | 611 | 55 |
| 847 | 51 | 255 | 25 |
| 848 | 428 | 2 | 609 |
| 849 | 381 | 342 | 349 |
| 850 | 520 | 429 | 403 |
| 851 | 132 | 986 | 45 |
| 852 | 155 | 461 | 379 |
| 853 | 96 | 84 | 925 |
| 854 | 382 | 565 | 3 |
| 855 | 533 | 391 | 47 |
| 856 | 626 | 248 | 566 |
| 857 | 124 | 626 | 837 |
| 858 | 481 | 298 | 39 |
| 859 | 256 | 599 | 825 |
| 860 | 795 | 3 | 1 |
| 861 | 198 | 990 | 599 |
| 862 | 32 | 420 | 83 |
| 863 | 116 | 4 | 150 |
| 864 | 2 | 770 | 935 |
| 865 | 515 | 124 | 121 |
| 866 | 212 | 152 | 188 |
| 867 | 842 | 23 | 422 |
| 868 | 373 | 25 | 112 |
| 869 | 510 | 154 | 537 |
| 870 | 569 | 529 | 963 |
| 871 | 386 | 18 | 107 |
| 872 | 41 | 34 | 939 |
| 873 | 34 | 985 | 739 |
| 874 | 112 | 849 | 116 |
| 875 | 398 | 18 | 910 |
| 876 | 353 | 124 | 578 |
| 877 | 283 | 838 | 506 |
| 878 | 342 | 570 | 384 |
| 879 | 88 | 740 | 204 |
| 880 | 897 | 959 | 731 |
| 881 | 473 | 429 | 132 |
| 882 | 154 | 628 | 1000 |
| 883 | 18 | 919 | 935 |
| 884 | 599 | 363 | 788 |
| 885 | 496 | 3 | 553 |
| 886 | 662 | 7 | 63 |
| 887 | 106 | 2 | 181 |
| 888 | 557 | 89 | 21 |
| 889 | 867 | 56 | 804 |
| 890 | 443 | 278 | 112 |
| 891 | 282 | 127 | 164 |
| 892 | 25 | 536 | 242 |
| 893 | 324 | 7 | 74 |
| 894 | 99 | 703 | 115 |
| 895 | 461 | 154 | 45 |
| 896 | 131 | 29 | 86 |
| 897 | 519 | 848 | 112 |
| 898 | 569 | 363 | 157 |
| 899 | 879 | 112 | 800 |
| 900 | 196 | 32 | 349 |
| 901 | 963 | 57 | 854 |
| 902 | 127 | 95 | 222 |
| 903 | 57 | 612 | 271 |
| 904 | 315 | 124 | 283 |
| 905 | 258 | 651 | 352 |
| 906 | 181 | 34 | 739 |
| 907 | 124 | 175 | 544 |
| 908 | 115 | 123 | 85 |
| 909 | 76 | 12 | 70 |
| 910 | 79 | 60 | 362 |
| 911 | 647 | 63 | 79 |
| 912 | 34 | 3 | 332 |
| 913 | 591 | 25 | 782 |
| 914 | 145 | 57 | 94 |
| 915 | 1 | 407 | 342 |
| 916 | 137 | 756 | 304 |
| 917 | 931 | 35 | 366 |
| 918 | 362 | 132 | 255 |
| 919 | 397 | 50 | 288 |
| 920 | 150 | 498 | 175 |
| 921 | 408 | 52 | 16 |
| 922 | 231 | 18 | 470 |
| 923 | 626 | 112 | 555 |
| 924 | 569 | 143 | 255 |
| 925 | 661 | 289 | 68 |
| 926 | 850 | 36 | 304 |
| 927 | 957 | 140 | 401 |
| 928 | 277 | 56 | 21 |
| 929 | 127 | 1 | 394 |
| 930 | 706 | 947 | 67 |
| 931 | 578 | 12 | 115 |
| 932 | 415 | 368 | 32 |
| 933 | 73 | 268 | 151 |
| 934 | 476 | 762 | 12 |
| 935 | 90 | 906 | 431 |
| 936 | 99 | 842 | 877 |
| 937 | 107 | 297 | 490 |
| 938 | 1 | 126 | 12 |
| 939 | 35 | 428 | 464 |
| 940 | 86 | 43 | 846 |
| 941 | 395 | 268 | 248 |
| 942 | 12 | 110 | 474 |
| 943 | 927 | 408 | 282 |
| 944 | 11 | 851 | 282 |
| 945 | 470 | 869 | 167 |
| 946 | 112 | 297 | 330 |
| 947 | 61 | 596 | 282 |
| 948 | 233 | 35 | 841 |
| 949 | 837 | 20 | 599 |
| 950 | 92 | 890 | 112 |
| 951 | 31 | 159 | 8 |
| 952 | 16 | 533 | 371 |
| 953 | 169 | 137 | 675 |
| 954 | 518 | 448 | 271 |
| 955 | 430 | 112 | 721 |
| 956 | 18 | 507 | 409 |
| 957 | 331 | 777 | 846 |
| 958 | 597 | 922 | 195 |
| 959 | 188 | 69 | 60 |
| 960 | 798 | 932 | 559 |
| 961 | 72 | 528 | 94 |
| 962 | 34 | 380 | 706 |
| 963 | 88 | 761 | 409 |
| 964 | 178 | 77 | 275 |
| 965 | 143 | 370 | 574 |
| 966 | 728 | 152 | 192 |
| 967 | 175 | 50 | 854 |
| 968 | 214 | 112 | 29 |
| 969 | 469 | 400 | 2 |
| 970 | 145 | 765 | 108 |
| 971 | 34 | 383 | 3 |
| 972 | 55 | 304 | 144 |
| 973 | 152 | 2 | 51 |
| 974 | 318 | 40 | 45 |
| 975 | 60 | 87 | 397 |
| 976 | 58 | 506 | 836 |
| 977 | 973 | 12 | 57 |
| 978 | 517 | 978 | 52 |
| 979 | 195 | 7 | 722 |
| 980 | 153 | 94 | 647 |
| 981 | 305 | 288 | 569 |
| 982 | 975 | 169 | 192 |
| 983 | 53 | 486 | 47 |
| 984 | 6 | 93 | 605 |
| 985 | 1 | 579 | 448 |
| 986 | 266 | 19 | 79 |
| 987 | 102 | 1000 | 346 |
| 988 | 306 | 702 | 35 |
| 989 | 838 | 470 | 137 |
| 990 | 255 | 29 | 579 |
| 991 | 5 | 99 | 833 |
| 992 | 112 | 14 | 677 |
| 993 | 61 | 124 | 602 |
| 994 | 362 | 137 | 330 |
| 995 | 56 | 31 | 144 |
| 996 | 440 | 19 | 969 |
| 997 | 282 | 35 | 743 |
| 998 | 326 | 78 | 43 |
| 999 | 409 | 168 | 163 |
| 1000 | 112 | 632 | 791 |
| 1001 | 109 | 112 | 582 |
| 1002 | 494 | 150 | 383 |
| 1003 | 662 | 599 | 396 |
| 1004 | 324 | 67 | 167 |
| 1005 | 157 | 822 | 12 |
| 1006 | 488 | 206 | 124 |
| 1007 | 951 | 578 | 182 |
| 1008 | 190 | 89 | 3 |
| 1009 | 32 | 501 | 238 |
| 1010 | 921 | 169 | 927 |
| 1011 | 269 | 118 | 204 |
| 1012 | 136 | 754 | 45 |
| 1013 | 336 | 118 | 485 |
| 1014 | 301 | 83 | 198 |
| 1015 | 371 | 9 | 709 |
| 1016 | 881 | 124 | 178 |
| 1017 | 855 | 2 | 308 |
| 1018 | 458 | 364 | 501 |
| 1019 | 12 | 972 | 760 |
| 1020 | 145 | 627 | 862 |
| 1021 | 56 | 599 | 913 |
| 1022 | 45 | 8 | 109 |
| 1023 | 191 | 181 | 626 |
| 1024 | 971 | 275 | 395 |
| 1025 | 154 | 121 | 810 |
| 1026 | 839 | 18 | 157 |
| 1027 | 98 | 32 | 62 |
| 1028 | 368 | 78 | 43 |
| 1029 | 10 | 461 | 199 |
| 1030 | 45 | 713 | 34 |
| 1031 | 947 | 192 | 342 |
| 1032 | 599 | 1 | 361 |
| 1033 | 878 | 258 | 74 |
| 1034 | 56 | 229 | 6 |
| 1035 | 727 | 38 | 153 |
| 1036 | 822 | 461 | 38 |
| 1037 | 233 | 680 | 17 |
| 1038 | 842 | 361 | 400 |
| 1039 | 19 | 36 | 301 |
| 1040 | 838 | 275 | 154 |
| 1041 | 37 | 811 | 148 |
| 1042 | 35 | 923 | 739 |
| 1043 | 49 | 92 | 201 |
| 1044 | 833 | 112 | 708 |
| 1045 | 98 | 78 | 392 |
| 1046 | 905 | 262 | 153 |
| 1047 | 41 | 638 | 150 |
| 1048 | 108 | 118 | 289 |
| 1049 | 35 | 939 | 87 |
| 1050 | 37 | 244 | 184 |
| 1051 | 473 | 631 | 657 |
| 1052 | 84 | 192 | 320 |
| 1053 | 43 | 151 | 56 |
| 1054 | 605 | 51 | 112 |
| 1055 | 12 | 598 | 635 |
| 1056 | 28 | 505 | 37 |
| 1057 | 255 | 98 | 158 |
| 1058 | 324 | 790 | 137 |
| 1059 | 206 | 368 | 804 |
| 1060 | 32 | 702 | 67 |
| 1061 | 124 | 141 | 29 |
| 1062 | 996 | 124 | 912 |
| 1063 | 410 | 739 | 34 |
| 1064 | 71 | 306 | 25 |
| 1065 | 60 | 186 | 473 |
| 1066 | 338 | 829 | 12 |
| 1067 | 823 | 130 | 112 |
| 1068 | 1 | 938 | 3 |
| 1069 | 56 | 689 | 37 |
| 1070 | 318 | 112 | 165 |
| 1071 | 459 | 599 | 64 |
| 1072 | 838 | 182 | 112 |
| 1073 | 534 | 112 | 130 |
| 1074 | 125 | 455 | 17 |
| 1075 | 57 | 67 | 599 |
| 1076 | 61 | 112 | 402 |
| 1077 | 46 | 956 | 395 |
| 1078 | 419 | 682 | 737 |
| 1079 | 690 | 808 | 105 |
| 1080 | 159 | 84 | 29 |
| 1081 | 12 | 19 | 259 |
| 1082 | 507 | 35 | 588 |
| 1083 | 907 | 175 | 124 |
| 1084 | 626 | 330 | 961 |
| 1085 | 31 | 192 | 24 |
| 1086 | 79 | 66 | 73 |
| 1087 | 800 | 80 | 40 |
| 1088 | 76 | 395 | 124 |
| 1089 | 454 | 852 | 58 |
| 1090 | 447 | 268 | 981 |
| 1091 | 745 | 878 | 338 |
| 1092 | 307 | 132 | 415 |
| 1093 | 61 | 694 | 355 |
| 1094 | 520 | 36 | 187 |
| 1095 | 884 | 198 | 626 |
| 1096 | 118 | 66 | 441 |
| 1097 | 36 | 288 | 546 |
| 1098 | 593 | 5 | 599 |
| 1099 | 203 | 445 | 1 |
| 1100 | 559 | 642 | 175 |
| 1101 | 112 | 1 | 899 |
| 1102 | 195 | 259 | 529 |
| 1103 | 629 | 846 | 2 |
| 1104 | 197 | 35 | 765 |
| 1105 | 908 | 429 | 12 |
| 1106 | 2 | 100 | 765 |
| 1107 | 406 | 537 | 496 |
| 1108 | 587 | 428 | 118 |
| 1109 | 8 | 406 | 320 |
| 1110 | 175 | 18 | 367 |
| 1111 | 910 | 344 | 756 |
| 1112 | 124 | 835 | 163 |
| 1113 | 122 | 617 | 862 |
| 1114 | 112 | 78 | 401 |
| 1115 | 571 | 418 | 7 |
| 1116 | 35 | 803 | 431 |
| 1117 | 637 | 112 | 335 |
| 1118 | 2 | 136 | 795 |
| 1119 | 348 | 45 | 744 |
| 1120 | 124 | 783 | 809 |
| 1121 | 642 | 17 | 819 |
| 1122 | 18 | 595 | 213 |
| 1123 | 105 | 363 | 503 |
| 1124 | 948 | 642 | 12 |
| 1125 | 962 | 944 | 52 |
| 1126 | 131 | 731 | 961 |
| 1127 | 27 | 23 | 368 |
| 1128 | 700 | 268 | 518 |
| 1129 | 578 | 314 | 25 |
| 1130 | 2 | 34 | 642 |
| 1131 | 194 | 39 | 112 |
| 1132 | 658 | 61 | 416 |
| 1133 | 52 | 268 | 613 |
| 1134 | 983 | 483 | 380 |
| 1135 | 107 | 305 | 43 |
| 1136 | 112 | 429 | 681 |
| 1137 | 67 | 747 | 204 |
| 1138 | 2 | 84 | 658 |
| 1139 | 362 | 390 | 470 |
| 1140 | 6 | 452 | 3 |
| 1141 | 120 | 714 | 700 |
| 1142 | 368 | 923 | 604 |
| 1143 | 3 | 87 | 344 |
| 1144 | 1 | 86 | 854 |
| 1145 | 96 | 275 | 682 |
| 1146 | 2 | 813 | 157 |
| 1147 | 416 | 385 | 184 |
| 1148 | 12 | 843 | 535 |
| 1149 | 918 | 5 | 37 |
| 1150 | 545 | 151 | 427 |
| 1151 | 134 | 915 | 36 |
| 1152 | 461 | 12 | 323 |
| 1153 | 707 | 96 | 18 |
| 1154 | 121 | 42 | 513 |
| 1155 | 55 | 125 | 447 |
| 1156 | 78 | 143 | 331 |
| 1157 | 346 | 78 | 163 |
| 1158 | 126 | 377 | 455 |
| 1159 | 753 | 561 | 65 |
| 1160 | 375 | 32 | 560 |
| 1161 | 951 | 141 | 833 |
| 1162 | 132 | 94 | 562 |
| 1163 | 36 | 12 | 565 |
| 1164 | 5 | 648 | 577 |
| 1165 | 323 | 52 | 148 |
| 1166 | 118 | 414 | 866 |
| 1167 | 354 | 25 | 960 |
| 1168 | 283 | 12 | 780 |
| 1169 | 353 | 929 | 38 |
| 1170 | 114 | 85 | 281 |
| 1171 | 626 | 126 | 6 |
| 1172 | 98 | 290 | 642 |
| 1173 | 835 | 13 | 104 |
| 1174 | 184 | 52 | 731 |
| 1175 | 646 | 578 | 69 |
| 1176 | 786 | 599 | 349 |
| 1177 | 719 | 40 | 473 |
| 1178 | 57 | 706 | 408 |
| 1179 | 940 | 190 | 12 |
| 1180 | 282 | 319 | 165 |
| 1181 | 115 | 538 | 99 |
| 1182 | 764 | 873 | 923 |
| 1183 | 349 | 448 | 54 |
| 1184 | 158 | 335 | 134 |
| 1185 | 174 | 82 | 83 |
| 1186 | 561 | 47 | 336 |
| 1187 | 124 | 726 | 18 |
| 1188 | 469 | 57 | 1 |
| 1189 | 14 | 642 | 844 |
| 1190 | 443 | 397 | 12 |
| 1191 | 24 | 73 | 182 |
| 1192 | 124 | 408 | 809 |
| 1193 | 56 | 588 | 800 |
| 1194 | 465 | 58 | 371 |
| 1195 | 34 | 117 | 17 |
| 1196 | 911 | 428 | 3 |
| 1197 | 112 | 137 | 819 |
| 1198 | 248 | 9 | 363 |
| 1199 | 665 | 172 | 35 |
| 1200 | 12 | 645 | 773 |
| 1201 | 473 | 89 | 141 |
| 1202 | 547 | 255 | 271 |
| 1203 | 112 | 175 | 462 |
| 1204 | 212 | 780 | 112 |
| 1205 | 59 | 565 | 36 |
| 1206 | 248 | 400 | 692 |
| 1207 | 121 | 248 | 962 |
| 1208 | 94 | 399 | 268 |
| 1209 | 36 | 458 | 391 |
| 1210 | 865 | 95 | 812 |
| 1211 | 341 | 35 | 535 |
| 1212 | 709 | 588 | 783 |
| 1213 | 19 | 375 | 77 |
| 1214 | 78 | 841 | 345 |
| 1215 | 35 | 464 | 988 |
| 1216 | 612 | 292 | 981 |
| 1217 | 137 | 507 | 71 |
| 1218 | 7 | 778 | 124 |
| 1219 | 323 | 169 | 8 |
| 1220 | 35 | 940 | 663 |
| 1221 | 811 | 124 | 532 |
| 1222 | 381 | 546 | 94 |
| 1223 | 584 | 69 | 38 |
| 1224 | 35 | 44 | 620 |
| 1225 | 378 | 342 | 350 |
| 1226 | 467 | 210 | 206 |
| 1227 | 165 | 603 | 112 |
| 1228 | 926 | 99 | 122 |
| 1229 | 160 | 25 | 605 |
| 1230 | 599 | 44 | 615 |
| 1231 | 253 | 838 | 112 |
| 1232 | 480 | 406 | 18 |
| 1233 | 55 | 108 | 230 |
| 1234 | 418 | 67 | 593 |
| 1235 | 69 | 873 | 363 |
| 1236 | 2 | 89 | 622 |
| 1237 | 600 | 123 | 66 |
| 1238 | 302 | 44 | 890 |
| 1239 | 769 | 381 | 112 |
| 1240 | 7 | 539 | 489 |
| 1241 | 174 | 537 | 12 |
| 1242 | 64 | 140 | 73 |
| 1243 | 83 | 305 | 529 |
| 1244 | 69 | 822 | 363 |
| 1245 | 427 | 45 | 638 |
| 1246 | 99 | 112 | 367 |
| 1247 | 566 | 53 | 660 |
| 1248 | 60 | 484 | 18 |
| 1249 | 1 | 3 | 109 |
| 1250 | 911 | 289 | 12 |
| 1251 | 52 | 1000 | 46 |
| 1252 | 438 | 99 | 133 |
| 1253 | 201 | 82 | 659 |
| 1254 | 61 | 184 | 12 |
| 1255 | 545 | 106 | 24 |
| 1256 | 547 | 882 | 124 |
| 1257 | 56 | 395 | 47 |
| 1258 | 124 | 3 | 837 |
| 1259 | 390 | 308 | 731 |
| 1260 | 124 | 9 | 882 |
| 1261 | 668 | 28 | 149 |
| 1262 | 32 | 3 | 111 |
| 1263 | 889 | 309 | 60 |
| 1264 | 524 | 381 | 124 |
| 1265 | 22 | 897 | 196 |
| 1266 | 40 | 45 | 601 |
| 1267 | 112 | 557 | 556 |
| 1268 | 406 | 85 | 709 |
| 1269 | 379 | 342 | 458 |
| 1270 | 506 | 335 | 164 |
| 1271 | 452 | 131 | 45 |
| 1272 | 668 | 562 | 112 |
| 1273 | 54 | 377 | 743 |
| 1274 | 145 | 112 | 615 |
| 1275 | 12 | 319 | 190 |
| 1276 | 342 | 532 | 50 |
| 1277 | 73 | 155 | 495 |
| 1278 | 764 | 79 | 73 |
| 1279 | 856 | 125 | 112 |
| 1280 | 53 | 308 | 21 |
| 1281 | 324 | 820 | 23 |
| 1282 | 725 | 175 | 642 |
| 1283 | 319 | 112 | 701 |
| 1284 | 122 | 47 | 783 |
| 1285 | 158 | 41 | 21 |
| 1286 | 177 | 124 | 194 |
| 1287 | 854 | 568 | 112 |
| 1288 | 209 | 282 | 755 |
| 1289 | 126 | 302 | 5 |
| 1290 | 497 | 175 | 102 |
| 1291 | 64 | 416 | 174 |
| 1292 | 887 | 405 | 34 |
| 1293 | 365 | 3 | 319 |
| 1294 | 427 | 62 | 291 |
| 1295 | 12 | 707 | 121 |
| 1296 | 752 | 258 | 112 |
| 1297 | 124 | 522 | 93 |
| 1298 | 12 | 438 | 638 |
| 1299 | 124 | 682 | 903 |
| 1300 | 816 | 12 | 827 |
| 1301 | 142 | 306 | 124 |
| 1302 | 158 | 302 | 107 |
| 1303 | 15 | 35 | 166 |
| 1304 | 903 | 275 | 50 |
| 1305 | 551 | 624 | 454 |
| 1306 | 344 | 170 | 958 |
| 1307 | 195 | 168 | 750 |
| 1308 | 66 | 45 | 848 |
| 1309 | 421 | 128 | 55 |
| 1310 | 154 | 17 | 385 |
| 1311 | 84 | 139 | 41 |
| 1312 | 930 | 43 | 435 |
| 1313 | 824 | 25 | 44 |
| 1314 | 2 | 439 | 599 |
| 1315 | 145 | 60 | 395 |
| 1316 | 124 | 496 | 750 |
| 1317 | 94 | 676 | 61 |
| 1318 | 403 | 572 | 2 |
| 1319 | 183 | 196 | 342 |
| 1320 | 421 | 78 | 863 |
| 1321 | 448 | 19 | 125 |
| 1322 | 161 | 861 | 61 |
| 1323 | 85 | 410 | 868 |
| 1324 | 79 | 303 | 195 |
| 1325 | 69 | 390 | 921 |
| 1326 | 575 | 863 | 5 |
| 1327 | 35 | 284 | 50 |
| 1328 | 496 | 594 | 550 |
| 1329 | 553 | 662 | 112 |
| 1330 | 862 | 577 | 61 |
| 1331 | 112 | 214 | 26 |
| 1332 | 241 | 78 | 545 |
| 1333 | 288 | 828 | 1 |
| 1334 | 187 | 192 | 341 |
| 1335 | 629 | 155 | 478 |
| 1336 | 379 | 322 | 49 |
| 1337 | 289 | 38 | 169 |
| 1338 | 85 | 660 | 289 |
| 1339 | 5 | 418 | 170 |
| 1340 | 78 | 395 | 950 |
| 1341 | 18 | 777 | 29 |
| 1342 | 447 | 105 | 115 |
| 1343 | 354 | 455 | 506 |
| 1344 | 484 | 79 | 795 |
| 1345 | 94 | 52 | 405 |
| 1346 | 812 | 703 | 189 |
| 1347 | 12 | 427 | 315 |
| 1348 | 1000 | 41 | 29 |
| 1349 | 195 | 371 | 837 |
| 1350 | 121 | 192 | 583 |
| 1351 | 57 | 411 | 644 |
| 1352 | 302 | 73 | 829 |
| 1353 | 658 | 35 | 712 |
| 1354 | 502 | 124 | 712 |
| 1355 | 360 | 124 | 191 |
| 1356 | 69 | 998 | 23 |
| 1357 | 9 | 124 | 80 |
| 1358 | 794 | 112 | 311 |
| 1359 | 50 | 124 | 747 |
| 1360 | 124 | 604 | 565 |
| 1361 | 536 | 422 | 407 |
| 1362 | 389 | 6 | 12 |
| 1363 | 50 | 22 | 805 |
| 1364 | 69 | 19 | 191 |
| 1365 | 111 | 159 | 372 |
| 1366 | 823 | 49 | 435 |
| 1367 | 83 | 513 | 47 |
| 1368 | 26 | 67 | 473 |
| 1369 | 124 | 19 | 17 |
| 1370 | 607 | 112 | 730 |
| 1371 | 740 | 35 | 163 |
| 1372 | 636 | 668 | 130 |
| 1373 | 624 | 489 | 453 |
| 1374 | 473 | 943 | 312 |
| 1375 | 135 | 391 | 59 |
| 1376 | 690 | 431 | 50 |
| 1377 | 472 | 45 | 371 |
| 1378 | 96 | 124 | 890 |
| 1379 | 731 | 127 | 622 |
| 1380 | 867 | 2 | 46 |
| 1381 | 6 | 942 | 12 |
| 1382 | 256 | 148 | 49 |
| 1383 | 17 | 588 | 141 |
| 1384 | 835 | 399 | 49 |
| 1385 | 376 | 860 | 230 |
| 1386 | 864 | 74 | 10 |
| 1387 | 467 | 531 | 45 |
| 1388 | 50 | 414 | 854 |
| 1389 | 487 | 43 | 457 |
| 1390 | 672 | 49 | 520 |
| 1391 | 205 | 10 | 71 |
| 1392 | 782 | 112 | 584 |
| 1393 | 34 | 6 | 519 |
| 1394 | 543 | 574 | 50 |
| 1395 | 282 | 145 | 120 |
| 1396 | 12 | 57 | 347 |
| 1397 | 272 | 351 | 840 |
| 1398 | 207 | 153 | 429 |
| 1399 | 65 | 110 | 160 |
| 1400 | 227 | 932 | 124 |
| 1401 | 175 | 551 | 312 |
| 1402 | 10 | 513 | 107 |
| 1403 | 248 | 210 | 143 |
| 1404 | 69 | 54 | 355 |
| 1405 | 110 | 577 | 112 |
| 1406 | 755 | 282 | 408 |
| 1407 | 625 | 838 | 879 |
| 1408 | 102 | 154 | 5 |
| 1409 | 938 | 112 | 220 |
| 1410 | 884 | 112 | 81 |
| 1411 | 88 | 256 | 889 |
| 1412 | 133 | 132 | 197 |
| 1413 | 58 | 528 | 954 |
| 1414 | 184 | 684 | 409 |
| 1415 | 811 | 21 | 213 |
| 1416 | 405 | 34 | 833 |
| 1417 | 727 | 79 | 564 |
| 1418 | 862 | 54 | 248 |
| 1419 | 95 | 773 | 112 |
| 1420 | 199 | 100 | 35 |
| 1421 | 7 | 418 | 63 |
| 1422 | 110 | 558 | 194 |
| 1423 | 496 | 314 | 154 |
| 1424 | 37 | 3 | 938 |
| 1425 | 81 | 28 | 439 |
| 1426 | 114 | 49 | 134 |
| 1427 | 199 | 39 | 575 |
| 1428 | 470 | 589 | 25 |
| 1429 | 43 | 307 | 318 |
| 1430 | 589 | 124 | 132 |
| 1431 | 74 | 533 | 865 |
| 1432 | 125 | 213 | 275 |
| 1433 | 421 | 342 | 510 |
| 1434 | 124 | 175 | 669 |
| 1435 | 78 | 60 | 859 |
| 1436 | 300 | 883 | 2 |
| 1437 | 139 | 405 | 47 |
| 1438 | 358 | 198 | 47 |
| 1439 | 865 | 55 | 416 |
| 1440 | 539 | 37 | 529 |
| 1441 | 758 | 22 | 195 |
| 1442 | 125 | 553 | 39 |
| 1443 | 206 | 569 | 78 |
| 1444 | 375 | 139 | 171 |
| 1445 | 69 | 52 | 716 |
| 1446 | 625 | 263 | 35 |
| 1447 | 395 | 279 | 459 |
| 1448 | 45 | 102 | 29 |
| 1449 | 69 | 66 | 802 |
| 1450 | 844 | 3 | 112 |
| 1451 | 438 | 22 | 45 |
| 1452 | 709 | 658 | 604 |
| 1453 | 588 | 58 | 943 |
| 1454 | 867 | 575 | 12 |
| 1455 | 145 | 826 | 94 |
| 1456 | 120 | 19 | 186 |
| 1457 | 421 | 2 | 152 |
| 1458 | 545 | 10 | 38 |
| 1459 | 275 | 231 | 35 |
| 1460 | 483 | 634 | 556 |
| 1461 | 255 | 844 | 95 |
| 1462 | 468 | 5 | 24 |
| 1463 | 88 | 13 | 124 |
| 1464 | 863 | 66 | 28 |
| 1465 | 259 | 152 | 145 |
| 1466 | 596 | 839 | 12 |
| 1467 | 110 | 149 | 980 |
| 1468 | 672 | 43 | 558 |
| 1469 | 199 | 23 | 36 |
| 1470 | 895 | 18 | 378 |
| 1471 | 555 | 345 | 56 |
| 1472 | 316 | 662 | 47 |
| 1473 | 69 | 481 | 647 |
| 1474 | 290 | 272 | 627 |
| 1475 | 124 | 96 | 500 |
| 1476 | 34 | 134 | 558 |
| 1477 | 24 | 379 | 940 |
| 1478 | 272 | 780 | 7 |
| 1479 | 779 | 112 | 823 |
| 1480 | 45 | 185 | 124 |
| 1481 | 88 | 158 | 351 |
| 1482 | 387 | 56 | 867 |
| 1483 | 35 | 84 | 939 |
| 1484 | 1 | 599 | 597 |
| 1485 | 1 | 995 | 383 |
| 1486 | 295 | 112 | 130 |
| 1487 | 12 | 198 | 326 |
| 1488 | 71 | 563 | 802 |
| 1489 | 585 | 1 | 642 |
| 1490 | 331 | 259 | 22 |
| 1491 | 66 | 467 | 367 |
| 1492 | 304 | 145 | 907 |
| 1493 | 990 | 26 | 839 |
| 1494 | 744 | 34 | 808 |
| 1495 | 969 | 271 | 3 |
| 1496 | 809 | 12 | 544 |
| 1497 | 566 | 974 | 395 |
| 1498 | 738 | 2 | 18 |
| 1499 | 12 | 758 | 133 |
| 1500 | 643 | 124 | 127 |
| 1501 | 292 | 644 | 73 |
| 1502 | 82 | 339 | 71 |
| 1503 | 85 | 288 | 44 |
| 1504 | 144 | 49 | 146 |
| 1505 | 318 | 2 | 91 |
| 1506 | 45 | 1 | 621 |
| 1507 | 12 | 770 | 537 |
| 1508 | 636 | 31 | 731 |
| 1509 | 112 | 5 | 490 |
| 1510 | 709 | 5 | 6 |
| 1511 | 673 | 12 | 874 |
| 1512 | 61 | 160 | 150 |
| 1513 | 878 | 327 | 985 |
| 1514 | 884 | 980 | 112 |
| 1515 | 362 | 104 | 360 |
| 1516 | 132 | 585 | 94 |
| 1517 | 164 | 609 | 124 |
| 1518 | 887 | 615 | 401 |
| 1519 | 604 | 124 | 935 |
| 1520 | 12 | 37 | 991 |
| 1521 | 37 | 656 | 2 |
| 1522 | 118 | 274 | 472 |
| 1523 | 179 | 710 | 124 |
| 1524 | 176 | 564 | 22 |
| 1525 | 126 | 351 | 593 |
| 1526 | 5 | 514 | 62 |
| 1527 | 520 | 566 | 53 |
| 1528 | 599 | 57 | 667 |
| 1529 | 980 | 118 | 715 |
| 1530 | 110 | 320 | 81 |
| 1531 | 464 | 35 | 931 |
| 1532 | 21 | 45 | 526 |
| 1533 | 558 | 127 | 43 |
| 1534 | 925 | 87 | 137 |
| 1535 | 987 | 330 | 38 |
| 1536 | 315 | 230 | 24 |
| 1537 | 764 | 673 | 605 |
| 1538 | 465 | 88 | 400 |
| 1539 | 112 | 640 | 322 |
| 1540 | 112 | 17 | 29 |
| 1541 | 382 | 25 | 344 |
| 1542 | 481 | 628 | 169 |
| 1543 | 551 | 112 | 372 |
| 1544 | 319 | 45 | 977 |
| 1545 | 18 | 914 | 312 |
| 1546 | 294 | 25 | 591 |
| 1547 | 804 | 738 | 546 |
| 1548 | 778 | 563 | 112 |
| 1549 | 40 | 159 | 518 |
| 1550 | 631 | 19 | 496 |
| 1551 | 853 | 32 | 59 |
| 1552 | 3 | 153 | 709 |
| 1553 | 192 | 392 | 118 |
| 1554 | 992 | 51 | 112 |
| 1555 | 391 | 25 | 316 |
| 1556 | 348 | 223 | 112 |
| 1557 | 605 | 566 | 460 |
| 1558 | 141 | 548 | 778 |
| 1559 | 149 | 676 | 55 |
| 1560 | 633 | 112 | 43 |
| 1561 | 36 | 350 | 709 |
| 1562 | 90 | 180 | 61 |
| 1563 | 58 | 363 | 334 |
| 1564 | 272 | 551 | 175 |
| 1565 | 660 | 61 | 323 |
| 1566 | 264 | 456 | 582 |
| 1567 | 399 | 344 | 121 |
| 1568 | 118 | 107 | 37 |
| 1569 | 965 | 112 | 63 |
| 1570 | 672 | 351 | 57 |
| 1571 | 781 | 79 | 164 |
| 1572 | 118 | 220 | 204 |
| 1573 | 379 | 304 | 440 |
| 1574 | 58 | 81 | 662 |
| 1575 | 71 | 76 | 951 |
| 1576 | 583 | 627 | 533 |
| 1577 | 51 | 70 | 32 |
| 1578 | 117 | 814 | 118 |
| 1579 | 314 | 362 | 7 |
| 1580 | 248 | 36 | 28 |
| 1581 | 653 | 45 | 96 |
| 1582 | 764 | 264 | 152 |
| 1583 | 63 | 56 | 706 |
| 1584 | 130 | 112 | 240 |
| 1585 | 775 | 112 | 983 |
| 1586 | 16 | 145 | 960 |
| 1587 | 820 | 921 | 10 |
| 1588 | 860 | 258 | 58 |
| 1589 | 143 | 12 | 569 |
| 1590 | 6 | 821 | 3 |
| 1591 | 421 | 255 | 11 |
| 1592 | 124 | 586 | 217 |
| 1593 | 755 | 520 | 357 |
| 1594 | 745 | 130 | 19 |
| 1595 | 428 | 70 | 168 |
| 1596 | 406 | 7 | 925 |
| 1597 | 767 | 801 | 2 |
| 1598 | 112 | 421 | 165 |
| 1599 | 185 | 55 | 446 |
| 1600 | 83 | 589 | 427 |
| 1601 | 67 | 118 | 230 |
| 1602 | 90 | 159 | 112 |
| 1603 | 37 | 134 | 478 |
| 1604 | 112 | 499 | 969 |
| 1605 | 447 | 315 | 124 |
| 1606 | 21 | 10 | 889 |
| 1607 | 873 | 5 | 606 |
| 1608 | 58 | 546 | 62 |
| 1609 | 357 | 464 | 61 |
| 1610 | 172 | 979 | 397 |
| 1611 | 398 | 268 | 673 |
| 1612 | 498 | 112 | 545 |
| 1613 | 864 | 36 | 248 |
| 1614 | 527 | 11 | 143 |
| 1615 | 338 | 87 | 66 |
| 1616 | 58 | 514 | 790 |
| 1617 | 444 | 85 | 112 |
| 1618 | 16 | 325 | 371 |
| 1619 | 546 | 169 | 533 |
| 1620 | 303 | 19 | 324 |
| 1621 | 543 | 122 | 153 |
| 1622 | 93 | 9 | 18 |
| 1623 | 78 | 30 | 304 |
| 1624 | 85 | 599 | 251 |
| 1625 | 346 | 115 | 894 |
| 1626 | 936 | 112 | 566 |
| 1627 | 3 | 122 | 8 |
| 1628 | 446 | 178 | 112 |
| 1629 | 115 | 64 | 176 |
| 1630 | 987 | 543 | 1 |
| 1631 | 312 | 714 | 974 |
| 1632 | 8 | 122 | 1000 |
| 1633 | 363 | 171 | 197 |
| 1634 | 629 | 10 | 385 |
| 1635 | 22 | 58 | 788 |
| 1636 | 363 | 473 | 295 |
| 1637 | 735 | 90 | 416 |
| 1638 | 275 | 2 | 12 |
| 1639 | 267 | 56 | 907 |
| 1640 | 968 | 112 | 651 |
| 1641 | 502 | 597 | 44 |
| 1642 | 124 | 163 | 296 |
| 1643 | 34 | 647 | 58 |
| 1644 | 39 | 367 | 144 |
| 1645 | 282 | 121 | 300 |
| 1646 | 416 | 293 | 139 |
| 1647 | 340 | 112 | 523 |
| 1648 | 983 | 336 | 1 |
| 1649 | 408 | 82 | 47 |
| 1650 | 603 | 147 | 79 |
| 1651 | 198 | 319 | 599 |
| 1652 | 121 | 248 | 189 |
| 1653 | 363 | 109 | 970 |
| 1654 | 98 | 551 | 817 |
| 1655 | 16 | 71 | 643 |
| 1656 | 636 | 12 | 451 |
| 1657 | 8 | 791 | 203 |
| 1658 | 124 | 413 | 514 |
| 1659 | 372 | 363 | 925 |
| 1660 | 58 | 85 | 397 |
| 1661 | 268 | 366 | 72 |
| 1662 | 332 | 112 | 136 |
| 1663 | 292 | 732 | 121 |
| 1664 | 12 | 961 | 876 |
| 1665 | 359 | 56 | 1000 |
| 1666 | 389 | 12 | 427 |
| 1667 | 38 | 587 | 460 |
| 1668 | 532 | 771 | 124 |
| 1669 | 925 | 900 | 67 |
| 1670 | 349 | 673 | 67 |
| 1671 | 58 | 302 | 595 |
| 1672 | 44 | 208 | 35 |
| 1673 | 76 | 329 | 72 |
| 1674 | 406 | 351 | 841 |
| 1675 | 60 | 86 | 588 |
| 1676 | 105 | 45 | 440 |
| 1677 | 315 | 189 | 765 |
| 1678 | 249 | 16 | 316 |
| 1679 | 45 | 169 | 509 |
| 1680 | 893 | 65 | 611 |
| 1681 | 628 | 752 | 473 |
| 1682 | 847 | 726 | 57 |
| 1683 | 21 | 810 | 47 |
| 1684 | 962 | 63 | 908 |
| 1685 | 846 | 45 | 481 |
| 1686 | 643 | 754 | 16 |
| 1687 | 124 | 576 | 221 |
| 1688 | 493 | 39 | 33 |
| 1689 | 816 | 637 | 12 |
| 1690 | 876 | 72 | 37 |
| 1691 | 855 | 81 | 712 |
| 1692 | 188 | 506 | 948 |
| 1693 | 31 | 289 | 324 |
| 1694 | 830 | 12 | 6 |
| 1695 | 215 | 100 | 35 |
| 1696 | 2 | 159 | 24 |
| 1697 | 124 | 199 | 300 |
| 1698 | 8 | 459 | 324 |
| 1699 | 66 | 622 | 45 |
| 1700 | 688 | 18 | 71 |
| 1701 | 34 | 560 | 864 |
| 1702 | 8 | 289 | 871 |
| 1703 | 35 | 413 | 257 |
| 1704 | 372 | 133 | 813 |
| 1705 | 49 | 124 | 210 |
| 1706 | 172 | 35 | 241 |
| 1707 | 621 | 349 | 258 |
| 1708 | 60 | 628 | 66 |
| 1709 | 352 | 30 | 644 |
| 1710 | 64 | 32 | 530 |
| 1711 | 452 | 829 | 289 |
| 1712 | 637 | 667 | 112 |
| 1713 | 858 | 268 | 640 |
| 1714 | 3 | 873 | 17 |
| 1715 | 124 | 51 | 788 |
| 1716 | 18 | 671 | 378 |
| 1717 | 206 | 205 | 873 |
| 1718 | 915 | 869 | 626 |
| 1719 | 798 | 847 | 61 |
| 1720 | 859 | 112 | 492 |
| 1721 | 18 | 116 | 416 |
| 1722 | 385 | 35 | 873 |
| 1723 | 112 | 153 | 74 |
| 1724 | 110 | 112 | 88 |
| 1725 | 880 | 439 | 92 |
| 1726 | 112 | 548 | 898 |
| 1727 | 3 | 973 | 8 |
| 1728 | 355 | 26 | 578 |
| 1729 | 49 | 207 | 83 |
| 1730 | 58 | 785 | 18 |
| 1731 | 179 | 132 | 599 |
| 1732 | 998 | 35 | 195 |
| 1733 | 22 | 756 | 925 |
| 1734 | 47 | 316 | 63 |
| 1735 | 90 | 89 | 149 |
| 1736 | 12 | 84 | 49 |
| 1737 | 605 | 77 | 112 |
| 1738 | 12 | 465 | 292 |
| 1739 | 179 | 49 | 447 |
| 1740 | 923 | 112 | 833 |
| 1741 | 668 | 76 | 3 |
| 1742 | 111 | 502 | 262 |
| 1743 | 543 | 289 | 9 |
| 1744 | 20 | 440 | 8 |
| 1745 | 577 | 58 | 25 |
| 1746 | 145 | 210 | 760 |
| 1747 | 191 | 591 | 25 |
| 1748 | 6 | 363 | 57 |
| 1749 | 83 | 199 | 54 |
| 1750 | 154 | 977 | 865 |
| 1751 | 25 | 355 | 7 |
| 1752 | 529 | 52 | 722 |
| 1753 | 90 | 50 | 325 |
| 1754 | 57 | 87 | 318 |
| 1755 | 69 | 55 | 355 |
| 1756 | 570 | 58 | 54 |
| 1757 | 651 | 81 | 429 |
| 1758 | 26 | 660 | 566 |
| 1759 | 19 | 476 | 36 |
| 1760 | 460 | 4 | 204 |
| 1761 | 661 | 12 | 90 |
| 1762 | 660 | 964 | 112 |
| 1763 | 95 | 28 | 25 |
| 1764 | 389 | 12 | 224 |
| 1765 | 372 | 18 | 835 |
| 1766 | 519 | 2 | 22 |
| 1767 | 71 | 108 | 316 |
| 1768 | 804 | 812 | 160 |
| 1769 | 37 | 23 | 950 |
| 1770 | 282 | 350 | 159 |
| 1771 | 2 | 9 | 971 |
| 1772 | 951 | 34 | 505 |
| 1773 | 44 | 122 | 16 |
| 1774 | 37 | 12 | 810 |
| 1775 | 403 | 266 | 124 |
| 1776 | 107 | 483 | 709 |
| 1777 | 362 | 564 | 2 |
| 1778 | 702 | 381 | 837 |
| 1779 | 15 | 379 | 508 |
| 1780 | 361 | 12 | 686 |
| 1781 | 295 | 112 | 916 |
| 1782 | 192 | 342 | 279 |
| 1783 | 149 | 889 | 99 |
| 1784 | 347 | 24 | 186 |
| 1785 | 658 | 22 | 488 |
| 1786 | 708 | 60 | 764 |
| 1787 | 404 | 369 | 34 |
| 1788 | 100 | 749 | 948 |
| 1789 | 43 | 252 | 268 |
| 1790 | 34 | 369 | 883 |
| 1791 | 23 | 621 | 114 |
| 1792 | 155 | 827 | 395 |
| 1793 | 66 | 295 | 27 |
| 1794 | 873 | 197 | 61 |
| 1795 | 58 | 566 | 494 |
| 1796 | 74 | 124 | 957 |
| 1797 | 36 | 544 | 50 |
| 1798 | 2 | 112 | 323 |
| 1799 | 61 | 18 | 27 |
| 1800 | 48 | 947 | 275 |
| 1801 | 23 | 185 | 666 |
| 1802 | 169 | 275 | 617 |
| 1803 | 412 | 97 | 21 |
| 1804 | 589 | 45 | 873 |
| 1805 | 566 | 32 | 605 |
| 1806 | 152 | 283 | 621 |
| 1807 | 499 | 111 | 34 |
| 1808 | 496 | 513 | 3 |
| 1809 | 385 | 130 | 470 |
| 1810 | 197 | 533 | 9 |
| 1811 | 12 | 895 | 7 |
| 1812 | 92 | 827 | 159 |
| 1813 | 182 | 201 | 18 |
| 1814 | 112 | 314 | 787 |
| 1815 | 47 | 2 | 214 |
| 1816 | 145 | 102 | 124 |
| 1817 | 399 | 644 | 19 |
| 1818 | 493 | 121 | 55 |
| 1819 | 132 | 203 | 54 |
| 1820 | 169 | 145 | 505 |
| 1821 | 40 | 102 | 659 |
| 1822 | 446 | 2 | 187 |
| 1823 | 819 | 112 | 507 |
| 1824 | 169 | 145 | 711 |
| 1825 | 145 | 401 | 856 |
| 1826 | 47 | 90 | 141 |
| 1827 | 92 | 189 | 43 |
| 1828 | 921 | 8 | 88 |
| 1829 | 74 | 105 | 278 |
| 1830 | 54 | 231 | 731 |
| 1831 | 177 | 943 | 124 |
| 1832 | 124 | 207 | 263 |
| 1833 | 505 | 213 | 124 |
| 1834 | 834 | 599 | 120 |
| 1835 | 80 | 38 | 78 |
| 1836 | 78 | 366 | 868 |
| 1837 | 48 | 104 | 130 |
| 1838 | 303 | 163 | 4 |
| 1839 | 596 | 541 | 124 |
| 1840 | 599 | 889 | 1 |
| 1841 | 981 | 35 | 26 |
| 1842 | 104 | 83 | 906 |
| 1843 | 349 | 701 | 54 |
| 1844 | 662 | 112 | 472 |
| 1845 | 12 | 422 | 53 |
| 1846 | 342 | 102 | 2 |
| 1847 | 651 | 112 | 431 |
| 1848 | 23 | 346 | 10 |
| 1849 | 5 | 892 | 8 |
| 1850 | 886 | 118 | 724 |
| 1851 | 45 | 248 | 996 |
| 1852 | 875 | 65 | 542 |
| 1853 | 357 | 566 | 355 |
| 1854 | 111 | 10 | 617 |
| 1855 | 69 | 248 | 518 |
| 1856 | 577 | 898 | 32 |
| 1857 | 594 | 719 | 18 |
| 1858 | 820 | 940 | 137 |
| 1859 | 566 | 319 | 395 |
| 1860 | 169 | 572 | 60 |
| 1861 | 149 | 56 | 521 |
| 1862 | 18 | 181 | 134 |
| 1863 | 760 | 124 | 316 |
| 1864 | 43 | 53 | 102 |
| 1865 | 473 | 309 | 67 |
| 1866 | 554 | 35 | 298 |
| 1867 | 375 | 12 | 501 |
| 1868 | 37 | 314 | 566 |
| 1869 | 357 | 81 | 12 |
| 1870 | 33 | 909 | 112 |
| 1871 | 112 | 346 | 403 |
| 1872 | 750 | 149 | 478 |
| 1873 | 36 | 218 | 76 |
| 1874 | 112 | 3 | 864 |
| 1875 | 440 | 50 | 708 |
| 1876 | 65 | 401 | 166 |
| 1877 | 376 | 124 | 454 |
| 1878 | 473 | 5 | 33 |
| 1879 | 5 | 7 | 400 |
| 1880 | 133 | 372 | 1000 |
| 1881 | 21 | 940 | 72 |
| 1882 | 344 | 227 | 50 |
| 1883 | 888 | 282 | 196 |
| 1884 | 269 | 842 | 118 |
| 1885 | 745 | 99 | 609 |
| 1886 | 626 | 380 | 536 |
| 1887 | 848 | 135 | 929 |
| 1888 | 633 | 112 | 915 |
| 1889 | 35 | 400 | 298 |
| 1890 | 627 | 642 | 162 |
| 1891 | 21 | 124 | 961 |
| 1892 | 18 | 749 | 788 |
| 1893 | 60 | 901 | 203 |
| 1894 | 131 | 559 | 79 |
| 1895 | 241 | 145 | 2 |
| 1896 | 838 | 811 | 395 |
| 1897 | 740 | 817 | 189 |
| 1898 | 537 | 401 | 10 |
| 1899 | 846 | 331 | 137 |
| 1900 | 373 | 941 | 731 |
| 1901 | 5 | 99 | 913 |
| 1902 | 548 | 446 | 34 |
| 1903 | 18 | 626 | 356 |
| 1904 | 810 | 817 | 585 |
| 1905 | 78 | 52 | 366 |
| 1906 | 12 | 399 | 694 |
| 1907 | 588 | 177 | 35 |
| 1908 | 169 | 154 | 54 |
| 1909 | 148 | 440 | 377 |
| 1910 | 3 | 440 | 40 |
| 1911 | 716 | 187 | 282 |
| 1912 | 34 | 516 | 342 |
| 1913 | 112 | 191 | 275 |
| 1914 | 994 | 78 | 716 |
| 1915 | 551 | 118 | 604 |
| 1916 | 501 | 42 | 696 |
| 1917 | 2 | 628 | 574 |
| 1918 | 916 | 35 | 401 |
| 1919 | 420 | 354 | 804 |
| 1920 | 756 | 889 | 133 |
| 1921 | 908 | 458 | 47 |
| 1922 | 442 | 562 | 21 |
| 1923 | 212 | 66 | 124 |
| 1924 | 134 | 10 | 58 |
| 1925 | 302 | 995 | 12 |
| 1926 | 371 | 473 | 416 |
| 1927 | 61 | 520 | 301 |
| 1928 | 342 | 503 | 604 |
| 1929 | 244 | 347 | 21 |
| 1930 | 231 | 533 | 329 |
| 1931 | 376 | 627 | 662 |
| 1932 | 500 | 129 | 745 |
| 1933 | 178 | 868 | 91 |
| 1934 | 800 | 268 | 1 |
| 1935 | 35 | 767 | 193 |
| 1936 | 3 | 178 | 654 |
| 1937 | 965 | 248 | 12 |
| 1938 | 229 | 825 | 295 |
| 1939 | 968 | 112 | 352 |
| 1940 | 359 | 766 | 395 |
| 1941 | 289 | 94 | 100 |
| 1942 | 194 | 427 | 6 |
| 1943 | 47 | 465 | 324 |
| 1944 | 86 | 124 | 791 |
| 1945 | 164 | 340 | 159 |
| 1946 | 360 | 29 | 48 |
| 1947 | 709 | 61 | 126 |
| 1948 | 275 | 780 | 50 |
| 1949 | 37 | 864 | 440 |
| 1950 | 61 | 442 | 124 |
| 1951 | 178 | 1 | 652 |
| 1952 | 157 | 55 | 124 |
| 1953 | 810 | 100 | 50 |
| 1954 | 283 | 12 | 7 |
| 1955 | 539 | 25 | 426 |
| 1956 | 740 | 112 | 18 |
| 1957 | 12 | 57 | 358 |
| 1958 | 601 | 536 | 58 |
| 1959 | 419 | 75 | 1 |
| 1960 | 95 | 125 | 708 |
| 1961 | 841 | 309 | 124 |
| 1962 | 112 | 961 | 196 |
| 1963 | 631 | 358 | 12 |
| 1964 | 443 | 727 | 136 |
| 1965 | 32 | 266 | 10 |
| 1966 | 459 | 282 | 862 |
| 1967 | 36 | 447 | 496 |
| 1968 | 112 | 534 | 539 |
| 1969 | 642 | 345 | 215 |
| 1970 | 994 | 78 | 73 |
| 1971 | 431 | 316 | 112 |
| 1972 | 83 | 1 | 255 |
| 1973 | 342 | 302 | 274 |
| 1974 | 18 | 704 | 791 |
| 1975 | 70 | 642 | 2 |
| 1976 | 743 | 67 | 66 |
| 1977 | 6 | 112 | 793 |
| 1978 | 21 | 185 | 685 |
| 1979 | 132 | 124 | 39 |
| 1980 | 585 | 351 | 22 |
| 1981 | 20 | 6 | 55 |
| 1982 | 342 | 381 | 102 |
| 1983 | 943 | 112 | 40 |
| 1984 | 137 | 121 | 248 |
| 1985 | 354 | 944 | 81 |
| 1986 | 324 | 78 | 392 |
| 1987 | 912 | 920 | 35 |
| 1988 | 203 | 637 | 98 |
| 1989 | 45 | 70 | 219 |
| 1990 | 12 | 924 | 19 |
| 1991 | 134 | 136 | 127 |
| 1992 | 207 | 168 | 32 |
| 1993 | 158 | 403 | 760 |
| 1994 | 92 | 951 | 84 |
| 1995 | 60 | 69 | 270 |
| 1996 | 459 | 608 | 112 |
| 1997 | 10 | 518 | 159 |
| 1998 | 2 | 395 | 276 |
| 1999 | 60 | 240 | 124 |
| 2000 | 83 | 45 | 594 |
| 2001 | 120 | 990 | 12 |
| 2002 | 434 | 569 | 65 |
| 2003 | 462 | 124 | 54 |
| 2004 | 35 | 862 | 576 |
| 2005 | 162 | 910 | 5 |
| 2006 | 127 | 865 | 444 |
| 2007 | 46 | 159 | 152 |
| 2008 | 52 | 88 | 386 |
| 2009 | 75 | 711 | 1 |
| 2010 | 12 | 758 | 17 |
| 2011 | 58 | 18 | 53 |
| 2012 | 339 | 83 | 878 |
| 2013 | 634 | 196 | 664 |
| 2014 | 262 | 755 | 925 |
| 2015 | 137 | 324 | 812 |
| 2016 | 920 | 145 | 915 |
| 2017 | 485 | 484 | 124 |
| 2018 | 12 | 711 | 21 |
| 2019 | 619 | 358 | 411 |
| 2020 | 271 | 1 | 390 |
| 2021 | 467 | 446 | 129 |
| 2022 | 667 | 12 | 536 |
| 2023 | 308 | 797 | 35 |
| 2024 | 731 | 282 | 384 |
| 2025 | 546 | 1000 | 83 |
| 2026 | 717 | 61 | 17 |
| 2027 | 794 | 35 | 282 |
| 2028 | 267 | 175 | 38 |
| 2029 | 95 | 118 | 611 |
| 2030 | 403 | 636 | 112 |
| 2031 | 197 | 88 | 47 |
| 2032 | 501 | 259 | 12 |
| 2033 | 864 | 43 | 613 |
| 2034 | 37 | 677 | 36 |
| 2035 | 21 | 706 | 19 |
| 2036 | 761 | 725 | 3 |
| 2037 | 707 | 316 | 510 |
| 2038 | 79 | 238 | 112 |
| 2039 | 271 | 124 | 720 |
| 2040 | 168 | 631 | 56 |
| 2041 | 878 | 124 | 614 |
| 2042 | 39 | 281 | 454 |
| 2043 | 621 | 389 | 47 |
| 2044 | 19 | 185 | 1 |
| 2045 | 878 | 58 | 2 |
| 2046 | 548 | 713 | 112 |
| 2047 | 78 | 285 | 160 |
| 2048 | 35 | 711 | 530 |
| 2049 | 739 | 71 | 156 |
| 2050 | 970 | 550 | 55 |
| 2051 | 551 | 178 | 345 |
| 2052 | 60 | 121 | 838 |
| 2053 | 196 | 599 | 942 |
| 2054 | 899 | 946 | 45 |
| 2055 | 614 | 12 | 946 |
| 2056 | 330 | 513 | 149 |
| 2057 | 673 | 543 | 2 |
| 2058 | 6 | 776 | 197 |
| 2059 | 642 | 101 | 506 |
| 2060 | 361 | 400 | 107 |
| 2061 | 362 | 387 | 872 |
| 2062 | 371 | 601 | 112 |
| 2063 | 135 | 69 | 459 |
| 2064 | 34 | 185 | 45 |
| 2065 | 124 | 473 | 291 |
| 2066 | 36 | 848 | 315 |
| 2067 | 731 | 459 | 581 |
| 2068 | 292 | 674 | 756 |
| 2069 | 124 | 382 | 98 |
| 2070 | 12 | 324 | 750 |
| 2071 | 69 | 132 | 181 |
| 2072 | 769 | 55 | 897 |
| 2073 | 47 | 133 | 30 |
| 2074 | 133 | 50 | 85 |
| 2075 | 972 | 96 | 344 |
| 2076 | 43 | 112 | 963 |
| 2077 | 690 | 19 | 472 |
| 2078 | 508 | 132 | 756 |
| 2079 | 883 | 38 | 6 |
| 2080 | 680 | 231 | 17 |
| 2081 | 40 | 354 | 272 |
| 2082 | 268 | 727 | 191 |
| 2083 | 863 | 124 | 83 |
| 2084 | 32 | 666 | 297 |
| 2085 | 795 | 58 | 266 |
| 2086 | 565 | 51 | 69 |
| 2087 | 66 | 408 | 200 |
| 2088 | 112 | 898 | 588 |
| 2089 | 106 | 45 | 64 |
| 2090 | 1 | 802 | 154 |
| 2091 | 459 | 773 | 16 |
| 2092 | 735 | 36 | 124 |
| 2093 | 61 | 356 | 391 |
| 2094 | 256 | 19 | 290 |
| 2095 | 469 | 152 | 561 |
| 2096 | 531 | 548 | 31 |
| 2097 | 18 | 31 | 380 |
| 2098 | 120 | 3 | 69 |
| 2099 | 855 | 12 | 542 |
| 2100 | 479 | 606 | 115 |
| 2101 | 205 | 124 | 33 |
| 2102 | 916 | 19 | 732 |
| 2103 | 953 | 124 | 864 |
| 2104 | 148 | 483 | 67 |
| 2105 | 7 | 322 | 43 |
| 2106 | 414 | 350 | 12 |
| 2107 | 112 | 683 | 133 |
| 2108 | 29 | 457 | 10 |
| 2109 | 868 | 45 | 842 |
| 2110 | 461 | 862 | 890 |
| 2111 | 50 | 659 | 137 |
| 2112 | 25 | 297 | 117 |
| 2113 | 321 | 320 | 78 |
| 2114 | 906 | 603 | 112 |
| 2115 | 64 | 89 | 835 |
| 2116 | 994 | 65 | 467 |
| 2117 | 34 | 38 | 90 |
| 2118 | 560 | 244 | 1 |
| 2119 | 192 | 6 | 885 |
| 2120 | 45 | 596 | 638 |
| 2121 | 489 | 569 | 647 |
| 2122 | 438 | 467 | 124 |
| 2123 | 492 | 483 | 352 |
| 2124 | 112 | 457 | 155 |
| 2125 | 50 | 10 | 414 |
| 2126 | 593 | 12 | 248 |
| 2127 | 9 | 726 | 917 |
| 2128 | 873 | 95 | 609 |
| 2129 | 114 | 20 | 506 |
| 2130 | 118 | 116 | 21 |
| 2131 | 78 | 595 | 771 |
| 2132 | 112 | 907 | 5 |
| 2133 | 969 | 323 | 685 |
| 2134 | 866 | 94 | 684 |
| 2135 | 586 | 112 | 602 |
| 2136 | 35 | 807 | 443 |
| 2137 | 1 | 721 | 342 |
| 2138 | 455 | 103 | 43 |
| 2139 | 110 | 268 | 406 |
| 2140 | 431 | 45 | 505 |
| 2141 | 18 | 473 | 585 |
| 2142 | 13 | 531 | 12 |
| 2143 | 21 | 673 | 792 |
| 2144 | 63 | 34 | 130 |
| 2145 | 83 | 12 | 500 |
| 2146 | 381 | 551 | 275 |
| 2147 | 35 | 452 | 6 |
| 2148 | 508 | 112 | 863 |
| 2149 | 49 | 160 | 373 |
| 2150 | 435 | 73 | 24 |
| 2151 | 380 | 915 | 10 |
| 2152 | 446 | 475 | 55 |
| 2153 | 799 | 34 | 601 |
| 2154 | 763 | 94 | 363 |
| 2155 | 18 | 416 | 744 |
| 2156 | 50 | 289 | 5 |
| 2157 | 112 | 938 | 20 |
| 2158 | 148 | 536 | 711 |
| 2159 | 335 | 717 | 920 |
| 2160 | 22 | 766 | 912 |
| 2161 | 16 | 758 | 562 |
| 2162 | 24 | 897 | 363 |
| 2163 | 42 | 275 | 258 |
| 2164 | 118 | 124 | 544 |
| 2165 | 804 | 147 | 876 |
| 2166 | 470 | 284 | 380 |
| 2167 | 261 | 112 | 324 |
| 2168 | 72 | 392 | 12 |
| 2169 | 889 | 10 | 482 |
| 2170 | 132 | 692 | 12 |
| 2171 | 545 | 988 | 597 |
| 2172 | 486 | 5 | 760 |
| 2173 | 297 | 948 | 371 |
| 2174 | 520 | 18 | 631 |
| 2175 | 112 | 930 | 860 |
| 2176 | 72 | 146 | 825 |
| 2177 | 66 | 105 | 786 |
| 2178 | 116 | 199 | 64 |
| 2179 | 283 | 304 | 772 |
| 2180 | 483 | 992 | 637 |
| 2181 | 79 | 61 | 645 |
| 2182 | 73 | 606 | 218 |
| 2183 | 980 | 447 | 685 |
| 2184 | 467 | 626 | 381 |
| 2185 | 268 | 440 | 119 |
| 2186 | 23 | 743 | 150 |
| 2187 | 258 | 12 | 375 |
| 2188 | 36 | 266 | 779 |
| 2189 | 473 | 597 | 760 |
| 2190 | 112 | 113 | 612 |
| 2191 | 6 | 83 | 889 |
| 2192 | 239 | 12 | 602 |
| 2193 | 69 | 165 | 609 |
| 2194 | 354 | 112 | 652 |
| 2195 | 915 | 282 | 22 |
| 2196 | 35 | 320 | 22 |
| 2197 | 854 | 1 | 163 |
| 2198 | 160 | 822 | 98 |
| 2199 | 78 | 865 | 679 |
| 2200 | 796 | 621 | 429 |
| 2201 | 10 | 448 | 538 |
| 2202 | 112 | 714 | 509 |
| 2203 | 18 | 191 | 151 |
| 2204 | 675 | 112 | 536 |
| 2205 | 142 | 91 | 124 |
| 2206 | 121 | 401 | 657 |
| 2207 | 132 | 18 | 897 |
| 2208 | 7 | 515 | 471 |
| 2209 | 717 | 932 | 286 |
| 2210 | 118 | 195 | 893 |
| 2211 | 293 | 800 | 1 |
| 2212 | 46 | 963 | 39 |
| 2213 | 633 | 199 | 35 |
| 2214 | 82 | 392 | 925 |
| 2215 | 112 | 346 | 612 |
| 2216 | 109 | 32 | 3 |
| 2217 | 923 | 402 | 908 |
| 2218 | 46 | 25 | 176 |
| 2219 | 3 | 125 | 951 |
| 2220 | 753 | 5 | 8 |
| 2221 | 145 | 182 | 94 |
| 2222 | 8 | 593 | 183 |
| 2223 | 171 | 743 | 13 |
| 2224 | 79 | 3 | 847 |
| 2225 | 110 | 133 | 974 |
| 2226 | 124 | 392 | 811 |
| 2227 | 363 | 153 | 69 |
| 2228 | 8 | 648 | 18 |
| 2229 | 725 | 368 | 750 |
| 2230 | 63 | 178 | 392 |
| 2231 | 16 | 90 | 43 |
| 2232 | 166 | 476 | 445 |
| 2233 | 57 | 533 | 555 |
| 2234 | 112 | 801 | 178 |
| 2235 | 698 | 371 | 461 |
| 2236 | 34 | 929 | 99 |
| 2237 | 500 | 31 | 131 |
| 2238 | 407 | 134 | 536 |
| 2239 | 171 | 297 | 846 |
| 2240 | 102 | 524 | 67 |
| 2241 | 599 | 371 | 54 |
| 2242 | 443 | 22 | 480 |
| 2243 | 21 | 12 | 284 |
| 2244 | 45 | 58 | 211 |
| 2245 | 435 | 944 | 54 |
| 2246 | 165 | 608 | 12 |
| 2247 | 606 | 712 | 115 |
| 2248 | 351 | 56 | 349 |
| 2249 | 112 | 147 | 940 |
| 2250 | 367 | 207 | 57 |
| 2251 | 83 | 304 | 49 |
| 2252 | 460 | 706 | 674 |
| 2253 | 355 | 112 | 516 |
| 2254 | 456 | 69 | 398 |
| 2255 | 87 | 572 | 18 |
| 2256 | 1000 | 770 | 340 |
| 2257 | 8 | 558 | 531 |
| 2258 | 131 | 335 | 128 |
| 2259 | 894 | 22 | 47 |
| 2260 | 605 | 401 | 297 |
| 2261 | 792 | 710 | 124 |
| 2262 | 621 | 380 | 81 |
| 2263 | 520 | 614 | 54 |
| 2264 | 804 | 132 | 382 |
| 2265 | 603 | 88 | 826 |
| 2266 | 979 | 112 | 622 |
| 2267 | 532 | 104 | 112 |
| 2268 | 112 | 938 | 129 |
| 2269 | 124 | 182 | 295 |
| 2270 | 112 | 497 | 21 |
| 2271 | 297 | 581 | 544 |
| 2272 | 392 | 112 | 302 |
| 2273 | 816 | 83 | 31 |
| 2274 | 178 | 18 | 510 |
| 2275 | 761 | 41 | 709 |
| 2276 | 354 | 386 | 275 |
| 2277 | 599 | 47 | 532 |
| 2278 | 956 | 18 | 324 |
| 2279 | 317 | 79 | 801 |
| 2280 | 553 | 16 | 510 |
| 2281 | 8 | 47 | 431 |
| 2282 | 533 | 146 | 352 |
| 2283 | 79 | 124 | 934 |
| 2284 | 112 | 446 | 589 |
| 2285 | 643 | 124 | 233 |
| 2286 | 96 | 89 | 642 |
| 2287 | 335 | 413 | 427 |
| 2288 | 355 | 874 | 12 |
| 2289 | 8 | 951 | 460 |
| 2290 | 483 | 919 | 73 |
| 2291 | 897 | 810 | 494 |
| 2292 | 759 | 38 | 581 |
| 2293 | 130 | 951 | 283 |
| 2294 | 112 | 548 | 316 |
| 2295 | 112 | 774 | 426 |
| 2296 | 381 | 395 | 145 |
| 2297 | 25 | 574 | 502 |
| 2298 | 641 | 807 | 128 |
| 2299 | 283 | 427 | 96 |
| 2300 | 791 | 118 | 877 |
| 2301 | 60 | 25 | 305 |
| 2302 | 809 | 10 | 667 |
| 2303 | 1000 | 79 | 33 |
| 2304 | 359 | 148 | 597 |
| 2305 | 17 | 820 | 438 |
| 2306 | 427 | 45 | 311 |
| 2307 | 33 | 36 | 18 |
| 2308 | 733 | 187 | 16 |
| 2309 | 24 | 31 | 354 |
| 2310 | 202 | 518 | 2 |
| 2311 | 350 | 208 | 136 |
| 2312 | 921 | 505 | 41 |
| 2313 | 467 | 188 | 94 |
| 2314 | 588 | 146 | 171 |
| 2315 | 834 | 1 | 642 |
| 2316 | 618 | 461 | 23 |
| 2317 | 371 | 161 | 43 |
| 2318 | 458 | 360 | 701 |
| 2319 | 422 | 34 | 3 |
| 2320 | 598 | 184 | 112 |
| 2321 | 18 | 29 | 446 |
| 2322 | 751 | 626 | 2 |
| 2323 | 938 | 159 | 34 |
| 2324 | 738 | 566 | 605 |
| 2325 | 619 | 64 | 3 |
| 2326 | 685 | 98 | 94 |
| 2327 | 2 | 240 | 701 |
| 2328 | 599 | 902 | 7 |
| 2329 | 599 | 711 | 590 |
| 2330 | 806 | 6 | 74 |
| 2331 | 25 | 24 | 446 |
| 2332 | 83 | 787 | 1000 |
| 2333 | 410 | 283 | 39 |
| 2334 | 576 | 826 | 656 |
| 2335 | 53 | 150 | 756 |
| 2336 | 815 | 675 | 151 |
| 2337 | 61 | 282 | 40 |
| 2338 | 49 | 5 | 181 |
| 2339 | 146 | 980 | 596 |
| 2340 | 922 | 3 | 25 |
| 2341 | 186 | 865 | 3 |
| 2342 | 818 | 2 | 426 |
| 2343 | 456 | 73 | 90 |
| 2344 | 699 | 5 | 37 |
| 2345 | 788 | 2 | 634 |
| 2346 | 663 | 124 | 205 |
| 2347 | 304 | 626 | 256 |
| 2348 | 159 | 642 | 536 |
| 2349 | 40 | 3 | 540 |
| 2350 | 297 | 45 | 128 |
| 2351 | 914 | 158 | 35 |
| 2352 | 18 | 112 | 518 |
| 2353 | 195 | 474 | 77 |
| 2354 | 281 | 906 | 112 |
| 2355 | 275 | 860 | 34 |
| 2356 | 32 | 846 | 348 |
| 2357 | 536 | 35 | 167 |
| 2358 | 112 | 32 | 759 |
| 2359 | 757 | 924 | 2 |
| 2360 | 811 | 127 | 21 |
| 2361 | 747 | 207 | 576 |
| 2362 | 351 | 130 | 820 |
| 2363 | 925 | 295 | 903 |
| 2364 | 25 | 276 | 76 |
| 2365 | 845 | 112 | 911 |
| 2366 | 993 | 112 | 21 |
| 2367 | 112 | 381 | 803 |
| 2368 | 150 | 969 | 4 |
| 2369 | 150 | 42 | 717 |
| 2370 | 199 | 588 | 39 |
| 2371 | 980 | 53 | 401 |
| 2372 | 822 | 382 | 367 |
| 2373 | 774 | 619 | 112 |
| 2374 | 262 | 56 | 112 |
| 2375 | 401 | 118 | 948 |
| 2376 | 508 | 112 | 409 |
| 2377 | 112 | 399 | 867 |
| 2378 | 12 | 283 | 532 |
| 2379 | 28 | 395 | 5 |
| 2380 | 708 | 294 | 201 |
| 2381 | 1 | 342 | 607 |
| 2382 | 795 | 58 | 178 |
| 2383 | 937 | 112 | 505 |
| 2384 | 618 | 599 | 41 |
| 2385 | 330 | 440 | 39 |
| 2386 | 18 | 182 | 167 |
| 2387 | 494 | 448 | 838 |
| 2388 | 112 | 993 | 709 |
| 2389 | 38 | 76 | 3 |
| 2390 | 100 | 835 | 12 |
| 2391 | 973 | 55 | 73 |
| 2392 | 890 | 217 | 45 |
| 2393 | 351 | 395 | 32 |
| 2394 | 748 | 130 | 21 |
| 2395 | 36 | 44 | 500 |
| 2396 | 731 | 12 | 77 |
| 2397 | 58 | 514 | 649 |
| 2398 | 45 | 560 | 880 |
| 2399 | 3 | 386 | 804 |
| 2400 | 127 | 506 | 201 |
| 2401 | 579 | 94 | 78 |
| 2402 | 50 | 479 | 216 |
| 2403 | 5 | 880 | 124 |
| 2404 | 119 | 816 | 611 |
| 2405 | 115 | 290 | 118 |
| 2406 | 47 | 96 | 801 |
| 2407 | 363 | 469 | 69 |
| 2408 | 289 | 267 | 399 |
| 2409 | 112 | 750 | 218 |
| 2410 | 137 | 7 | 12 |
| 2411 | 95 | 838 | 560 |
| 2412 | 34 | 869 | 254 |
| 2413 | 31 | 275 | 37 |
| 2414 | 532 | 50 | 376 |
| 2415 | 130 | 365 | 172 |
| 2416 | 148 | 35 | 457 |
| 2417 | 12 | 546 | 27 |
| 2418 | 970 | 137 | 4 |
| 2419 | 429 | 58 | 182 |
| 2420 | 39 | 670 | 112 |
| 2421 | 85 | 824 | 540 |
| 2422 | 331 | 796 | 702 |
| 2423 | 373 | 148 | 389 |
| 2424 | 112 | 608 | 909 |
| 2425 | 83 | 192 | 15 |
| 2426 | 323 | 195 | 411 |
| 2427 | 705 | 45 | 520 |
| 2428 | 882 | 124 | 113 |
| 2429 | 112 | 56 | 488 |
| 2430 | 55 | 355 | 897 |
| 2431 | 186 | 16 | 658 |
| 2432 | 130 | 470 | 396 |
| 2433 | 498 | 95 | 597 |
| 2434 | 2 | 342 | 110 |
| 2435 | 28 | 673 | 5 |
| 2436 | 637 | 527 | 407 |
| 2437 | 48 | 849 | 112 |
| 2438 | 915 | 52 | 496 |
| 2439 | 842 | 78 | 726 |
| 2440 | 344 | 206 | 627 |
| 2441 | 599 | 179 | 1 |
| 2442 | 541 | 40 | 35 |
| 2443 | 69 | 25 | 41 |
| 2444 | 652 | 118 | 827 |
| 2445 | 854 | 172 | 34 |
| 2446 | 731 | 625 | 209 |
| 2447 | 350 | 118 | 407 |
| 2448 | 469 | 550 | 18 |
| 2449 | 435 | 133 | 49 |
| 2450 | 593 | 988 | 458 |
| 2451 | 32 | 71 | 97 |
| 2452 | 11 | 61 | 893 |
| 2453 | 342 | 384 | 959 |
| 2454 | 191 | 124 | 529 |
| 2455 | 801 | 360 | 551 |
| 2456 | 98 | 575 | 435 |
| 2457 | 22 | 443 | 642 |
| 2458 | 582 | 372 | 599 |
| 2459 | 473 | 3 | 628 |
| 2460 | 18 | 360 | 676 |
| 2461 | 5 | 863 | 111 |
| 2462 | 12 | 84 | 457 |
| 2463 | 35 | 28 | 301 |
| 2464 | 269 | 635 | 118 |
| 2465 | 814 | 56 | 258 |
| 2466 | 3 | 831 | 329 |
| 2467 | 275 | 18 | 554 |
| 2468 | 838 | 454 | 52 |
| 2469 | 902 | 10 | 331 |
| 2470 | 170 | 30 | 132 |
| 2471 | 448 | 319 | 282 |
| 2472 | 127 | 886 | 176 |
| 2473 | 770 | 112 | 403 |
| 2474 | 569 | 62 | 19 |
| 2475 | 58 | 717 | 956 |
| 2476 | 47 | 603 | 496 |
| 2477 | 1 | 762 | 47 |
| 2478 | 83 | 15 | 417 |
| 2479 | 292 | 542 | 195 |
| 2480 | 457 | 248 | 152 |
| 2481 | 808 | 894 | 124 |
| 2482 | 96 | 811 | 337 |
| 2483 | 3 | 404 | 8 |
| 2484 | 145 | 150 | 530 |
| 2485 | 80 | 112 | 270 |
| 2486 | 213 | 839 | 61 |
| 2487 | 96 | 160 | 32 |
| 2488 | 483 | 43 | 819 |
| 2489 | 124 | 491 | 7 |
| 2490 | 152 | 837 | 12 |
| 2491 | 505 | 558 | 901 |
| 2492 | 5 | 395 | 83 |
| 2493 | 42 | 18 | 39 |
| 2494 | 75 | 706 | 831 |
| 2495 | 58 | 602 | 323 |
| 2496 | 716 | 32 | 658 |
| 2497 | 123 | 143 | 47 |
| 2498 | 152 | 3 | 268 |
| 2499 | 302 | 82 | 47 |
| 2500 | 618 | 253 | 127 |
| 2501 | 994 | 175 | 646 |
| 2502 | 13 | 319 | 889 |
| 2503 | 912 | 207 | 424 |
| 2504 | 694 | 58 | 12 |
| 2505 | 94 | 35 | 636 |
| 2506 | 954 | 820 | 1 |
| 2507 | 706 | 33 | 755 |
| 2508 | 122 | 253 | 129 |
| 2509 | 25 | 386 | 198 |
| 2510 | 862 | 804 | 43 |
| 2511 | 923 | 289 | 664 |
| 2512 | 132 | 183 | 25 |
| 2513 | 664 | 3 | 48 |
| 2514 | 115 | 132 | 817 |
| 2515 | 690 | 951 | 9 |
| 2516 | 323 | 560 | 58 |
| 2517 | 112 | 129 | 74 |
| 2518 | 693 | 12 | 578 |
| 2519 | 45 | 551 | 918 |
| 2520 | 53 | 565 | 603 |
| 2521 | 71 | 502 | 437 |
| 2522 | 40 | 311 | 45 |
| 2523 | 371 | 123 | 61 |
| 2524 | 569 | 996 | 268 |
| 2525 | 52 | 16 | 718 |
| 2526 | 932 | 658 | 37 |
| 2527 | 44 | 611 | 351 |
| 2528 | 418 | 112 | 633 |
| 2529 | 421 | 183 | 154 |
| 2530 | 207 | 292 | 480 |
| 2531 | 83 | 97 | 47 |
| 2532 | 974 | 66 | 841 |
| 2533 | 478 | 112 | 686 |
| 2534 | 556 | 112 | 816 |
| 2535 | 32 | 940 | 37 |
| 2536 | 110 | 503 | 921 |
| 2537 | 838 | 115 | 61 |
| 2538 | 65 | 497 | 256 |
| 2539 | 321 | 653 | 17 |
| 2540 | 17 | 855 | 642 |
| 2541 | 36 | 895 | 511 |
| 2542 | 773 | 145 | 708 |
| 2543 | 185 | 18 | 680 |
| 2544 | 663 | 735 | 15 |
| 2545 | 424 | 36 | 732 |
| 2546 | 346 | 987 | 137 |
| 2547 | 43 | 414 | 581 |
| 2548 | 715 | 16 | 360 |
| 2549 | 67 | 230 | 255 |
| 2550 | 231 | 112 | 783 |
| 2551 | 190 | 48 | 395 |
| 2552 | 90 | 58 | 546 |
| 2553 | 7 | 410 | 545 |
| 2554 | 360 | 527 | 69 |
| 2555 | 935 | 457 | 411 |
| 2556 | 275 | 467 | 138 |
| 2557 | 438 | 342 | 350 |
| 2558 | 460 | 45 | 337 |
| 2559 | 258 | 986 | 806 |
| 2560 | 425 | 501 | 115 |
| 2561 | 756 | 136 | 112 |
| 2562 | 716 | 69 | 550 |
| 2563 | 416 | 931 | 290 |
| 2564 | 59 | 799 | 316 |
| 2565 | 874 | 701 | 112 |
| 2566 | 400 | 720 | 36 |
| 2567 | 62 | 44 | 32 |
| 2568 | 624 | 130 | 344 |
| 2569 | 102 | 3 | 118 |
| 2570 | 789 | 81 | 834 |
| 2571 | 470 | 779 | 372 |
| 2572 | 123 | 112 | 856 |
| 2573 | 102 | 67 | 138 |
| 2574 | 763 | 178 | 397 |
| 2575 | 83 | 107 | 57 |
| 2576 | 136 | 49 | 337 |
| 2577 | 66 | 130 | 67 |
| 2578 | 170 | 165 | 397 |
| 2579 | 11 | 371 | 268 |
| 2580 | 282 | 35 | 180 |
| 2581 | 43 | 908 | 124 |
| 2582 | 566 | 577 | 15 |
| 2583 | 780 | 112 | 38 |
| 2584 | 195 | 35 | 121 |
| 2585 | 743 | 141 | 707 |
| 2586 | 49 | 69 | 732 |
| 2587 | 970 | 127 | 316 |
| 2588 | 866 | 112 | 831 |
| 2589 | 210 | 968 | 120 |
| 2590 | 268 | 595 | 57 |
| 2591 | 559 | 964 | 2 |
| 2592 | 36 | 97 | 55 |
| 2593 | 250 | 124 | 263 |
| 2594 | 254 | 112 | 854 |
| 2595 | 941 | 164 | 78 |
| 2596 | 502 | 36 | 2 |
| 2597 | 870 | 25 | 45 |
| 2598 | 626 | 449 | 248 |
| 2599 | 148 | 661 | 330 |
| 2600 | 544 | 12 | 737 |
| 2601 | 360 | 126 | 626 |
| 2602 | 5 | 888 | 7 |
| 2603 | 743 | 840 | 45 |
| 2604 | 3 | 150 | 770 |
| 2605 | 520 | 137 | 913 |
| 2606 | 804 | 833 | 412 |
| 2607 | 85 | 924 | 289 |
| 2608 | 73 | 316 | 78 |
| 2609 | 631 | 140 | 3 |
| 2610 | 36 | 743 | 153 |
| 2611 | 93 | 115 | 838 |
| 2612 | 902 | 150 | 552 |
| 2613 | 3 | 956 | 717 |
| 2614 | 323 | 207 | 912 |
| 2615 | 124 | 324 | 912 |
| 2616 | 50 | 448 | 560 |
| 2617 | 731 | 356 | 5 |
| 2618 | 58 | 560 | 570 |
| 2619 | 282 | 835 | 83 |
| 2620 | 5 | 10 | 246 |
| 2621 | 618 | 18 | 21 |
| 2622 | 121 | 345 | 966 |
| 2623 | 69 | 45 | 308 |
| 2624 | 36 | 743 | 375 |
| 2625 | 168 | 375 | 35 |
| 2626 | 765 | 693 | 35 |
| 2627 | 197 | 351 | 137 |
| 2628 | 667 | 349 | 112 |
| 2629 | 431 | 901 | 4 |
| 2630 | 873 | 459 | 36 |
| 2631 | 39 | 923 | 150 |
| 2632 | 898 | 46 | 814 |
| 2633 | 565 | 461 | 152 |
| 2634 | 81 | 416 | 995 |
| 2635 | 340 | 93 | 8 |
| 2636 | 679 | 642 | 95 |
| 2637 | 46 | 40 | 658 |
| 2638 | 701 | 112 | 274 |
| 2639 | 18 | 14 | 978 |
| 2640 | 98 | 862 | 900 |
| 2641 | 576 | 198 | 124 |
| 2642 | 308 | 853 | 167 |
| 2643 | 440 | 850 | 50 |
| 2644 | 190 | 691 | 64 |
| 2645 | 124 | 557 | 118 |
| 2646 | 522 | 867 | 743 |
| 2647 | 606 | 635 | 2 |
| 2648 | 63 | 438 | 581 |
| 2649 | 489 | 126 | 61 |
| 2650 | 676 | 79 | 248 |
| 2651 | 112 | 183 | 455 |
| 2652 | 713 | 137 | 435 |
| 2653 | 98 | 649 | 132 |
| 2654 | 60 | 795 | 121 |
| 2655 | 702 | 663 | 408 |
| 2656 | 171 | 860 | 297 |
| 2657 | 124 | 710 | 775 |
| 2658 | 62 | 902 | 86 |
| 2659 | 706 | 115 | 354 |
| 2660 | 743 | 185 | 805 |
| 2661 | 352 | 812 | 459 |
| 2662 | 112 | 767 | 969 |
| 2663 | 41 | 144 | 473 |
| 2664 | 160 | 39 | 563 |
| 2665 | 387 | 75 | 35 |
| 2666 | 178 | 29 | 843 |
| 2667 | 361 | 703 | 12 |
| 2668 | 811 | 679 | 94 |
| 2669 | 34 | 661 | 642 |
| 2670 | 215 | 112 | 63 |
| 2671 | 71 | 465 | 3 |
| 2672 | 706 | 185 | 41 |
| 2673 | 820 | 36 | 743 |
| 2674 | 378 | 625 | 12 |
| 2675 | 49 | 726 | 452 |
| 2676 | 89 | 92 | 472 |
| 2677 | 275 | 133 | 859 |
| 2678 | 137 | 866 | 58 |
| 2679 | 45 | 496 | 207 |
| 2680 | 604 | 114 | 33 |
| 2681 | 47 | 774 | 697 |
| 2682 | 45 | 540 | 589 |
| 2683 | 621 | 12 | 375 |
| 2684 | 50 | 35 | 300 |
| 2685 | 131 | 541 | 599 |
| 2686 | 25 | 387 | 901 |
| 2687 | 649 | 334 | 8 |
| 2688 | 36 | 732 | 833 |
| 2689 | 533 | 605 | 702 |
| 2690 | 248 | 40 | 36 |
| 2691 | 679 | 923 | 670 |
| 2692 | 316 | 114 | 997 |
| 2693 | 322 | 496 | 143 |
| 2694 | 386 | 79 | 248 |
| 2695 | 127 | 38 | 123 |
| 2696 | 950 | 812 | 112 |
| 2697 | 12 | 29 | 688 |
| 2698 | 6 | 646 | 181 |
| 2699 | 130 | 506 | 188 |
| 2700 | 73 | 303 | 124 |
| 2701 | 3 | 495 | 40 |
| 2702 | 931 | 21 | 861 |
| 2703 | 286 | 613 | 43 |
| 2704 | 187 | 331 | 65 |
| 2705 | 766 | 7 | 195 |
| 2706 | 155 | 12 | 934 |
| 2707 | 449 | 11 | 112 |
| 2708 | 371 | 76 | 35 |
| 2709 | 43 | 268 | 367 |
| 2710 | 237 | 717 | 45 |
| 2711 | 536 | 98 | 37 |
| 2712 | 991 | 637 | 448 |
| 2713 | 727 | 834 | 117 |
| 2714 | 355 | 134 | 315 |
| 2715 | 345 | 130 | 752 |
| 2716 | 5 | 39 | 687 |
| 2717 | 66 | 584 | 590 |
| 2718 | 81 | 702 | 842 |
| 2719 | 923 | 130 | 133 |
| 2720 | 12 | 191 | 325 |
| 2721 | 43 | 124 | 560 |
| 2722 | 467 | 25 | 476 |
| 2723 | 112 | 330 | 291 |
| 2724 | 45 | 21 | 380 |
| 2725 | 50 | 136 | 764 |
| 2726 | 112 | 412 | 503 |
| 2727 | 551 | 360 | 561 |
| 2728 | 192 | 12 | 763 |
| 2729 | 840 | 599 | 444 |
| 2730 | 174 | 544 | 34 |
| 2731 | 197 | 201 | 45 |
| 2732 | 414 | 834 | 668 |
| 2733 | 261 | 112 | 305 |
| 2734 | 158 | 634 | 35 |
| 2735 | 398 | 854 | 835 |
| 2736 | 787 | 67 | 124 |
| 2737 | 414 | 61 | 585 |
| 2738 | 581 | 343 | 112 |
| 2739 | 67 | 882 | 34 |
| 2740 | 77 | 865 | 112 |
| 2741 | 35 | 973 | 12 |
| 2742 | 690 | 36 | 395 |
| 2743 | 864 | 467 | 631 |
| 2744 | 147 | 248 | 709 |
| 2745 | 458 | 112 | 826 |
| 2746 | 925 | 416 | 950 |
| 2747 | 25 | 53 | 411 |
| 2748 | 12 | 121 | 40 |
| 2749 | 133 | 701 | 32 |
| 2750 | 764 | 773 | 50 |
| 2751 | 494 | 64 | 609 |
| 2752 | 388 | 34 | 939 |
| 2753 | 617 | 32 | 766 |
| 2754 | 518 | 10 | 977 |
| 2755 | 2 | 16 | 140 |
| 2756 | 323 | 44 | 364 |
| 2757 | 307 | 553 | 88 |
| 2758 | 43 | 112 | 2 |
| 2759 | 55 | 31 | 928 |
| 2760 | 39 | 709 | 495 |
| 2761 | 210 | 13 | 2 |
| 2762 | 281 | 968 | 3 |
| 2763 | 12 | 53 | 747 |
| 2764 | 12 | 999 | 664 |
| 2765 | 64 | 579 | 625 |
| 2766 | 7 | 287 | 626 |
| 2767 | 765 | 435 | 811 |
| 2768 | 892 | 36 | 684 |
| 2769 | 285 | 327 | 34 |
| 2770 | 58 | 945 | 294 |
| 2771 | 889 | 483 | 145 |
| 2772 | 150 | 318 | 35 |
| 2773 | 647 | 112 | 29 |
| 2774 | 5 | 359 | 652 |
| 2775 | 457 | 283 | 642 |
| 2776 | 642 | 508 | 1 |
| 2777 | 352 | 81 | 474 |
| 2778 | 203 | 289 | 438 |
| 2779 | 166 | 121 | 651 |
| 2780 | 2 | 433 | 395 |
| 2781 | 69 | 588 | 155 |
| 2782 | 812 | 1 | 588 |
| 2783 | 110 | 873 | 414 |
| 2784 | 316 | 192 | 36 |
| 2785 | 399 | 12 | 256 |
| 2786 | 675 | 112 | 410 |
| 2787 | 410 | 49 | 18 |
| 2788 | 341 | 104 | 475 |
| 2789 | 542 | 55 | 771 |
| 2790 | 439 | 926 | 124 |
| 2791 | 39 | 612 | 19 |
| 2792 | 112 | 217 | 175 |
| 2793 | 399 | 427 | 18 |
| 2794 | 471 | 831 | 12 |
| 2795 | 112 | 403 | 615 |
| 2796 | 12 | 162 | 746 |
| 2797 | 543 | 611 | 980 |
| 2798 | 651 | 102 | 925 |
| 2799 | 356 | 3 | 743 |
| 2800 | 146 | 910 | 545 |
| 2801 | 475 | 901 | 731 |
| 2802 | 829 | 50 | 122 |
| 2803 | 281 | 729 | 114 |
| 2804 | 21 | 99 | 130 |
| 2805 | 483 | 625 | 526 |
| 2806 | 18 | 771 | 948 |
| 2807 | 15 | 69 | 948 |
| 2808 | 112 | 10 | 590 |
| 2809 | 859 | 55 | 103 |
| 2810 | 397 | 391 | 69 |
| 2811 | 334 | 838 | 275 |
| 2812 | 12 | 314 | 665 |
| 2813 | 168 | 729 | 39 |
| 2814 | 115 | 39 | 548 |
| 2815 | 376 | 34 | 354 |
| 2816 | 660 | 835 | 117 |
| 2817 | 178 | 34 | 546 |
| 2818 | 633 | 859 | 12 |
| 2819 | 738 | 459 | 925 |
| 2820 | 314 | 17 | 118 |
| 2821 | 656 | 842 | 670 |
| 2822 | 140 | 43 | 490 |
| 2823 | 975 | 126 | 57 |
| 2824 | 35 | 47 | 774 |
| 2825 | 185 | 17 | 743 |
| 2826 | 45 | 123 | 21 |
| 2827 | 105 | 88 | 416 |
| 2828 | 16 | 112 | 316 |
| 2829 | 278 | 196 | 12 |
| 2830 | 18 | 791 | 957 |
| 2831 | 1 | 629 | 127 |
| 2832 | 29 | 289 | 148 |
| 2833 | 35 | 795 | 322 |
| 2834 | 67 | 110 | 159 |
| 2835 | 24 | 335 | 661 |
| 2836 | 7 | 125 | 370 |
| 2837 | 303 | 57 | 44 |
| 2838 | 279 | 124 | 476 |
| 2839 | 520 | 7 | 595 |
| 2840 | 19 | 192 | 978 |
| 2841 | 34 | 664 | 22 |
| 2842 | 761 | 477 | 5 |
| 2843 | 730 | 124 | 405 |
| 2844 | 198 | 599 | 848 |
| 2845 | 530 | 137 | 812 |
| 2846 | 410 | 43 | 467 |
| 2847 | 107 | 35 | 717 |
| 2848 | 49 | 435 | 161 |
| 2849 | 441 | 766 | 838 |
| 2850 | 112 | 296 | 178 |
| 2851 | 803 | 12 | 469 |
| 2852 | 11 | 566 | 771 |
| 2853 | 546 | 936 | 987 |
| 2854 | 531 | 121 | 342 |
| 2855 | 3 | 172 | 5 |
| 2856 | 2 | 206 | 627 |
| 2857 | 12 | 283 | 125 |
| 2858 | 418 | 276 | 302 |
| 2859 | 20 | 132 | 112 |
| 2860 | 904 | 241 | 1 |
| 2861 | 320 | 367 | 735 |
| 2862 | 395 | 45 | 275 |
| 2863 | 363 | 367 | 74 |
| 2864 | 3 | 438 | 863 |
| 2865 | 112 | 896 | 518 |
| 2866 | 503 | 649 | 569 |
| 2867 | 544 | 421 | 947 |
| 2868 | 500 | 32 | 517 |
| 2869 | 574 | 416 | 587 |
| 2870 | 112 | 574 | 805 |
| 2871 | 8 | 288 | 110 |
| 2872 | 573 | 650 | 124 |
| 2873 | 124 | 178 | 973 |
| 2874 | 289 | 146 | 121 |
| 2875 | 465 | 129 | 47 |
| 2876 | 817 | 308 | 56 |
| 2877 | 79 | 822 | 199 |
| 2878 | 45 | 441 | 604 |
| 2879 | 3 | 149 | 968 |
| 2880 | 594 | 60 | 16 |
| 2881 | 99 | 32 | 83 |
| 2882 | 92 | 990 | 112 |
| 2883 | 35 | 94 | 732 |
| 2884 | 18 | 80 | 663 |
| 2885 | 335 | 124 | 583 |
| 2886 | 801 | 244 | 12 |
| 2887 | 743 | 323 | 36 |
| 2888 | 804 | 777 | 56 |
| 2889 | 32 | 3 | 644 |
| 2890 | 129 | 191 | 731 |
| 2891 | 844 | 53 | 842 |
| 2892 | 3 | 412 | 25 |
| 2893 | 12 | 190 | 680 |
| 2894 | 43 | 268 | 622 |
| 2895 | 166 | 612 | 206 |
| 2896 | 473 | 626 | 707 |
| 2897 | 32 | 716 | 658 |
| 2898 | 915 | 446 | 501 |
| 2899 | 112 | 867 | 475 |
| 2900 | 456 | 288 | 375 |
| 2901 | 279 | 668 | 45 |
| 2902 | 112 | 316 | 62 |
| 2903 | 732 | 764 | 16 |
| 2904 | 76 | 230 | 83 |
| 2905 | 380 | 140 | 282 |
| 2906 | 64 | 855 | 588 |
| 2907 | 537 | 63 | 457 |
| 2908 | 604 | 58 | 262 |
| 2909 | 64 | 738 | 76 |
| 2910 | 115 | 341 | 634 |
| 2911 | 45 | 743 | 47 |
| 2912 | 137 | 862 | 579 |
| 2913 | 178 | 804 | 43 |
| 2914 | 47 | 191 | 731 |
| 2915 | 635 | 717 | 112 |
| 2916 | 21 | 738 | 112 |
| 2917 | 2 | 812 | 49 |
| 2918 | 25 | 517 | 182 |
| 2919 | 12 | 579 | 393 |
| 2920 | 93 | 597 | 120 |
| 2921 | 653 | 344 | 3 |
| 2922 | 5 | 940 | 877 |
| 2923 | 11 | 297 | 418 |
| 2924 | 729 | 610 | 12 |
| 2925 | 112 | 153 | 439 |
| 2926 | 36 | 965 | 124 |
| 2927 | 577 | 188 | 112 |
| 2928 | 159 | 248 | 12 |
| 2929 | 3 | 561 | 361 |
| 2930 | 873 | 3 | 197 |
| 2931 | 38 | 124 | 142 |
| 2932 | 36 | 956 | 713 |
| 2933 | 185 | 62 | 574 |
| 2934 | 248 | 786 | 118 |
| 2935 | 466 | 37 | 149 |
| 2936 | 911 | 319 | 112 |
| 2937 | 43 | 694 | 593 |
| 2938 | 567 | 36 | 645 |
| 2939 | 924 | 32 | 981 |
| 2940 | 727 | 56 | 452 |
| 2941 | 473 | 12 | 294 |
| 2942 | 978 | 7 | 52 |
| 2943 | 918 | 896 | 61 |
| 2944 | 418 | 695 | 2 |
| 2945 | 846 | 127 | 24 |
| 2946 | 702 | 612 | 35 |
| 2947 | 951 | 399 | 990 |
| 2948 | 81 | 951 | 356 |
| 2949 | 399 | 945 | 12 |
| 2950 | 37 | 234 | 83 |
| 2951 | 152 | 36 | 464 |
| 2952 | 539 | 873 | 3 |
| 2953 | 713 | 363 | 446 |
| 2954 | 626 | 115 | 530 |
| 2955 | 195 | 21 | 538 |
| 2956 | 304 | 327 | 316 |
| 2957 | 484 | 7 | 84 |
| 2958 | 124 | 189 | 609 |
| 2959 | 863 | 561 | 152 |
| 2960 | 765 | 163 | 766 |
| 2961 | 299 | 121 | 112 |
| 2962 | 413 | 473 | 26 |
| 2963 | 470 | 875 | 230 |
| 2964 | 118 | 983 | 112 |
| 2965 | 24 | 924 | 509 |
| 2966 | 281 | 115 | 473 |
| 2967 | 28 | 198 | 2 |
| 2968 | 128 | 402 | 578 |
| 2969 | 643 | 66 | 259 |
| 2970 | 399 | 614 | 112 |
| 2971 | 364 | 340 | 39 |
| 2972 | 39 | 35 | 994 |
| 2973 | 427 | 601 | 906 |
| 2974 | 74 | 112 | 697 |
| 2975 | 153 | 112 | 356 |
| 2976 | 801 | 18 | 118 |
| 2977 | 654 | 112 | 725 |
| 2978 | 501 | 651 | 163 |
| 2979 | 93 | 323 | 44 |
| 2980 | 12 | 22 | 78 |
| 2981 | 124 | 774 | 912 |
| 2982 | 416 | 390 | 64 |
| 2983 | 500 | 112 | 74 |
| 2984 | 810 | 346 | 9 |
| 2985 | 569 | 593 | 399 |
| 2986 | 124 | 137 | 603 |
| 2987 | 168 | 97 | 107 |
| 2988 | 732 | 258 | 45 |
| 2989 | 24 | 131 | 120 |
| 2990 | 904 | 19 | 38 |
| 2991 | 149 | 207 | 113 |
| 2992 | 304 | 868 | 283 |
| 2993 | 804 | 98 | 669 |
| 2994 | 302 | 345 | 66 |
| 2995 | 3 | 763 | 18 |
| 2996 | 199 | 101 | 124 |
| 2997 | 124 | 115 | 8 |
| 2998 | 781 | 401 | 145 |
| 2999 | 12 | 455 | 224 |
| 3000 | 24 | 254 | 127 |
| 3001 | 884 | 107 | 395 |
| 3002 | 658 | 514 | 32 |
| 3003 | 284 | 67 | 31 |
| 3004 | 12 | 601 | 72 |
| 3005 | 595 | 112 | 521 |
| 3006 | 360 | 91 | 3 |
| 3007 | 38 | 335 | 90 |
| 3008 | 48 | 18 | 621 |
| 3009 | 18 | 876 | 771 |
| 3010 | 532 | 2 | 21 |
| 3011 | 342 | 1 | 798 |
| 3012 | 432 | 7 | 128 |
| 3013 | 419 | 200 | 12 |
| 3014 | 9 | 43 | 257 |
| 3015 | 708 | 45 | 569 |
| 3016 | 200 | 121 | 89 |
| 3017 | 498 | 680 | 268 |
| 3018 | 755 | 56 | 124 |
| 3019 | 17 | 170 | 167 |
| 3020 | 460 | 81 | 136 |
| 3021 | 283 | 804 | 39 |
| 3022 | 112 | 686 | 967 |
| 3023 | 530 | 416 | 850 |
| 3024 | 911 | 734 | 7 |
| 3025 | 890 | 938 | 112 |
| 3026 | 336 | 849 | 64 |
| 3027 | 52 | 924 | 98 |
| 3028 | 219 | 391 | 826 |
| 3029 | 461 | 55 | 74 |
| 3030 | 870 | 66 | 3 |
| 3031 | 269 | 33 | 562 |
| 3032 | 94 | 15 | 145 |
| 3033 | 494 | 58 | 61 |
| 3034 | 89 | 63 | 49 |
| 3035 | 760 | 733 | 69 |
| 3036 | 179 | 973 | 47 |
| 3037 | 22 | 57 | 862 |
| 3038 | 45 | 124 | 797 |
| 3039 | 835 | 765 | 52 |
| 3040 | 967 | 2 | 282 |
| 3041 | 124 | 536 | 107 |
| 3042 | 169 | 811 | 991 |
| 3043 | 3 | 430 | 803 |
| 3044 | 507 | 58 | 182 |
| 3045 | 150 | 152 | 1 |
| 3046 | 63 | 371 | 705 |
| 3047 | 354 | 593 | 801 |
| 3048 | 481 | 543 | 112 |
| 3049 | 4 | 40 | 504 |
| 3050 | 124 | 233 | 920 |
| 3051 | 79 | 147 | 875 |
| 3052 | 418 | 204 | 302 |
| 3053 | 12 | 602 | 469 |
| 3054 | 641 | 7 | 94 |
| 3055 | 89 | 184 | 143 |
| 3056 | 576 | 121 | 17 |
| 3057 | 928 | 446 | 43 |
| 3058 | 647 | 101 | 743 |
| 3059 | 81 | 38 | 801 |
| 3060 | 136 | 255 | 785 |
| 3061 | 577 | 680 | 545 |
| 3062 | 155 | 124 | 641 |
| 3063 | 80 | 873 | 297 |
| 3064 | 44 | 136 | 28 |
| 3065 | 822 | 843 | 22 |
| 3066 | 163 | 977 | 12 |
| 3067 | 4 | 57 | 171 |
| 3068 | 305 | 16 | 732 |
| 3069 | 171 | 342 | 25 |
| 3070 | 339 | 769 | 32 |
| 3071 | 353 | 467 | 34 |
| 3072 | 602 | 537 | 124 |
| 3073 | 297 | 445 | 34 |
| 3074 | 660 | 539 | 12 |
| 3075 | 12 | 859 | 395 |
| 3076 | 112 | 198 | 402 |
| 3077 | 955 | 416 | 124 |
| 3078 | 230 | 10 | 163 |
| 3079 | 23 | 691 | 160 |
| 3080 | 282 | 903 | 105 |
| 3081 | 482 | 345 | 56 |
| 3082 | 751 | 656 | 60 |
| 3083 | 124 | 793 | 142 |
| 3084 | 536 | 35 | 360 |
| 3085 | 403 | 323 | 813 |
| 3086 | 873 | 340 | 382 |
| 3087 | 112 | 981 | 651 |
| 3088 | 330 | 467 | 112 |
| 3089 | 56 | 678 | 94 |
| 3090 | 410 | 572 | 10 |
| 3091 | 380 | 66 | 908 |
| 3092 | 12 | 325 | 160 |
| 3093 | 408 | 282 | 106 |
| 3094 | 124 | 693 | 452 |
| 3095 | 167 | 78 | 32 |
| 3096 | 824 | 295 | 304 |
| 3097 | 663 | 8 | 52 |
| 3098 | 112 | 75 | 57 |
| 3099 | 352 | 907 | 113 |
| 3100 | 562 | 118 | 473 |
| 3101 | 170 | 12 | 190 |
| 3102 | 391 | 382 | 455 |
| 3103 | 192 | 797 | 12 |
| 3104 | 69 | 687 | 459 |
| 3105 | 890 | 50 | 687 |
| 3106 | 90 | 625 | 427 |
| 3107 | 45 | 21 | 908 |
| 3108 | 974 | 585 | 71 |
| 3109 | 76 | 181 | 66 |
| 3110 | 324 | 88 | 192 |
| 3111 | 145 | 563 | 658 |
| 3112 | 169 | 60 | 670 |
| 3113 | 34 | 127 | 945 |
| 3114 | 902 | 118 | 886 |
| 3115 | 213 | 788 | 124 |
| 3116 | 122 | 79 | 112 |
| 3117 | 613 | 43 | 146 |
| 3118 | 66 | 56 | 129 |
| 3119 | 97 | 599 | 196 |
| 3120 | 81 | 60 | 729 |
| 3121 | 67 | 843 | 12 |
| 3122 | 17 | 12 | 90 |
| 3123 | 674 | 289 | 884 |
| 3124 | 801 | 3 | 908 |
| 3125 | 314 | 79 | 88 |
| 3126 | 323 | 227 | 112 |
| 3127 | 2 | 124 | 885 |
| 3128 | 1 | 770 | 196 |
| 3129 | 289 | 401 | 935 |
| 3130 | 45 | 880 | 50 |
| 3131 | 401 | 118 | 174 |
| 3132 | 769 | 3 | 921 |
| 3133 | 18 | 811 | 649 |
| 3134 | 804 | 7 | 44 |
| 3135 | 105 | 246 | 691 |
| 3136 | 21 | 718 | 284 |
| 3137 | 38 | 812 | 135 |
| 3138 | 190 | 255 | 146 |
| 3139 | 69 | 32 | 899 |
| 3140 | 65 | 58 | 557 |
| 3141 | 731 | 107 | 711 |
| 3142 | 36 | 121 | 602 |
| 3143 | 45 | 50 | 338 |
| 3144 | 35 | 31 | 337 |
| 3145 | 104 | 35 | 394 |
| 3146 | 547 | 2 | 318 |
| 3147 | 738 | 124 | 536 |
| 3148 | 107 | 40 | 635 |
| 3149 | 56 | 23 | 206 |
| 3150 | 535 | 124 | 201 |
| 3151 | 478 | 488 | 34 |
| 3152 | 418 | 92 | 641 |
| 3153 | 281 | 3 | 22 |
| 3154 | 112 | 303 | 815 |
| 3155 | 517 | 137 | 641 |
| 3156 | 649 | 532 | 1 |
| 3157 | 1 | 442 | 380 |
| 3158 | 39 | 164 | 776 |
| 3159 | 745 | 499 | 12 |
| 3160 | 590 | 372 | 112 |
| 3161 | 981 | 35 | 188 |
| 3162 | 399 | 112 | 823 |
| 3163 | 35 | 408 | 471 |
| 3164 | 702 | 352 | 35 |
| 3165 | 98 | 948 | 737 |
| 3166 | 69 | 51 | 644 |
| 3167 | 751 | 656 | 60 |
| 3168 | 112 | 640 | 724 |
| 3169 | 45 | 386 | 95 |
| 3170 | 43 | 573 | 268 |
| 3171 | 587 | 268 | 709 |
| 3172 | 112 | 196 | 468 |
| 3173 | 737 | 958 | 112 |
| 3174 | 354 | 269 | 804 |
| 3175 | 340 | 567 | 304 |
| 3176 | 817 | 11 | 35 |
| 3177 | 54 | 546 | 737 |
| 3178 | 839 | 58 | 17 |
| 3179 | 47 | 12 | 912 |
| 3180 | 899 | 457 | 1 |
| 3181 | 112 | 620 | 684 |
| 3182 | 45 | 534 | 998 |
| 3183 | 99 | 55 | 45 |
| 3184 | 342 | 118 | 584 |
| 3185 | 2 | 32 | 752 |
| 3186 | 591 | 25 | 426 |
| 3187 | 795 | 112 | 763 |
| 3188 | 24 | 4 | 446 |
| 3189 | 76 | 124 | 21 |
| 3190 | 717 | 178 | 81 |
| 3191 | 619 | 2 | 673 |
| 3192 | 518 | 2 | 95 |
| 3193 | 803 | 149 | 12 |
| 3194 | 149 | 74 | 452 |
| 3195 | 121 | 644 | 954 |
| 3196 | 732 | 63 | 175 |
| 3197 | 891 | 96 | 878 |
| 3198 | 464 | 791 | 533 |
| 3199 | 498 | 859 | 3 |
| 3200 | 36 | 599 | 67 |
| 3201 | 454 | 941 | 295 |
| 3202 | 185 | 915 | 58 |
| 3203 | 190 | 520 | 472 |
| 3204 | 244 | 575 | 268 |
| 3205 | 42 | 565 | 282 |
| 3206 | 380 | 295 | 1000 |
| 3207 | 218 | 660 | 178 |
| 3208 | 124 | 454 | 978 |
| 3209 | 43 | 743 | 85 |
| 3210 | 644 | 54 | 16 |
| 3211 | 434 | 124 | 801 |
| 3212 | 231 | 2 | 128 |
| 3213 | 290 | 520 | 544 |
| 3214 | 872 | 687 | 127 |
| 3215 | 9 | 166 | 22 |
| 3216 | 2 | 493 | 403 |
| 3217 | 24 | 158 | 971 |
| 3218 | 45 | 846 | 844 |
| 3219 | 95 | 210 | 54 |
| 3220 | 169 | 35 | 46 |
| 3221 | 70 | 371 | 636 |
| 3222 | 77 | 3 | 272 |
| 3223 | 292 | 513 | 103 |
| 3224 | 71 | 903 | 838 |
| 3225 | 182 | 112 | 858 |
| 3226 | 798 | 22 | 107 |
| 3227 | 5 | 708 | 45 |
| 3228 | 25 | 99 | 206 |
| 3229 | 7 | 22 | 427 |
| 3230 | 633 | 494 | 12 |
| 3231 | 598 | 3 | 408 |
| 3232 | 967 | 195 | 391 |
| 3233 | 240 | 169 | 335 |
| 3234 | 733 | 191 | 18 |
| 3235 | 32 | 915 | 474 |
| 3236 | 367 | 3 | 758 |
| 3237 | 185 | 713 | 448 |
| 3238 | 323 | 112 | 469 |
| 3239 | 383 | 342 | 186 |
| 3240 | 2 | 41 | 52 |
| 3241 | 522 | 112 | 889 |
| 3242 | 292 | 146 | 738 |
| 3243 | 35 | 611 | 713 |
| 3244 | 112 | 310 | 105 |
| 3245 | 828 | 18 | 118 |
| 3246 | 52 | 835 | 307 |
| 3247 | 175 | 569 | 25 |
| 3248 | 553 | 16 | 124 |
| 3249 | 349 | 403 | 25 |
| 3250 | 196 | 83 | 363 |
| 3251 | 634 | 899 | 594 |
| 3252 | 609 | 65 | 706 |
| 3253 | 48 | 883 | 335 |
| 3254 | 685 | 206 | 88 |
| 3255 | 383 | 473 | 454 |
| 3256 | 398 | 124 | 391 |
| 3257 | 302 | 37 | 12 |
| 3258 | 22 | 34 | 966 |
| 3259 | 544 | 796 | 58 |
| 3260 | 95 | 617 | 260 |
| 3261 | 256 | 17 | 170 |
| 3262 | 115 | 878 | 129 |
| 3263 | 767 | 482 | 7 |
| 3264 | 462 | 507 | 12 |
| 3265 | 337 | 604 | 397 |
| 3266 | 112 | 555 | 22 |
| 3267 | 525 | 318 | 169 |
| 3268 | 37 | 804 | 45 |
| 3269 | 195 | 323 | 33 |
| 3270 | 925 | 292 | 31 |
| 3271 | 566 | 112 | 125 |
| 3272 | 244 | 112 | 509 |
| 3273 | 43 | 166 | 800 |
| 3274 | 956 | 834 | 2 |
| 3275 | 39 | 58 | 83 |
| 3276 | 500 | 36 | 601 |
| 3277 | 53 | 542 | 40 |
| 3278 | 112 | 928 | 46 |
| 3279 | 515 | 400 | 48 |
| 3280 | 74 | 963 | 646 |
| 3281 | 602 | 1 | 642 |
| 3282 | 169 | 243 | 323 |
| 3283 | 108 | 23 | 502 |
| 3284 | 458 | 473 | 62 |
| 3285 | 2 | 591 | 85 |
| 3286 | 39 | 762 | 614 |
| 3287 | 207 | 612 | 163 |
| 3288 | 5 | 979 | 105 |
| 3289 | 33 | 5 | 118 |
| 3290 | 8 | 593 | 937 |
| 3291 | 520 | 364 | 45 |
| 3292 | 279 | 467 | 697 |
| 3293 | 727 | 599 | 1 |
| 3294 | 270 | 459 | 714 |
| 3295 | 319 | 67 | 275 |
| 3296 | 738 | 733 | 18 |
| 3297 | 329 | 23 | 969 |
| 3298 | 7 | 136 | 12 |
| 3299 | 275 | 114 | 181 |
| 3300 | 3 | 644 | 405 |
| 3301 | 373 | 464 | 112 |
| 3302 | 979 | 795 | 477 |
| 3303 | 102 | 548 | 595 |
| 3304 | 566 | 118 | 766 |
| 3305 | 45 | 40 | 844 |
| 3306 | 45 | 38 | 398 |
| 3307 | 83 | 129 | 95 |
| 3308 | 185 | 472 | 352 |
| 3309 | 1 | 938 | 66 |
| 3310 | 726 | 17 | 734 |
| 3311 | 10 | 626 | 889 |
| 3312 | 605 | 342 | 458 |
| 3313 | 2 | 526 | 106 |
| 3314 | 752 | 589 | 3 |
| 3315 | 352 | 533 | 170 |
| 3316 | 59 | 113 | 130 |
| 3317 | 997 | 124 | 696 |
| 3318 | 91 | 599 | 215 |
| 3319 | 779 | 112 | 455 |
| 3320 | 769 | 152 | 389 |
| 3321 | 881 | 458 | 6 |
| 3322 | 193 | 397 | 8 |
| 3323 | 37 | 571 | 65 |
| 3324 | 794 | 275 | 105 |
| 3325 | 322 | 112 | 801 |
| 3326 | 79 | 366 | 645 |
| 3327 | 911 | 66 | 49 |
| 3328 | 45 | 316 | 451 |
| 3329 | 867 | 503 | 137 |
| 3330 | 74 | 335 | 124 |
| 3331 | 11 | 102 | 268 |
| 3332 | 40 | 596 | 753 |
| 3333 | 831 | 85 | 194 |
| 3334 | 8 | 427 | 491 |
| 3335 | 12 | 894 | 17 |
| 3336 | 12 | 874 | 934 |
| 3337 | 376 | 408 | 126 |
| 3338 | 308 | 520 | 22 |
| 3339 | 472 | 354 | 112 |
| 3340 | 197 | 340 | 104 |
| 3341 | 282 | 351 | 185 |
| 3342 | 118 | 78 | 94 |
| 3343 | 706 | 88 | 255 |
| 3344 | 85 | 539 | 743 |
| 3345 | 997 | 533 | 172 |
| 3346 | 661 | 411 | 42 |
| 3347 | 193 | 693 | 112 |
| 3348 | 654 | 524 | 501 |
| 3349 | 537 | 2 | 215 |
| 3350 | 30 | 255 | 105 |
| 3351 | 909 | 473 | 112 |
| 3352 | 199 | 371 | 71 |
| 3353 | 191 | 151 | 820 |
| 3354 | 462 | 329 | 168 |
| 3355 | 107 | 684 | 473 |
| 3356 | 344 | 130 | 960 |
| 3357 | 112 | 889 | 946 |
| 3358 | 171 | 298 | 76 |
| 3359 | 79 | 522 | 63 |
| 3360 | 54 | 584 | 268 |
| 3361 | 41 | 56 | 12 |
| 3362 | 12 | 1 | 11 |
| 3363 | 2 | 676 | 977 |
| 3364 | 497 | 85 | 811 |
| 3365 | 849 | 883 | 79 |
| 3366 | 342 | 264 | 56 |
| 3367 | 54 | 935 | 431 |
| 3368 | 74 | 582 | 533 |
| 3369 | 252 | 520 | 61 |
| 3370 | 911 | 44 | 335 |
| 3371 | 627 | 268 | 716 |
| 3372 | 64 | 677 | 70 |
| 3373 | 745 | 45 | 599 |
| 3374 | 268 | 193 | 43 |
| 3375 | 124 | 43 | 29 |
| 3376 | 2 | 78 | 781 |
| 3377 | 183 | 56 | 951 |
| 3378 | 478 | 141 | 34 |
| 3379 | 8 | 568 | 867 |
| 3380 | 110 | 401 | 56 |
| 3381 | 113 | 112 | 906 |
| 3382 | 377 | 154 | 5 |
| 3383 | 21 | 277 | 18 |
| 3384 | 525 | 43 | 2 |
| 3385 | 979 | 13 | 56 |
| 3386 | 882 | 862 | 2 |
| 3387 | 355 | 954 | 719 |
| 3388 | 725 | 694 | 561 |
| 3389 | 685 | 45 | 336 |
| 3390 | 65 | 337 | 901 |
| 3391 | 104 | 342 | 31 |
| 3392 | 246 | 370 | 534 |
| 3393 | 996 | 470 | 269 |
| 3394 | 284 | 12 | 115 |
| 3395 | 342 | 329 | 248 |
| 3396 | 569 | 16 | 560 |
| 3397 | 145 | 658 | 272 |
| 3398 | 55 | 943 | 69 |
| 3399 | 85 | 472 | 88 |
| 3400 | 35 | 298 | 262 |
| 3401 | 593 | 22 | 142 |
| 3402 | 963 | 834 | 379 |
| 3403 | 53 | 446 | 957 |
| 3404 | 906 | 434 | 112 |
| 3405 | 35 | 169 | 870 |
| 3406 | 453 | 124 | 397 |
| 3407 | 112 | 917 | 81 |
| 3408 | 501 | 117 | 834 |
| 3409 | 381 | 92 | 112 |
| 3410 | 749 | 12 | 887 |
| 3411 | 342 | 384 | 765 |
| 3412 | 408 | 864 | 118 |
| 3413 | 268 | 54 | 855 |
| 3414 | 29 | 122 | 182 |
| 3415 | 486 | 45 | 844 |
| 3416 | 9 | 144 | 137 |
| 3417 | 708 | 32 | 763 |
| 3418 | 730 | 124 | 518 |
| 3419 | 744 | 825 | 384 |
| 3420 | 112 | 870 | 857 |
| 3421 | 534 | 329 | 483 |
| 3422 | 476 | 570 | 935 |
| 3423 | 243 | 12 | 383 |
| 3424 | 710 | 105 | 659 |
| 3425 | 38 | 662 | 118 |
| 3426 | 479 | 78 | 135 |
| 3427 | 36 | 81 | 990 |
| 3428 | 627 | 55 | 409 |
| 3429 | 302 | 78 | 737 |
| 3430 | 540 | 45 | 820 |
| 3431 | 112 | 172 | 97 |
| 3432 | 554 | 115 | 58 |
| 3433 | 255 | 430 | 256 |
| 3434 | 132 | 35 | 661 |
| 3435 | 197 | 3 | 817 |
| 3436 | 2 | 704 | 119 |
| 3437 | 508 | 413 | 577 |
| 3438 | 591 | 982 | 34 |
| 3439 | 316 | 411 | 453 |
| 3440 | 146 | 860 | 25 |
| 3441 | 57 | 387 | 320 |
| 3442 | 785 | 540 | 50 |
| 3443 | 278 | 66 | 868 |
| 3444 | 740 | 9 | 731 |
| 3445 | 756 | 178 | 81 |
| 3446 | 551 | 660 | 60 |
| 3447 | 124 | 72 | 985 |
| 3448 | 588 | 67 | 895 |
| 3449 | 66 | 704 | 117 |
| 3450 | 846 | 755 | 112 |
| 3451 | 668 | 100 | 103 |
| 3452 | 463 | 421 | 4 |
| 3453 | 112 | 262 | 73 |
| 3454 | 3 | 163 | 611 |
| 3455 | 50 | 942 | 979 |
| 3456 | 25 | 118 | 674 |
| 3457 | 378 | 448 | 368 |
| 3458 | 143 | 121 | 275 |
| 3459 | 375 | 380 | 470 |
| 3460 | 958 | 124 | 67 |
| 3461 | 230 | 43 | 2 |
| 3462 | 193 | 112 | 76 |
| 3463 | 108 | 363 | 50 |
| 3464 | 503 | 11 | 527 |
| 3465 | 281 | 115 | 66 |
| 3466 | 323 | 270 | 21 |
| 3467 | 704 | 66 | 86 |
| 3468 | 673 | 282 | 369 |
| 3469 | 518 | 79 | 120 |
| 3470 | 863 | 850 | 617 |
| 3471 | 22 | 446 | 761 |
| 3472 | 829 | 152 | 2 |
| 3473 | 918 | 788 | 2 |
| 3474 | 658 | 188 | 5 |
| 3475 | 54 | 159 | 863 |
| 3476 | 4 | 841 | 2 |
| 3477 | 456 | 56 | 21 |
| 3478 | 805 | 179 | 47 |
| 3479 | 17 | 34 | 936 |
| 3480 | 151 | 812 | 112 |
| 3481 | 304 | 768 | 707 |
| 3482 | 456 | 35 | 558 |
| 3483 | 286 | 104 | 742 |
| 3484 | 255 | 642 | 547 |
| 3485 | 812 | 233 | 137 |
| 3486 | 50 | 846 | 403 |
| 3487 | 838 | 198 | 107 |
| 3488 | 347 | 89 | 230 |
| 3489 | 355 | 201 | 137 |
| 3490 | 594 | 489 | 6 |
| 3491 | 279 | 7 | 472 |
| 3492 | 55 | 434 | 834 |
| 3493 | 810 | 248 | 44 |
| 3494 | 568 | 426 | 652 |
| 3495 | 297 | 999 | 71 |
| 3496 | 719 | 24 | 765 |
| 3497 | 207 | 576 | 999 |
| 3498 | 112 | 724 | 69 |
| 3499 | 169 | 59 | 245 |
| 3500 | 1000 | 112 | 184 |
| 3501 | 21 | 594 | 862 |
| 3502 | 564 | 627 | 12 |
| 3503 | 360 | 338 | 112 |
| 3504 | 434 | 55 | 834 |
| 3505 | 330 | 112 | 590 |
| 3506 | 547 | 295 | 94 |
| 3507 | 43 | 702 | 286 |
| 3508 | 508 | 160 | 7 |
| 3509 | 121 | 464 | 35 |
| 3510 | 38 | 571 | 16 |
| 3511 | 921 | 29 | 21 |
| 3512 | 112 | 3 | 342 |
| 3513 | 780 | 34 | 61 |
| 3514 | 12 | 529 | 37 |
| 3515 | 431 | 11 | 112 |
| 3516 | 12 | 771 | 108 |
| 3517 | 706 | 957 | 12 |
| 3518 | 731 | 627 | 231 |
| 3519 | 558 | 664 | 46 |
| 3520 | 709 | 769 | 47 |
| 3521 | 986 | 35 | 429 |
| 3522 | 124 | 559 | 413 |
| 3523 | 487 | 2 | 171 |
| 3524 | 6 | 63 | 99 |
| 3525 | 47 | 902 | 327 |
| 3526 | 896 | 283 | 112 |
| 3527 | 1000 | 46 | 9 |
| 3528 | 58 | 530 | 45 |
| 3529 | 569 | 137 | 787 |
| 3530 | 130 | 165 | 643 |
| 3531 | 785 | 712 | 64 |
| 3532 | 168 | 590 | 25 |
| 3533 | 83 | 50 | 772 |
| 3534 | 289 | 559 | 29 |
| 3535 | 631 | 878 | 191 |
| 3536 | 112 | 499 | 489 |
| 3537 | 994 | 757 | 78 |
| 3538 | 449 | 427 | 8 |
| 3539 | 927 | 552 | 661 |
| 3540 | 890 | 832 | 3 |
| 3541 | 52 | 124 | 410 |
| 3542 | 12 | 57 | 612 |
| 3543 | 99 | 660 | 996 |
| 3544 | 396 | 846 | 1 |
| 3545 | 93 | 340 | 94 |
| 3546 | 140 | 5 | 394 |
| 3547 | 112 | 529 | 295 |
| 3548 | 245 | 2 | 53 |
| 3549 | 334 | 78 | 34 |
| 3550 | 324 | 78 | 129 |
| 3551 | 367 | 331 | 774 |
| 3552 | 825 | 119 | 717 |
| 3553 | 860 | 459 | 395 |
| 3554 | 137 | 726 | 130 |
| 3555 | 174 | 980 | 12 |
| 3556 | 71 | 497 | 35 |
| 3557 | 401 | 744 | 56 |
| 3558 | 970 | 290 | 23 |
| 3559 | 731 | 748 | 191 |
| 3560 | 268 | 6 | 51 |
| 3561 | 543 | 455 | 21 |
| 3562 | 440 | 497 | 923 |
| 3563 | 721 | 365 | 112 |
| 3564 | 576 | 470 | 3 |
| 3565 | 351 | 73 | 16 |
| 3566 | 293 | 352 | 43 |
| 3567 | 730 | 935 | 124 |
| 3568 | 152 | 583 | 163 |
| 3569 | 124 | 476 | 602 |
| 3570 | 546 | 66 | 566 |
| 3571 | 744 | 692 | 124 |
| 3572 | 860 | 318 | 244 |
| 3573 | 55 | 683 | 711 |
| 3574 | 55 | 473 | 403 |
| 3575 | 60 | 969 | 44 |
| 3576 | 345 | 124 | 97 |
| 3577 | 588 | 124 | 650 |
| 3578 | 599 | 700 | 96 |
| 3579 | 366 | 837 | 991 |
| 3580 | 757 | 502 | 920 |
| 3581 | 41 | 66 | 406 |
| 3582 | 269 | 416 | 381 |
| 3583 | 329 | 915 | 185 |
| 3584 | 34 | 874 | 78 |
| 3585 | 851 | 975 | 112 |
| 3586 | 781 | 320 | 49 |
| 3587 | 16 | 64 | 503 |
| 3588 | 665 | 119 | 124 |
| 3589 | 23 | 483 | 76 |
| 3590 | 34 | 61 | 321 |
| 3591 | 295 | 673 | 448 |
| 3592 | 18 | 230 | 112 |
| 3593 | 464 | 693 | 76 |
| 3594 | 529 | 140 | 136 |
| 3595 | 112 | 479 | 478 |
| 3596 | 86 | 71 | 767 |
| 3597 | 292 | 981 | 218 |
| 3598 | 105 | 112 | 445 |
| 3599 | 723 | 39 | 914 |
| 3600 | 50 | 687 | 197 |
| 3601 | 148 | 315 | 152 |
| 3602 | 305 | 5 | 87 |
| 3603 | 29 | 173 | 86 |
| 3604 | 77 | 150 | 275 |
| 3605 | 39 | 192 | 105 |
| 3606 | 63 | 529 | 281 |
| 3607 | 665 | 99 | 103 |
| 3608 | 118 | 763 | 86 |
| 3609 | 18 | 335 | 282 |
| 3610 | 129 | 940 | 65 |
| 3611 | 124 | 657 | 5 |
| 3612 | 599 | 28 | 645 |
| 3613 | 653 | 18 | 690 |
| 3614 | 593 | 302 | 92 |
| 3615 | 581 | 1 | 167 |
| 3616 | 542 | 35 | 653 |
| 3617 | 15 | 112 | 516 |
| 3618 | 58 | 609 | 39 |
| 3619 | 20 | 48 | 275 |
| 3620 | 11 | 217 | 112 |
| 3621 | 563 | 12 | 957 |
| 3622 | 487 | 45 | 180 |
| 3623 | 641 | 218 | 28 |
| 3624 | 121 | 50 | 565 |
| 3625 | 58 | 115 | 465 |
| 3626 | 625 | 268 | 60 |
| 3627 | 90 | 375 | 29 |
| 3628 | 178 | 203 | 152 |
| 3629 | 62 | 573 | 57 |
| 3630 | 118 | 62 | 825 |
| 3631 | 3 | 160 | 604 |
| 3632 | 706 | 928 | 52 |
| 3633 | 132 | 477 | 701 |
| 3634 | 158 | 470 | 536 |
| 3635 | 502 | 50 | 35 |
| 3636 | 407 | 746 | 65 |
| 3637 | 175 | 754 | 401 |
| 3638 | 124 | 609 | 139 |
| 3639 | 967 | 837 | 501 |
| 3640 | 112 | 969 | 328 |
| 3641 | 112 | 644 | 185 |
| 3642 | 24 | 127 | 696 |
| 3643 | 12 | 777 | 2 |
| 3644 | 112 | 339 | 949 |
| 3645 | 125 | 1 | 718 |
| 3646 | 52 | 440 | 42 |
| 3647 | 629 | 1 | 273 |
| 3648 | 12 | 535 | 905 |
| 3649 | 145 | 112 | 53 |
| 3650 | 255 | 242 | 163 |
| 3651 | 811 | 301 | 94 |
| 3652 | 390 | 112 | 341 |
| 3653 | 557 | 184 | 18 |
| 3654 | 98 | 189 | 112 |
| 3655 | 866 | 647 | 34 |
| 3656 | 467 | 25 | 237 |
| 3657 | 12 | 289 | 224 |
| 3658 | 135 | 2 | 84 |
| 3659 | 2 | 886 | 794 |
| 3660 | 146 | 833 | 45 |
| 3661 | 41 | 342 | 30 |
| 3662 | 112 | 180 | 867 |
| 3663 | 33 | 562 | 163 |
| 3664 | 88 | 427 | 520 |
| 3665 | 2 | 843 | 829 |
| 3666 | 8 | 855 | 60 |
| 3667 | 5 | 674 | 977 |
| 3668 | 144 | 58 | 363 |
| 3669 | 8 | 701 | 31 |
| 3670 | 973 | 3 | 404 |
| 3671 | 478 | 593 | 101 |
| 3672 | 624 | 85 | 18 |
| 3673 | 837 | 12 | 629 |
| 3674 | 925 | 49 | 377 |
| 3675 | 35 | 199 | 921 |
| 3676 | 9 | 12 | 511 |
| 3677 | 151 | 70 | 291 |
| 3678 | 112 | 691 | 81 |
| 3679 | 23 | 847 | 134 |
| 3680 | 45 | 645 | 2 |
| 3681 | 338 | 130 | 957 |
| 3682 | 15 | 16 | 371 |
| 3683 | 870 | 122 | 98 |
| 3684 | 112 | 40 | 184 |
| 3685 | 874 | 430 | 18 |
| 3686 | 713 | 79 | 484 |
| 3687 | 128 | 622 | 268 |
| 3688 | 157 | 604 | 19 |
| 3689 | 18 | 625 | 504 |
| 3690 | 799 | 191 | 508 |
| 3691 | 473 | 35 | 115 |
| 3692 | 473 | 151 | 308 |
| 3693 | 580 | 58 | 323 |
| 3694 | 43 | 197 | 115 |
| 3695 | 293 | 56 | 489 |
| 3696 | 376 | 427 | 327 |
| 3697 | 543 | 71 | 552 |
| 3698 | 34 | 544 | 384 |
| 3699 | 919 | 53 | 545 |
| 3700 | 402 | 112 | 803 |
| 3701 | 112 | 884 | 465 |
| 3702 | 304 | 416 | 124 |
| 3703 | 874 | 112 | 185 |
| 3704 | 60 | 174 | 195 |
| 3705 | 525 | 826 | 112 |
| 3706 | 707 | 786 | 12 |
| 3707 | 325 | 12 | 85 |
| 3708 | 886 | 416 | 121 |
| 3709 | 996 | 703 | 5 |
| 3710 | 59 | 3 | 363 |
| 3711 | 292 | 12 | 596 |
| 3712 | 717 | 497 | 2 |
| 3713 | 348 | 61 | 846 |
| 3714 | 15 | 653 | 527 |
| 3715 | 401 | 441 | 502 |
| 3716 | 306 | 577 | 926 |
| 3717 | 36 | 88 | 1 |
| 3718 | 509 | 293 | 35 |
| 3719 | 106 | 40 | 178 |
| 3720 | 9 | 601 | 35 |
| 3721 | 701 | 112 | 948 |
| 3722 | 805 | 295 | 12 |
| 3723 | 55 | 270 | 566 |
| 3724 | 731 | 92 | 604 |
| 3725 | 88 | 45 | 680 |
| 3726 | 112 | 889 | 294 |
| 3727 | 255 | 546 | 60 |
| 3728 | 11 | 766 | 112 |
| 3729 | 430 | 112 | 713 |
| 3730 | 923 | 58 | 360 |
| 3731 | 69 | 283 | 804 |
| 3732 | 76 | 791 | 323 |
| 3733 | 112 | 7 | 57 |
| 3734 | 621 | 182 | 23 |
| 3735 | 147 | 123 | 340 |
| 3736 | 531 | 2 | 400 |
| 3737 | 970 | 702 | 275 |
| 3738 | 633 | 70 | 83 |
| 3739 | 95 | 152 | 568 |
| 3740 | 323 | 854 | 199 |
| 3741 | 268 | 406 | 172 |
| 3742 | 56 | 6 | 847 |
| 3743 | 132 | 170 | 463 |
| 3744 | 61 | 98 | 12 |
| 3745 | 315 | 94 | 935 |
| 3746 | 641 | 80 | 731 |
| 3747 | 725 | 90 | 808 |
| 3748 | 112 | 555 | 961 |
| 3749 | 423 | 33 | 377 |
| 3750 | 3 | 323 | 953 |
| 3751 | 501 | 566 | 533 |
| 3752 | 2 | 493 | 20 |
| 3753 | 320 | 130 | 292 |
| 3754 | 991 | 188 | 115 |
| 3755 | 931 | 12 | 364 |
| 3756 | 558 | 6 | 12 |
| 3757 | 959 | 112 | 386 |
| 3758 | 850 | 530 | 583 |
| 3759 | 71 | 35 | 114 |
| 3760 | 45 | 831 | 507 |
| 3761 | 573 | 897 | 55 |
| 3762 | 104 | 34 | 599 |
| 3763 | 162 | 13 | 18 |
| 3764 | 3 | 482 | 403 |
| 3765 | 93 | 282 | 2 |
| 3766 | 479 | 304 | 416 |
| 3767 | 128 | 915 | 297 |
| 3768 | 50 | 517 | 290 |
| 3769 | 496 | 322 | 894 |
| 3770 | 67 | 148 | 39 |
| 3771 | 43 | 418 | 17 |
| 3772 | 41 | 282 | 594 |
| 3773 | 96 | 45 | 913 |
| 3774 | 366 | 743 | 97 |
| 3775 | 268 | 7 | 195 |
| 3776 | 35 | 577 | 71 |
| 3777 | 41 | 216 | 50 |
| 3778 | 3 | 218 | 32 |
| 3779 | 438 | 391 | 94 |
| 3780 | 992 | 593 | 8 |
| 3781 | 16 | 21 | 368 |
| 3782 | 286 | 144 | 99 |
| 3783 | 78 | 153 | 436 |
| 3784 | 625 | 183 | 124 |
| 3785 | 504 | 238 | 34 |
| 3786 | 94 | 309 | 896 |
| 3787 | 846 | 37 | 3 |
| 3788 | 55 | 50 | 673 |
| 3789 | 17 | 324 | 18 |
| 3790 | 175 | 34 | 174 |
| 3791 | 707 | 2 | 375 |
| 3792 | 52 | 457 | 18 |
| 3793 | 836 | 783 | 702 |
| 3794 | 57 | 599 | 828 |
| 3795 | 709 | 400 | 41 |
| 3796 | 476 | 533 | 889 |
| 3797 | 838 | 854 | 439 |
| 3798 | 63 | 198 | 371 |
| 3799 | 395 | 169 | 563 |
| 3800 | 866 | 493 | 599 |
| 3801 | 124 | 394 | 750 |
| 3802 | 553 | 644 | 73 |
| 3803 | 319 | 588 | 35 |
| 3804 | 447 | 569 | 95 |
| 3805 | 606 | 5 | 58 |
| 3806 | 12 | 131 | 345 |
| 3807 | 842 | 55 | 878 |
| 3808 | 61 | 706 | 81 |
| 3809 | 73 | 913 | 22 |
| 3810 | 67 | 812 | 894 |
| 3811 | 737 | 43 | 813 |
| 3812 | 275 | 167 | 332 |
| 3813 | 112 | 804 | 178 |
| 3814 | 859 | 54 | 464 |
| 3815 | 127 | 950 | 159 |
| 3816 | 684 | 599 | 769 |
| 3817 | 251 | 118 | 123 |
| 3818 | 602 | 67 | 923 |
| 3819 | 332 | 25 | 67 |
| 3820 | 25 | 770 | 39 |
| 3821 | 810 | 127 | 535 |
| 3822 | 197 | 545 | 112 |
| 3823 | 6 | 489 | 50 |
| 3824 | 114 | 835 | 831 |
| 3825 | 626 | 4 | 450 |
| 3826 | 478 | 4 | 112 |
| 3827 | 57 | 603 | 12 |
| 3828 | 32 | 12 | 280 |
| 3829 | 366 | 166 | 724 |
| 3830 | 428 | 112 | 738 |
| 3831 | 731 | 3 | 335 |
| 3832 | 897 | 112 | 991 |
| 3833 | 912 | 873 | 112 |
| 3834 | 525 | 88 | 124 |
| 3835 | 112 | 498 | 999 |
| 3836 | 72 | 319 | 139 |
| 3837 | 34 | 28 | 444 |
| 3838 | 561 | 916 | 50 |
| 3839 | 54 | 386 | 430 |
| 3840 | 381 | 112 | 58 |
| 3841 | 258 | 862 | 407 |
| 3842 | 2 | 93 | 39 |
| 3843 | 37 | 255 | 396 |
| 3844 | 112 | 514 | 516 |
| 3845 | 73 | 32 | 517 |
| 3846 | 323 | 95 | 19 |
| 3847 | 607 | 112 | 324 |
| 3848 | 495 | 6 | 312 |
| 3849 | 340 | 578 | 634 |
| 3850 | 57 | 143 | 778 |
| 3851 | 197 | 107 | 874 |
| 3852 | 8 | 673 | 562 |
| 3853 | 851 | 10 | 32 |
| 3854 | 137 | 6 | 812 |
| 3855 | 360 | 351 | 994 |
| 3856 | 971 | 731 | 889 |
| 3857 | 34 | 255 | 557 |
| 3858 | 325 | 262 | 37 |
| 3859 | 21 | 766 | 478 |
| 3860 | 64 | 403 | 275 |
| 3861 | 170 | 267 | 79 |
| 3862 | 570 | 30 | 178 |
| 3863 | 2 | 932 | 519 |
| 3864 | 972 | 107 | 152 |
| 3865 | 681 | 151 | 34 |
| 3866 | 108 | 115 | 105 |
| 3867 | 1 | 112 | 869 |
| 3868 | 775 | 323 | 58 |
| 3869 | 403 | 529 | 12 |
| 3870 | 49 | 58 | 136 |
| 3871 | 112 | 280 | 86 |
| 3872 | 335 | 6 | 100 |
| 3873 | 40 | 807 | 554 |
| 3874 | 208 | 118 | 25 |
| 3875 | 156 | 572 | 2 |
| 3876 | 63 | 872 | 98 |
| 3877 | 795 | 124 | 285 |
| 3878 | 481 | 518 | 10 |
| 3879 | 12 | 222 | 707 |
| 3880 | 866 | 66 | 647 |
| 3881 | 117 | 401 | 514 |
| 3882 | 954 | 715 | 18 |
| 3883 | 774 | 35 | 62 |
| 3884 | 112 | 40 | 263 |
| 3885 | 24 | 431 | 384 |
| 3886 | 162 | 112 | 259 |
| 3887 | 557 | 725 | 12 |
| 3888 | 50 | 157 | 136 |
| 3889 | 263 | 501 | 418 |
| 3890 | 137 | 476 | 47 |
| 3891 | 457 | 656 | 58 |
| 3892 | 78 | 776 | 364 |
| 3893 | 561 | 83 | 71 |
| 3894 | 477 | 66 | 56 |
| 3895 | 329 | 39 | 45 |
| 3896 | 95 | 546 | 354 |
| 3897 | 55 | 405 | 3 |
| 3898 | 84 | 35 | 755 |
| 3899 | 839 | 25 | 335 |
| 3900 | 427 | 995 | 83 |
| 3901 | 445 | 6 | 856 |
| 3902 | 151 | 786 | 756 |
| 3903 | 340 | 292 | 39 |
| 3904 | 43 | 184 | 599 |
| 3905 | 575 | 12 | 83 |
| 3906 | 818 | 163 | 12 |
| 3907 | 12 | 955 | 76 |
| 3908 | 540 | 45 | 731 |
| 3909 | 646 | 459 | 169 |
| 3910 | 12 | 955 | 937 |
| 3911 | 667 | 608 | 112 |
| 3912 | 372 | 118 | 255 |
| 3913 | 898 | 461 | 467 |
| 3914 | 37 | 97 | 25 |
| 3915 | 713 | 427 | 61 |
| 3916 | 45 | 540 | 832 |
| 3917 | 282 | 275 | 160 |
| 3918 | 593 | 56 | 947 |
| 3919 | 35 | 758 | 530 |
| 3920 | 94 | 132 | 643 |
| 3921 | 35 | 56 | 994 |
| 3922 | 107 | 332 | 354 |
| 3923 | 476 | 517 | 570 |
| 3924 | 73 | 263 | 731 |
| 3925 | 561 | 25 | 132 |
| 3926 | 29 | 234 | 45 |
| 3927 | 465 | 544 | 50 |
| 3928 | 202 | 149 | 469 |
| 3929 | 196 | 112 | 979 |
| 3930 | 95 | 641 | 28 |
| 3931 | 538 | 216 | 25 |
| 3932 | 410 | 45 | 192 |
| 3933 | 203 | 4 | 56 |
| 3934 | 3 | 32 | 979 |
| 3935 | 7 | 272 | 509 |
| 3936 | 494 | 745 | 112 |
| 3937 | 491 | 22 | 9 |
| 3938 | 3 | 785 | 351 |
| 3939 | 112 | 497 | 83 |
| 3940 | 622 | 335 | 282 |
| 3941 | 69 | 877 | 50 |
| 3942 | 781 | 935 | 112 |
| 3943 | 626 | 727 | 137 |
| 3944 | 252 | 35 | 150 |
| 3945 | 185 | 548 | 150 |
| 3946 | 813 | 283 | 64 |
| 3947 | 371 | 58 | 163 |
| 3948 | 61 | 658 | 611 |
| 3949 | 10 | 457 | 151 |
| 3950 | 36 | 169 | 594 |
| 3951 | 51 | 255 | 12 |
| 3952 | 945 | 18 | 112 |
| 3953 | 259 | 34 | 604 |
| 3954 | 192 | 3 | 908 |
| 3955 | 595 | 69 | 32 |
| 3956 | 22 | 72 | 616 |
| 3957 | 101 | 124 | 359 |
| 3958 | 975 | 712 | 255 |
| 3959 | 974 | 24 | 3 |
| 3960 | 308 | 334 | 873 |
| 3961 | 88 | 129 | 124 |
| 3962 | 351 | 157 | 405 |
| 3963 | 6 | 592 | 57 |
| 3964 | 32 | 124 | 511 |
| 3965 | 8 | 117 | 892 |
| 3966 | 731 | 498 | 183 |
| 3967 | 517 | 555 | 49 |
| 3968 | 2 | 865 | 696 |
| 3969 | 25 | 275 | 268 |
| 3970 | 337 | 292 | 149 |
| 3971 | 470 | 25 | 868 |
| 3972 | 401 | 596 | 145 |
| 3973 | 595 | 478 | 191 |
| 3974 | 36 | 500 | 413 |
| 3975 | 167 | 282 | 55 |
| 3976 | 891 | 47 | 496 |
| 3977 | 679 | 34 | 139 |
| 3978 | 458 | 29 | 103 |
| 3979 | 23 | 763 | 375 |
| 3980 | 12 | 679 | 346 |
| 3981 | 344 | 206 | 75 |
| 3982 | 3 | 9 | 218 |
| 3983 | 112 | 253 | 356 |
| 3984 | 112 | 349 | 171 |
| 3985 | 52 | 268 | 404 |
| 3986 | 186 | 683 | 124 |
| 3987 | 882 | 12 | 431 |
| 3988 | 133 | 673 | 64 |
| 3989 | 496 | 3 | 746 |
| 3990 | 979 | 333 | 3 |
| 3991 | 793 | 195 | 2 |
| 3992 | 435 | 363 | 58 |
| 3993 | 12 | 2 | 990 |
| 3994 | 122 | 244 | 268 |
| 3995 | 55 | 446 | 46 |
| 3996 | 35 | 975 | 464 |
| 3997 | 740 | 706 | 248 |
| 3998 | 18 | 120 | 70 |
| 3999 | 2 | 156 | 413 |
| 4000 | 118 | 63 | 90 |
| 4001 | 351 | 457 | 485 |
| 4002 | 716 | 79 | 409 |
| 4003 | 131 | 689 | 8 |
| 4004 | 594 | 9 | 155 |
| 4005 | 613 | 842 | 124 |
| 4006 | 5 | 963 | 244 |
| 4007 | 621 | 117 | 23 |
| 4008 | 60 | 317 | 112 |
| 4009 | 159 | 519 | 346 |
| 4010 | 826 | 124 | 476 |
| 4011 | 150 | 79 | 961 |
| 4012 | 360 | 312 | 25 |
| 4013 | 621 | 46 | 376 |
| 4014 | 7 | 669 | 709 |
| 4015 | 255 | 579 | 239 |
| 4016 | 188 | 645 | 61 |
| 4017 | 124 | 842 | 414 |
| 4018 | 341 | 35 | 654 |
| 4019 | 563 | 980 | 112 |
| 4020 | 609 | 124 | 753 |
| 4021 | 196 | 440 | 121 |
| 4022 | 60 | 49 | 857 |
| 4023 | 633 | 328 | 112 |
| 4024 | 55 | 210 | 609 |
| 4025 | 18 | 566 | 120 |
| 4026 | 894 | 118 | 5 |
| 4027 | 838 | 35 | 163 |
| 4028 | 282 | 598 | 83 |
| 4029 | 39 | 474 | 912 |
| 4030 | 948 | 278 | 354 |
| 4031 | 68 | 943 | 99 |
| 4032 | 54 | 435 | 401 |
| 4033 | 665 | 187 | 12 |
| 4034 | 304 | 599 | 256 |
| 4035 | 201 | 335 | 425 |
| 4036 | 641 | 202 | 731 |
| 4037 | 244 | 834 | 494 |
| 4038 | 691 | 283 | 58 |
| 4039 | 2 | 538 | 223 |
| 4040 | 23 | 318 | 271 |
| 4041 | 890 | 584 | 12 |
| 4042 | 765 | 81 | 412 |
| 4043 | 867 | 457 | 18 |
| 4044 | 401 | 507 | 472 |
| 4045 | 191 | 118 | 995 |
| 4046 | 433 | 12 | 346 |
| 4047 | 118 | 25 | 205 |
| 4048 | 422 | 452 | 63 |
| 4049 | 11 | 76 | 124 |
| 4050 | 982 | 124 | 378 |
| 4051 | 555 | 292 | 75 |
| 4052 | 807 | 810 | 155 |
| 4053 | 124 | 545 | 165 |
| 4054 | 143 | 133 | 112 |
| 4055 | 401 | 50 | 959 |
| 4056 | 45 | 108 | 145 |
| 4057 | 283 | 24 | 409 |
| 4058 | 149 | 67 | 524 |
| 4059 | 60 | 23 | 182 |
| 4060 | 54 | 796 | 593 |
| 4061 | 627 | 43 | 32 |
| 4062 | 863 | 112 | 403 |
| 4063 | 151 | 6 | 455 |
| 4064 | 916 | 658 | 6 |
| 4065 | 97 | 43 | 21 |
| 4066 | 45 | 397 | 496 |
| 4067 | 262 | 386 | 25 |
| 4068 | 12 | 41 | 647 |
| 4069 | 864 | 175 | 340 |
| 4070 | 320 | 7 | 938 |
| 4071 | 32 | 407 | 833 |
| 4072 | 265 | 18 | 898 |
| 4073 | 124 | 403 | 40 |
| 4074 | 178 | 484 | 37 |
| 4075 | 18 | 785 | 859 |
| 4076 | 719 | 358 | 281 |
| 4077 | 268 | 674 | 52 |
| 4078 | 211 | 112 | 231 |
| 4079 | 3 | 25 | 5 |
| 4080 | 64 | 341 | 84 |
| 4081 | 320 | 256 | 124 |
| 4082 | 35 | 329 | 72 |
| 4083 | 16 | 493 | 91 |
| 4084 | 822 | 529 | 5 |
| 4085 | 506 | 402 | 404 |
| 4086 | 8 | 606 | 917 |
| 4087 | 441 | 324 | 289 |
| 4088 | 16 | 658 | 695 |
| 4089 | 519 | 112 | 719 |
| 4090 | 8 | 79 | 93 |
| 4091 | 47 | 594 | 204 |
| 4092 | 112 | 110 | 974 |
| 4093 | 737 | 34 | 90 |
| 4094 | 18 | 514 | 624 |
| 4095 | 24 | 73 | 78 |
| 4096 | 189 | 627 | 2 |
| 4097 | 985 | 689 | 112 |
| 4098 | 112 | 113 | 919 |
| 4099 | 434 | 66 | 124 |
| 4100 | 83 | 566 | 37 |
| 4101 | 190 | 599 | 441 |
| 4102 | 4 | 1 | 415 |
| 4103 | 473 | 130 | 28 |
| 4104 | 945 | 137 | 134 |
| 4105 | 133 | 341 | 948 |
| 4106 | 64 | 66 | 628 |
| 4107 | 120 | 108 | 893 |
| 4108 | 34 | 335 | 822 |
| 4109 | 421 | 605 | 45 |
| 4110 | 321 | 112 | 861 |
| 4111 | 180 | 112 | 207 |
| 4112 | 124 | 80 | 82 |
| 4113 | 859 | 55 | 101 |
| 4114 | 320 | 107 | 55 |
| 4115 | 340 | 847 | 282 |
| 4116 | 22 | 79 | 585 |
| 4117 | 804 | 704 | 617 |
| 4118 | 12 | 637 | 444 |
| 4119 | 66 | 959 | 752 |
| 4120 | 50 | 458 | 892 |
| 4121 | 324 | 18 | 499 |
| 4122 | 125 | 579 | 483 |
| 4123 | 25 | 862 | 98 |
| 4124 | 39 | 63 | 922 |
| 4125 | 599 | 398 | 371 |
| 4126 | 123 | 474 | 19 |
| 4127 | 152 | 919 | 3 |
| 4128 | 2 | 345 | 127 |
| 4129 | 36 | 573 | 915 |
| 4130 | 482 | 112 | 532 |
| 4131 | 35 | 85 | 807 |
| 4132 | 69 | 660 | 49 |
| 4133 | 36 | 892 | 169 |
| 4134 | 12 | 141 | 895 |
| 4135 | 118 | 177 | 508 |
| 4136 | 584 | 121 | 170 |
| 4137 | 68 | 536 | 907 |
| 4138 | 193 | 25 | 115 |
| 4139 | 483 | 788 | 21 |
| 4140 | 61 | 148 | 819 |
| 4141 | 179 | 35 | 31 |
| 4142 | 962 | 99 | 112 |
| 4143 | 146 | 599 | 76 |
| 4144 | 154 | 21 | 502 |
| 4145 | 972 | 351 | 167 |
| 4146 | 158 | 690 | 46 |
| 4147 | 56 | 463 | 38 |
| 4148 | 126 | 593 | 315 |
| 4149 | 8 | 510 | 819 |
| 4150 | 1 | 759 | 810 |
| 4151 | 798 | 5 | 124 |
| 4152 | 360 | 121 | 710 |
| 4153 | 810 | 1 | 533 |
| 4154 | 190 | 517 | 136 |
| 4155 | 737 | 625 | 149 |
| 4156 | 370 | 1 | 84 |
| 4157 | 159 | 577 | 707 |
| 4158 | 588 | 559 | 198 |
| 4159 | 52 | 58 | 854 |
| 4160 | 58 | 873 | 283 |
| 4161 | 81 | 976 | 702 |
| 4162 | 409 | 200 | 865 |
| 4163 | 269 | 322 | 25 |
| 4164 | 248 | 117 | 21 |
| 4165 | 264 | 55 | 6 |
| 4166 | 270 | 920 | 335 |
| 4167 | 633 | 440 | 12 |
| 4168 | 35 | 170 | 18 |
| 4169 | 765 | 36 | 192 |
| 4170 | 12 | 738 | 705 |
| 4171 | 93 | 655 | 898 |
| 4172 | 691 | 416 | 318 |
| 4173 | 588 | 533 | 169 |
| 4174 | 88 | 480 | 513 |
| 4175 | 32 | 207 | 291 |
| 4176 | 977 | 889 | 2 |
| 4177 | 161 | 440 | 742 |
| 4178 | 371 | 996 | 629 |
| 4179 | 533 | 44 | 368 |
| 4180 | 886 | 105 | 190 |
| 4181 | 112 | 338 | 160 |
| 4182 | 12 | 851 | 10 |
| 4183 | 750 | 736 | 12 |
| 4184 | 79 | 555 | 112 |
| 4185 | 803 | 49 | 35 |
| 4186 | 78 | 49 | 533 |
| 4187 | 470 | 430 | 3 |
| 4188 | 890 | 509 | 330 |
| 4189 | 937 | 598 | 45 |
| 4190 | 78 | 58 | 50 |
| 4191 | 927 | 376 | 9 |
| 4192 | 260 | 12 | 842 |
| 4193 | 761 | 199 | 399 |
| 4194 | 366 | 982 | 371 |
| 4195 | 716 | 194 | 124 |
| 4196 | 851 | 112 | 165 |
| 4197 | 566 | 439 | 69 |
| 4198 | 34 | 17 | 587 |
| 4199 | 231 | 112 | 326 |
| 4200 | 940 | 654 | 166 |
| 4201 | 356 | 335 | 820 |
| 4202 | 78 | 16 | 820 |
| 4203 | 37 | 366 | 26 |
| 4204 | 95 | 50 | 682 |
| 4205 | 942 | 112 | 282 |
| 4206 | 28 | 121 | 768 |
| 4207 | 761 | 32 | 407 |
| 4208 | 297 | 255 | 285 |
| 4209 | 440 | 53 | 494 |
| 4210 | 828 | 1 | 203 |
| 4211 | 124 | 764 | 134 |
| 4212 | 873 | 43 | 888 |
| 4213 | 690 | 110 | 195 |
| 4214 | 827 | 121 | 644 |
| 4215 | 405 | 874 | 47 |
| 4216 | 946 | 350 | 341 |
| 4217 | 4 | 746 | 951 |
| 4218 | 81 | 112 | 607 |
| 4219 | 130 | 685 | 42 |
| 4220 | 638 | 39 | 480 |
| 4221 | 801 | 731 | 4 |
| 4222 | 23 | 170 | 46 |
| 4223 | 2 | 460 | 275 |
| 4224 | 395 | 2 | 19 |
| 4225 | 885 | 34 | 110 |
| 4226 | 611 | 148 | 61 |
| 4227 | 124 | 502 | 45 |
| 4228 | 190 | 92 | 472 |
| 4229 | 95 | 850 | 143 |
| 4230 | 150 | 97 | 107 |
| 4231 | 324 | 45 | 745 |
| 4232 | 100 | 362 | 45 |
| 4233 | 275 | 569 | 119 |
| 4234 | 112 | 840 | 666 |
| 4235 | 542 | 647 | 651 |
| 4236 | 932 | 409 | 124 |
| 4237 | 883 | 21 | 45 |
| 4238 | 110 | 81 | 351 |
| 4239 | 342 | 127 | 1 |
| 4240 | 470 | 657 | 121 |
| 4241 | 127 | 136 | 305 |
| 4242 | 439 | 603 | 838 |
| 4243 | 146 | 442 | 25 |
| 4244 | 643 | 12 | 172 |
| 4245 | 17 | 144 | 45 |
| 4246 | 158 | 510 | 76 |
| 4247 | 395 | 390 | 128 |
| 4248 | 55 | 133 | 771 |
| 4249 | 79 | 40 | 314 |
| 4250 | 389 | 45 | 12 |
| 4251 | 289 | 35 | 792 |
| 4252 | 611 | 112 | 2 |
| 4253 | 827 | 860 | 134 |
| 4254 | 6 | 480 | 135 |
| 4255 | 160 | 969 | 3 |
| 4256 | 822 | 811 | 124 |
| 4257 | 627 | 731 | 231 |
| 4258 | 112 | 582 | 111 |
| 4259 | 147 | 79 | 607 |
| 4260 | 507 | 509 | 112 |
| 4261 | 118 | 336 | 945 |
| 4262 | 112 | 779 | 981 |
| 4263 | 508 | 778 | 34 |
| 4264 | 459 | 3 | 472 |
| 4265 | 92 | 12 | 214 |
| 4266 | 560 | 2 | 229 |
| 4267 | 240 | 6 | 56 |
| 4268 | 112 | 859 | 4 |
| 4269 | 862 | 360 | 115 |
| 4270 | 823 | 25 | 289 |
| 4271 | 375 | 112 | 108 |
| 4272 | 455 | 45 | 858 |
| 4273 | 809 | 78 | 126 |
| 4274 | 16 | 658 | 873 |
| 4275 | 36 | 248 | 501 |
| 4276 | 660 | 302 | 127 |
| 4277 | 702 | 35 | 989 |
| 4278 | 80 | 260 | 39 |
| 4279 | 25 | 282 | 492 |
| 4280 | 205 | 715 | 159 |
| 4281 | 31 | 409 | 281 |
| 4282 | 50 | 811 | 1000 |
| 4283 | 393 | 22 | 67 |
| 4284 | 412 | 199 | 371 |
| 4285 | 149 | 348 | 427 |
| 4286 | 36 | 18 | 11 |
| 4287 | 78 | 66 | 651 |
| 4288 | 268 | 283 | 207 |
| 4289 | 5 | 41 | 804 |
| 4290 | 387 | 362 | 45 |
| 4291 | 924 | 788 | 63 |
| 4292 | 34 | 338 | 765 |
| 4293 | 171 | 846 | 78 |
| 4294 | 803 | 55 | 50 |
| 4295 | 304 | 61 | 544 |
| 4296 | 577 | 47 | 425 |
| 4297 | 12 | 882 | 969 |
| 4298 | 39 | 893 | 149 |
| 4299 | 99 | 756 | 855 |
| 4300 | 443 | 87 | 397 |
| 4301 | 134 | 55 | 130 |
| 4302 | 598 | 18 | 961 |
| 4303 | 622 | 163 | 152 |
| 4304 | 232 | 18 | 188 |
| 4305 | 99 | 988 | 36 |
| 4306 | 112 | 919 | 566 |
| 4307 | 78 | 112 | 927 |
| 4308 | 355 | 351 | 283 |
| 4309 | 806 | 112 | 534 |
| 4310 | 320 | 8 | 55 |
| 4311 | 317 | 542 | 22 |
| 4312 | 593 | 50 | 10 |
| 4313 | 114 | 64 | 43 |
| 4314 | 102 | 651 | 627 |
| 4315 | 282 | 578 | 11 |
| 4316 | 169 | 213 | 294 |
| 4317 | 579 | 79 | 25 |
| 4318 | 417 | 199 | 35 |
| 4319 | 578 | 44 | 467 |
| 4320 | 25 | 3 | 692 |
| 4321 | 418 | 738 | 10 |
| 4322 | 587 | 244 | 921 |
| 4323 | 781 | 145 | 825 |
| 4324 | 392 | 34 | 813 |
| 4325 | 47 | 626 | 5 |
| 4326 | 132 | 124 | 894 |
| 4327 | 158 | 745 | 411 |
| 4328 | 342 | 236 | 121 |
| 4329 | 905 | 5 | 464 |
| 4330 | 112 | 179 | 64 |
| 4331 | 890 | 157 | 12 |
| 4332 | 142 | 78 | 342 |
| 4333 | 416 | 349 | 879 |
| 4334 | 28 | 115 | 238 |
| 4335 | 1 | 925 | 411 |
| 4336 | 280 | 117 | 401 |
| 4337 | 100 | 6 | 578 |
| 4338 | 125 | 281 | 244 |
| 4339 | 777 | 957 | 124 |
| 4340 | 373 | 706 | 773 |
| 4341 | 476 | 210 | 23 |
| 4342 | 124 | 606 | 160 |
| 4343 | 945 | 124 | 37 |
| 4344 | 128 | 149 | 83 |
| 4345 | 18 | 390 | 340 |
| 4346 | 47 | 648 | 496 |
| 4347 | 510 | 304 | 162 |
| 4348 | 47 | 566 | 39 |
| 4349 | 458 | 16 | 351 |
| 4350 | 16 | 761 | 21 |
| 4351 | 619 | 69 | 696 |
| 4352 | 98 | 395 | 111 |
| 4353 | 922 | 112 | 898 |
| 4354 | 12 | 693 | 100 |
| 4355 | 97 | 112 | 909 |
| 4356 | 142 | 37 | 83 |
| 4357 | 35 | 993 | 5 |
| 4358 | 37 | 702 | 155 |
| 4359 | 763 | 544 | 148 |
| 4360 | 623 | 78 | 102 |
| 4361 | 395 | 35 | 407 |
| 4362 | 707 | 606 | 112 |
| 4363 | 39 | 599 | 188 |
| 4364 | 81 | 625 | 853 |
| 4365 | 82 | 948 | 47 |
| 4366 | 125 | 352 | 431 |
| 4367 | 464 | 132 | 891 |
| 4368 | 99 | 426 | 60 |
| 4369 | 997 | 641 | 12 |
| 4370 | 817 | 193 | 696 |
| 4371 | 36 | 12 | 129 |
| 4372 | 551 | 553 | 61 |
| 4373 | 641 | 124 | 980 |
| 4374 | 297 | 1 | 3 |
| 4375 | 60 | 16 | 224 |
| 4376 | 810 | 478 | 126 |
| 4377 | 841 | 543 | 35 |
| 4378 | 112 | 603 | 739 |
| 4379 | 35 | 287 | 194 |
| 4380 | 349 | 381 | 837 |
| 4381 | 27 | 895 | 18 |
| 4382 | 349 | 585 | 746 |
| 4383 | 22 | 765 | 462 |
| 4384 | 36 | 69 | 289 |
| 4385 | 121 | 659 | 956 |
| 4386 | 91 | 440 | 838 |
| 4387 | 772 | 743 | 185 |
| 4388 | 558 | 34 | 5 |
| 4389 | 395 | 44 | 55 |
| 4390 | 934 | 360 | 18 |
| 4391 | 312 | 611 | 18 |
| 4392 | 268 | 826 | 740 |
| 4393 | 465 | 165 | 599 |
| 4394 | 810 | 499 | 18 |
| 4395 | 707 | 626 | 1 |
| 4396 | 3 | 679 | 278 |
| 4397 | 8 | 21 | 467 |
| 4398 | 953 | 3 | 974 |
| 4399 | 169 | 112 | 540 |
| 4400 | 143 | 21 | 352 |
| 4401 | 59 | 601 | 92 |
| 4402 | 578 | 7 | 109 |
| 4403 | 78 | 11 | 130 |
| 4404 | 561 | 503 | 889 |
| 4405 | 216 | 1 | 529 |
| 4406 | 69 | 46 | 885 |
| 4407 | 970 | 558 | 566 |
| 4408 | 598 | 223 | 18 |
| 4409 | 204 | 83 | 577 |
| 4410 | 65 | 34 | 709 |
| 4411 | 114 | 550 | 61 |
| 4412 | 74 | 12 | 696 |
| 4413 | 905 | 351 | 354 |
| 4414 | 34 | 8 | 746 |
| 4415 | 159 | 8 | 990 |
| 4416 | 56 | 665 | 35 |
| 4417 | 8 | 508 | 35 |
| 4418 | 484 | 508 | 182 |
| 4419 | 104 | 60 | 94 |
| 4420 | 2 | 963 | 777 |
| 4421 | 12 | 707 | 474 |
| 4422 | 654 | 3 | 448 |
| 4423 | 67 | 810 | 658 |
| 4424 | 356 | 865 | 112 |
| 4425 | 120 | 166 | 52 |
| 4426 | 38 | 118 | 504 |
| 4427 | 35 | 530 | 654 |
| 4428 | 18 | 941 | 516 |
| 4429 | 401 | 48 | 58 |
| 4430 | 71 | 51 | 566 |
| 4431 | 743 | 47 | 50 |
| 4432 | 39 | 2 | 419 |
| 4433 | 35 | 586 | 128 |
| 4434 | 112 | 791 | 545 |
| 4435 | 169 | 540 | 321 |
| 4436 | 79 | 16 | 105 |
| 4437 | 876 | 12 | 897 |
| 4438 | 925 | 470 | 375 |
| 4439 | 66 | 715 | 426 |
| 4440 | 988 | 21 | 56 |
| 4441 | 741 | 3 | 816 |
| 4442 | 565 | 131 | 50 |
| 4443 | 241 | 731 | 131 |
| 4444 | 86 | 57 | 6 |
| 4445 | 10 | 125 | 629 |
| 4446 | 75 | 49 | 931 |
| 4447 | 35 | 204 | 172 |
| 4448 | 697 | 112 | 330 |
| 4449 | 79 | 308 | 412 |
| 4450 | 124 | 790 | 730 |
| 4451 | 159 | 866 | 354 |
| 4452 | 588 | 40 | 378 |
| 4453 | 301 | 12 | 56 |
| 4454 | 12 | 93 | 32 |
| 4455 | 49 | 435 | 39 |
| 4456 | 411 | 67 | 31 |
| 4457 | 73 | 18 | 171 |
| 4458 | 59 | 130 | 351 |
| 4459 | 384 | 765 | 112 |
| 4460 | 112 | 90 | 733 |
| 4461 | 87 | 717 | 12 |
| 4462 | 196 | 641 | 814 |
| 4463 | 159 | 157 | 329 |
| 4464 | 706 | 105 | 5 |
| 4465 | 811 | 124 | 834 |
| 4466 | 401 | 70 | 712 |
| 4467 | 808 | 12 | 934 |
| 4468 | 2 | 965 | 195 |
| 4469 | 23 | 728 | 264 |
| 4470 | 368 | 518 | 112 |
| 4471 | 92 | 22 | 748 |
| 4472 | 58 | 791 | 877 |
| 4473 | 34 | 806 | 548 |
| 4474 | 617 | 458 | 10 |
| 4475 | 8 | 506 | 13 |
| 4476 | 112 | 321 | 618 |
| 4477 | 814 | 386 | 46 |
| 4478 | 124 | 695 | 142 |
| 4479 | 34 | 612 | 79 |
| 4480 | 319 | 113 | 644 |
| 4481 | 78 | 362 | 6 |
| 4482 | 17 | 112 | 269 |
| 4483 | 810 | 53 | 47 |
| 4484 | 601 | 185 | 305 |
| 4485 | 207 | 389 | 32 |
| 4486 | 446 | 622 | 78 |
| 4487 | 18 | 230 | 316 |
| 4488 | 359 | 39 | 40 |
| 4489 | 260 | 3 | 562 |
| 4490 | 124 | 22 | 408 |
| 4491 | 950 | 621 | 64 |
| 4492 | 46 | 287 | 94 |
| 4493 | 889 | 112 | 181 |
| 4494 | 725 | 319 | 9 |
| 4495 | 256 | 35 | 71 |
| 4496 | 56 | 112 | 737 |
| 4497 | 665 | 124 | 979 |
| 4498 | 791 | 12 | 511 |
| 4499 | 498 | 234 | 112 |
| 4500 | 155 | 410 | 841 |
| 4501 | 3 | 126 | 961 |
| 4502 | 962 | 127 | 131 |
| 4503 | 382 | 204 | 8 |
| 4504 | 35 | 322 | 376 |
| 4505 | 568 | 114 | 6 |
| 4506 | 43 | 555 | 987 |
| 4507 | 897 | 34 | 601 |
| 4508 | 32 | 282 | 123 |
| 4509 | 159 | 190 | 24 |
| 4510 | 496 | 112 | 841 |
| 4511 | 292 | 278 | 19 |
| 4512 | 12 | 531 | 7 |
| 4513 | 364 | 614 | 124 |
| 4514 | 125 | 112 | 803 |
| 4515 | 34 | 3 | 185 |
| 4516 | 89 | 889 | 82 |
| 4517 | 243 | 15 | 506 |
| 4518 | 43 | 129 | 62 |
| 4519 | 506 | 584 | 351 |
| 4520 | 407 | 34 | 97 |
| 4521 | 322 | 342 | 599 |
| 4522 | 145 | 241 | 823 |
| 4523 | 419 | 166 | 518 |
| 4524 | 183 | 862 | 951 |
| 4525 | 2 | 680 | 16 |
| 4526 | 112 | 841 | 469 |
| 4527 | 35 | 943 | 342 |
| 4528 | 8 | 649 | 6 |
| 4529 | 391 | 171 | 304 |
| 4530 | 38 | 81 | 174 |
| 4531 | 653 | 24 | 196 |
| 4532 | 651 | 783 | 36 |
| 4533 | 799 | 71 | 112 |
| 4534 | 831 | 951 | 46 |
| 4535 | 47 | 474 | 22 |
| 4536 | 1 | 820 | 734 |
| 4537 | 413 | 268 | 140 |
| 4538 | 3 | 186 | 297 |
| 4539 | 605 | 199 | 35 |
| 4540 | 915 | 60 | 660 |
| 4541 | 233 | 76 | 112 |
| 4542 | 3 | 410 | 141 |
| 4543 | 34 | 45 | 179 |
| 4544 | 302 | 18 | 960 |
| 4545 | 32 | 196 | 109 |
| 4546 | 507 | 893 | 112 |
| 4547 | 152 | 64 | 258 |
| 4548 | 16 | 894 | 12 |
| 4549 | 68 | 295 | 597 |
| 4550 | 537 | 180 | 192 |
| 4551 | 642 | 133 | 288 |
| 4552 | 785 | 17 | 207 |
| 4553 | 834 | 12 | 15 |
| 4554 | 67 | 473 | 935 |
| 4555 | 77 | 350 | 71 |
| 4556 | 501 | 576 | 34 |
| 4557 | 932 | 207 | 167 |
| 4558 | 411 | 255 | 391 |
| 4559 | 45 | 88 | 130 |
| 4560 | 110 | 731 | 96 |
| 4561 | 189 | 79 | 941 |
| 4562 | 390 | 500 | 338 |
| 4563 | 764 | 43 | 286 |
| 4564 | 80 | 465 | 150 |
| 4565 | 118 | 58 | 112 |
| 4566 | 325 | 12 | 602 |
| 4567 | 713 | 329 | 43 |
| 4568 | 584 | 34 | 440 |
| 4569 | 204 | 915 | 439 |
| 4570 | 128 | 514 | 65 |
| 4571 | 473 | 605 | 275 |
| 4572 | 112 | 716 | 312 |
| 4573 | 22 | 45 | 611 |
| 4574 | 16 | 585 | 658 |
| 4575 | 709 | 278 | 118 |
| 4576 | 791 | 523 | 533 |
| 4577 | 601 | 112 | 757 |
| 4578 | 34 | 833 | 496 |
| 4579 | 289 | 743 | 127 |
| 4580 | 124 | 283 | 425 |
| 4581 | 31 | 558 | 205 |
| 4582 | 269 | 340 | 998 |
| 4583 | 132 | 597 | 158 |
| 4584 | 592 | 72 | 79 |
| 4585 | 599 | 190 | 343 |
| 4586 | 18 | 278 | 676 |
| 4587 | 569 | 309 | 65 |
| 4588 | 561 | 926 | 478 |
| 4589 | 3 | 588 | 84 |
| 4590 | 253 | 382 | 279 |
| 4591 | 248 | 9 | 311 |
| 4592 | 230 | 474 | 3 |
| 4593 | 139 | 380 | 2 |
| 4594 | 169 | 533 | 985 |
| 4595 | 78 | 208 | 112 |
| 4596 | 536 | 593 | 712 |
| 4597 | 631 | 32 | 370 |
| 4598 | 393 | 256 | 599 |
| 4599 | 137 | 501 | 119 |
| 4600 | 689 | 69 | 403 |
| 4601 | 371 | 306 | 3 |
| 4602 | 155 | 994 | 397 |
| 4603 | 476 | 124 | 662 |
| 4604 | 2 | 454 | 493 |
| 4605 | 932 | 902 | 878 |
| 4606 | 686 | 912 | 709 |
| 4607 | 962 | 47 | 12 |
| 4608 | 128 | 457 | 79 |
| 4609 | 862 | 35 | 760 |
| 4610 | 771 | 561 | 17 |
| 4611 | 146 | 159 | 957 |
| 4612 | 775 | 50 | 124 |
| 4613 | 799 | 395 | 397 |
| 4614 | 996 | 73 | 349 |
| 4615 | 8 | 2 | 395 |
| 4616 | 128 | 92 | 2 |
| 4617 | 199 | 124 | 522 |
| 4618 | 171 | 725 | 37 |
| 4619 | 281 | 112 | 812 |
| 4620 | 709 | 260 | 112 |
| 4621 | 79 | 107 | 123 |
| 4622 | 25 | 58 | 41 |
| 4623 | 47 | 61 | 213 |
| 4624 | 419 | 166 | 40 |
| 4625 | 83 | 407 | 6 |
| 4626 | 834 | 122 | 193 |
| 4627 | 28 | 339 | 646 |
| 4628 | 993 | 22 | 124 |
| 4629 | 419 | 124 | 480 |
| 4630 | 920 | 743 | 191 |
| 4631 | 235 | 36 | 35 |
| 4632 | 376 | 132 | 114 |
| 4633 | 5 | 676 | 71 |
| 4634 | 258 | 55 | 6 |
| 4635 | 807 | 155 | 897 |
| 4636 | 43 | 923 | 184 |
| 4637 | 811 | 642 | 731 |
| 4638 | 189 | 198 | 36 |
| 4639 | 876 | 17 | 804 |
| 4640 | 52 | 268 | 614 |
| 4641 | 270 | 611 | 877 |
| 4642 | 599 | 422 | 398 |
| 4643 | 920 | 18 | 788 |
| 4644 | 621 | 971 | 371 |
| 4645 | 189 | 22 | 5 |
| 4646 | 60 | 3 | 873 |
| 4647 | 112 | 478 | 597 |
| 4648 | 487 | 345 | 50 |
| 4649 | 17 | 68 | 2 |
| 4650 | 5 | 365 | 22 |
| 4651 | 3 | 749 | 1 |
| 4652 | 112 | 253 | 544 |
| 4653 | 638 | 45 | 765 |
| 4654 | 34 | 342 | 953 |
| 4655 | 1 | 414 | 3 |
| 4656 | 32 | 12 | 930 |
| 4657 | 794 | 999 | 743 |
| 4658 | 282 | 594 | 19 |
| 4659 | 351 | 171 | 941 |
| 4660 | 54 | 21 | 558 |
| 4661 | 561 | 107 | 124 |
| 4662 | 53 | 835 | 45 |
| 4663 | 920 | 182 | 145 |
| 4664 | 452 | 583 | 35 |
| 4665 | 822 | 421 | 45 |
| 4666 | 351 | 17 | 74 |
| 4667 | 156 | 351 | 157 |
| 4668 | 308 | 29 | 391 |
| 4669 | 305 | 660 | 484 |
| 4670 | 303 | 250 | 34 |
| 4671 | 195 | 118 | 218 |
| 4672 | 373 | 199 | 290 |
| 4673 | 789 | 897 | 117 |
| 4674 | 131 | 12 | 919 |
| 4675 | 92 | 406 | 400 |
| 4676 | 304 | 533 | 583 |
| 4677 | 626 | 4 | 644 |
| 4678 | 147 | 81 | 867 |
| 4679 | 478 | 66 | 735 |
| 4680 | 922 | 112 | 806 |
| 4681 | 21 | 369 | 5 |
| 4682 | 92 | 599 | 916 |
| 4683 | 127 | 5 | 154 |
| 4684 | 788 | 668 | 12 |
| 4685 | 130 | 668 | 636 |
| 4686 | 43 | 317 | 8 |
| 4687 | 924 | 390 | 362 |
| 4688 | 185 | 436 | 112 |
| 4689 | 533 | 539 | 255 |
| 4690 | 31 | 907 | 383 |
| 4691 | 35 | 131 | 152 |
| 4692 | 980 | 981 | 441 |
| 4693 | 53 | 2 | 789 |
| 4694 | 129 | 972 | 371 |
| 4695 | 614 | 19 | 50 |
| 4696 | 459 | 169 | 835 |
| 4697 | 28 | 634 | 995 |
| 4698 | 890 | 45 | 519 |
| 4699 | 69 | 953 | 418 |
| 4700 | 662 | 805 | 45 |
| 4701 | 323 | 421 | 152 |
| 4702 | 940 | 816 | 112 |
| 4703 | 426 | 12 | 77 |
| 4704 | 149 | 460 | 924 |
| 4705 | 20 | 668 | 112 |
| 4706 | 405 | 34 | 187 |
| 4707 | 304 | 241 | 35 |
| 4708 | 350 | 770 | 658 |
| 4709 | 400 | 3 | 335 |
| 4710 | 959 | 90 | 112 |
| 4711 | 457 | 995 | 121 |
| 4712 | 986 | 960 | 118 |
| 4713 | 569 | 65 | 948 |
| 4714 | 585 | 2 | 664 |
| 4715 | 947 | 159 | 319 |
| 4716 | 930 | 112 | 2 |
| 4717 | 18 | 58 | 534 |
| 4718 | 429 | 5 | 45 |
| 4719 | 185 | 99 | 408 |
| 4720 | 18 | 54 | 980 |
| 4721 | 831 | 124 | 955 |
| 4722 | 348 | 15 | 599 |
| 4723 | 52 | 89 | 96 |
| 4724 | 512 | 356 | 124 |
| 4725 | 876 | 39 | 642 |
| 4726 | 112 | 335 | 777 |
| 4727 | 542 | 765 | 23 |
| 4728 | 112 | 55 | 976 |
| 4729 | 634 | 79 | 614 |
| 4730 | 651 | 1 | 45 |
| 4731 | 352 | 382 | 7 |
| 4732 | 160 | 859 | 112 |
| 4733 | 859 | 190 | 3 |
| 4734 | 129 | 55 | 172 |
| 4735 | 124 | 659 | 297 |
| 4736 | 3 | 996 | 371 |
| 4737 | 546 | 560 | 337 |
| 4738 | 595 | 499 | 304 |
| 4739 | 981 | 872 | 34 |
| 4740 | 170 | 690 | 58 |
| 4741 | 711 | 155 | 12 |
| 4742 | 595 | 524 | 22 |
| 4743 | 65 | 708 | 579 |
| 4744 | 338 | 595 | 838 |
| 4745 | 853 | 54 | 81 |
| 4746 | 411 | 462 | 427 |
| 4747 | 132 | 304 | 327 |
| 4748 | 35 | 837 | 84 |
| 4749 | 313 | 540 | 3 |
| 4750 | 963 | 569 | 603 |
| 4751 | 484 | 79 | 798 |
| 4752 | 831 | 166 | 641 |
| 4753 | 573 | 484 | 115 |
| 4754 | 316 | 588 | 244 |
| 4755 | 1000 | 206 | 392 |
| 4756 | 812 | 146 | 137 |
| 4757 | 300 | 229 | 2 |
| 4758 | 119 | 394 | 6 |
| 4759 | 178 | 483 | 338 |
| 4760 | 315 | 2 | 215 |
| 4761 | 401 | 934 | 408 |
| 4762 | 118 | 93 | 472 |
| 4763 | 27 | 35 | 746 |
| 4764 | 461 | 536 | 55 |
| 4765 | 574 | 112 | 605 |
| 4766 | 12 | 78 | 351 |
| 4767 | 377 | 193 | 114 |
| 4768 | 764 | 324 | 39 |
| 4769 | 863 | 39 | 67 |
| 4770 | 461 | 967 | 426 |
| 4771 | 174 | 98 | 551 |
| 4772 | 79 | 604 | 47 |
| 4773 | 954 | 401 | 514 |
| 4774 | 621 | 36 | 19 |
| 4775 | 429 | 251 | 112 |
| 4776 | 66 | 286 | 4 |
| 4777 | 572 | 395 | 96 |
| 4778 | 19 | 824 | 12 |
| 4779 | 319 | 16 | 699 |
| 4780 | 599 | 619 | 20 |
| 4781 | 112 | 746 | 652 |
| 4782 | 112 | 455 | 12 |
| 4783 | 329 | 311 | 36 |
| 4784 | 132 | 755 | 195 |
| 4785 | 998 | 604 | 510 |
| 4786 | 29 | 57 | 593 |
| 4787 | 63 | 798 | 49 |
| 4788 | 959 | 112 | 268 |
| 4789 | 32 | 62 | 461 |
| 4790 | 892 | 626 | 188 |
| 4791 | 945 | 81 | 765 |
| 4792 | 614 | 69 | 8 |
| 4793 | 370 | 19 | 54 |
| 4794 | 54 | 20 | 64 |
| 4795 | 682 | 23 | 978 |
| 4796 | 5 | 411 | 543 |
| 4797 | 63 | 655 | 98 |
| 4798 | 1 | 665 | 800 |
| 4799 | 299 | 3 | 264 |
| 4800 | 69 | 23 | 5 |
| 4801 | 89 | 247 | 84 |
| 4802 | 568 | 569 | 55 |
| 4803 | 311 | 690 | 58 |
| 4804 | 746 | 112 | 594 |
| 4805 | 579 | 765 | 65 |
| 4806 | 817 | 140 | 43 |
| 4807 | 191 | 5 | 282 |
| 4808 | 537 | 139 | 136 |
| 4809 | 843 | 2 | 197 |
| 4810 | 904 | 952 | 37 |
| 4811 | 96 | 49 | 252 |
| 4812 | 167 | 191 | 12 |
| 4813 | 445 | 50 | 961 |
| 4814 | 298 | 22 | 107 |
| 4815 | 191 | 897 | 316 |
| 4816 | 230 | 401 | 576 |
| 4817 | 275 | 320 | 35 |
| 4818 | 302 | 551 | 810 |
| 4819 | 124 | 2 | 756 |
| 4820 | 191 | 403 | 2 |
| 4821 | 791 | 248 | 448 |
| 4822 | 483 | 158 | 233 |
| 4823 | 195 | 997 | 90 |
| 4824 | 419 | 593 | 658 |
| 4825 | 124 | 480 | 421 |
| 4826 | 959 | 112 | 442 |
| 4827 | 112 | 687 | 709 |
| 4828 | 750 | 445 | 112 |
| 4829 | 136 | 144 | 669 |
| 4830 | 21 | 877 | 838 |
| 4831 | 397 | 10 | 110 |
| 4832 | 188 | 508 | 627 |
| 4833 | 25 | 564 | 133 |
| 4834 | 112 | 375 | 407 |
| 4835 | 29 | 33 | 656 |
| 4836 | 107 | 129 | 999 |
| 4837 | 255 | 43 | 226 |
| 4838 | 520 | 112 | 133 |
| 4839 | 863 | 124 | 359 |
| 4840 | 45 | 21 | 321 |
| 4841 | 157 | 7 | 763 |
| 4842 | 414 | 298 | 102 |
| 4843 | 145 | 388 | 330 |
| 4844 | 997 | 747 | 112 |
| 4845 | 706 | 95 | 2 |
| 4846 | 124 | 349 | 61 |
| 4847 | 880 | 106 | 40 |
| 4848 | 185 | 951 | 65 |
| 4849 | 508 | 1 | 762 |
| 4850 | 112 | 850 | 196 |
| 4851 | 273 | 34 | 65 |
| 4852 | 340 | 963 | 112 |
| 4853 | 617 | 381 | 65 |
| 4854 | 327 | 844 | 124 |
| 4855 | 668 | 75 | 33 |
| 4856 | 308 | 124 | 292 |
| 4857 | 650 | 994 | 78 |
| 4858 | 112 | 484 | 90 |
| 4859 | 48 | 58 | 502 |
| 4860 | 112 | 146 | 753 |
| 4861 | 89 | 633 | 754 |
| 4862 | 685 | 83 | 724 |
| 4863 | 66 | 426 | 711 |
| 4864 | 839 | 85 | 760 |
| 4865 | 873 | 448 | 193 |
| 4866 | 2 | 124 | 520 |
| 4867 | 414 | 869 | 178 |
| 4868 | 140 | 121 | 781 |
| 4869 | 208 | 942 | 1 |
| 4870 | 121 | 295 | 112 |
| 4871 | 269 | 8 | 667 |
| 4872 | 752 | 124 | 283 |
| 4873 | 86 | 569 | 295 |
| 4874 | 487 | 178 | 706 |
| 4875 | 126 | 472 | 133 |
| 4876 | 196 | 158 | 552 |
| 4877 | 337 | 65 | 452 |
| 4878 | 201 | 35 | 418 |
| 4879 | 817 | 61 | 28 |
| 4880 | 566 | 66 | 496 |
| 4881 | 113 | 10 | 47 |
| 4882 | 255 | 239 | 920 |
| 4883 | 765 | 151 | 35 |
| 4884 | 896 | 36 | 344 |
| 4885 | 360 | 841 | 124 |
| 4886 | 380 | 763 | 470 |
| 4887 | 956 | 69 | 3 |
| 4888 | 268 | 3 | 996 |
| 4889 | 274 | 53 | 7 |
| 4890 | 1000 | 981 | 22 |
| 4891 | 566 | 298 | 78 |
| 4892 | 863 | 112 | 464 |
| 4893 | 379 | 29 | 86 |
| 4894 | 808 | 334 | 124 |
| 4895 | 55 | 179 | 902 |
| 4896 | 21 | 748 | 111 |
| 4897 | 43 | 114 | 810 |
| 4898 | 3 | 78 | 894 |
| 4899 | 923 | 43 | 345 |
| 4900 | 90 | 190 | 644 |
| 4901 | 228 | 867 | 35 |
| 4902 | 38 | 5 | 535 |
| 4903 | 533 | 304 | 224 |
| 4904 | 99 | 112 | 837 |
| 4905 | 479 | 112 | 8 |
| 4906 | 803 | 12 | 774 |
| 4907 | 500 | 76 | 745 |
| 4908 | 57 | 514 | 21 |
| 4909 | 149 | 2 | 9 |
| 4910 | 112 | 167 | 340 |
| 4911 | 267 | 642 | 61 |
| 4912 | 57 | 757 | 351 |
| 4913 | 514 | 470 | 429 |
| 4914 | 159 | 282 | 126 |
| 4915 | 35 | 629 | 142 |
| 4916 | 118 | 568 | 709 |
| 4917 | 79 | 195 | 609 |
| 4918 | 210 | 32 | 74 |
| 4919 | 838 | 133 | 317 |
| 4920 | 314 | 689 | 17 |
| 4921 | 292 | 760 | 124 |
| 4922 | 598 | 155 | 45 |
| 4923 | 865 | 258 | 569 |
| 4924 | 58 | 137 | 825 |
| 4925 | 3 | 496 | 812 |
| 4926 | 341 | 123 | 528 |
| 4927 | 66 | 442 | 120 |
| 4928 | 824 | 609 | 124 |
| 4929 | 34 | 518 | 40 |
| 4930 | 357 | 87 | 12 |
| 4931 | 28 | 717 | 432 |
| 4932 | 12 | 257 | 611 |
| 4933 | 397 | 282 | 45 |
| 4934 | 182 | 995 | 49 |
| 4935 | 457 | 65 | 700 |
| 4936 | 3 | 290 | 483 |
| 4937 | 982 | 351 | 58 |
| 4938 | 18 | 567 | 112 |
| 4939 | 195 | 65 | 258 |
| 4940 | 112 | 803 | 492 |
| 4941 | 371 | 144 | 788 |
| 4942 | 73 | 78 | 852 |
| 4943 | 886 | 67 | 513 |
| 4944 | 124 | 924 | 664 |
| 4945 | 570 | 112 | 752 |
| 4946 | 117 | 302 | 112 |
| 4947 | 777 | 791 | 508 |
| 4948 | 45 | 207 | 269 |
| 4949 | 192 | 12 | 820 |
| 4950 | 36 | 9 | 502 |
| 4951 | 18 | 457 | 8 |
| 4952 | 486 | 45 | 316 |
| 4953 | 176 | 269 | 35 |
| 4954 | 86 | 244 | 862 |
| 4955 | 635 | 35 | 765 |
| 4956 | 49 | 838 | 662 |
| 4957 | 125 | 37 | 136 |
| 4958 | 112 | 91 | 477 |
| 4959 | 47 | 150 | 594 |
| 4960 | 62 | 941 | 354 |
| 4961 | 770 | 39 | 690 |
| 4962 | 356 | 268 | 152 |
| 4963 | 796 | 112 | 808 |
| 4964 | 112 | 413 | 404 |
| 4965 | 564 | 936 | 443 |
| 4966 | 429 | 84 | 35 |
| 4967 | 734 | 452 | 130 |
| 4968 | 126 | 17 | 21 |
| 4969 | 112 | 747 | 860 |
| 4970 | 873 | 137 | 15 |
| 4971 | 418 | 104 | 508 |
| 4972 | 97 | 543 | 60 |
| 4973 | 60 | 566 | 355 |
| 4974 | 6 | 380 | 924 |
| 4975 | 20 | 832 | 599 |
| 4976 | 112 | 773 | 808 |
| 4977 | 268 | 863 | 673 |
| 4978 | 45 | 66 | 867 |
| 4979 | 528 | 158 | 688 |
| 4980 | 152 | 572 | 32 |
| 4981 | 46 | 50 | 720 |
| 4982 | 21 | 859 | 63 |
| 4983 | 83 | 130 | 533 |
| 4984 | 57 | 937 | 12 |
| 4985 | 913 | 86 | 76 |
| 4986 | 12 | 36 | 821 |
| 4987 | 373 | 124 | 472 |
| 4988 | 574 | 702 | 190 |
| 4989 | 338 | 369 | 16 |
| 4990 | 124 | 80 | 206 |
| 4991 | 599 | 368 | 438 |
| 4992 | 686 | 288 | 255 |
| 4993 | 363 | 757 | 255 |
| 4994 | 864 | 322 | 389 |
| 4995 | 945 | 154 | 124 |
| 4996 | 61 | 94 | 825 |
| 4997 | 46 | 40 | 538 |
| 4998 | 2 | 70 | 498 |
| 4999 | 2 | 61 | 669 |
| 5000 | 80 | 593 | 690 |
| 5001 | 979 | 124 | 690 |
| 5002 | 266 | 124 | 152 |
| 5003 | 657 | 331 | 65 |
| 5004 | 8 | 921 | 504 |
| 5005 | 6 | 88 | 119 |
| 5006 | 58 | 661 | 53 |
| 5007 | 661 | 455 | 582 |
| 5008 | 43 | 18 | 635 |
| 5009 | 14 | 686 | 38 |
| 5010 | 622 | 124 | 198 |
| 5011 | 915 | 795 | 2 |
| 5012 | 35 | 126 | 910 |
| 5013 | 766 | 206 | 79 |
| 5014 | 561 | 137 | 846 |
| 5015 | 373 | 536 | 25 |
| 5016 | 204 | 846 | 7 |
| 5017 | 2 | 920 | 13 |
| 5018 | 864 | 684 | 395 |
| 5019 | 443 | 45 | 167 |
| 5020 | 434 | 255 | 546 |
| 5021 | 73 | 398 | 708 |
| 5022 | 496 | 692 | 3 |
| 5023 | 112 | 913 | 898 |
| 5024 | 12 | 603 | 887 |
| 5025 | 47 | 132 | 96 |
| 5026 | 558 | 305 | 43 |
| 5027 | 124 | 248 | 671 |
| 5028 | 331 | 192 | 435 |
| 5029 | 662 | 785 | 112 |
| 5030 | 45 | 474 | 627 |
| 5031 | 339 | 997 | 112 |
| 5032 | 64 | 342 | 17 |
| 5033 | 137 | 85 | 342 |
| 5034 | 50 | 865 | 35 |
| 5035 | 205 | 12 | 436 |
| 5036 | 12 | 96 | 644 |
| 5037 | 150 | 80 | 465 |
| 5038 | 3 | 589 | 383 |
| 5039 | 255 | 239 | 660 |
| 5040 | 593 | 516 | 612 |
| 5041 | 7 | 813 | 766 |
| 5042 | 351 | 889 | 1 |
| 5043 | 103 | 765 | 124 |
| 5044 | 34 | 3 | 459 |
| 5045 | 510 | 67 | 362 |
| 5046 | 400 | 634 | 35 |
| 5047 | 5 | 380 | 114 |
| 5048 | 544 | 763 | 50 |
| 5049 | 880 | 45 | 291 |
| 5050 | 400 | 152 | 120 |
| 5051 | 132 | 195 | 160 |
| 5052 | 558 | 673 | 2 |
| 5053 | 302 | 768 | 94 |
| 5054 | 37 | 97 | 950 |
| 5055 | 382 | 28 | 827 |
| 5056 | 115 | 582 | 506 |
| 5057 | 418 | 71 | 294 |
| 5058 | 112 | 347 | 566 |
| 5059 | 124 | 601 | 730 |
| 5060 | 65 | 673 | 136 |
| 5061 | 16 | 319 | 878 |
| 5062 | 619 | 112 | 340 |
| 5063 | 593 | 160 | 63 |
| 5064 | 163 | 260 | 3 |
| 5065 | 47 | 566 | 944 |
| 5066 | 50 | 962 | 40 |
| 5067 | 607 | 822 | 76 |
| 5068 | 463 | 78 | 43 |
| 5069 | 316 | 341 | 380 |
| 5070 | 6 | 31 | 156 |
| 5071 | 464 | 733 | 327 |
| 5072 | 6 | 865 | 775 |
| 5073 | 500 | 36 | 980 |
| 5074 | 314 | 294 | 124 |
| 5075 | 12 | 25 | 28 |
| 5076 | 56 | 593 | 327 |
| 5077 | 61 | 617 | 455 |
| 5078 | 60 | 707 | 599 |
| 5079 | 123 | 195 | 76 |
| 5080 | 642 | 588 | 1 |
| 5081 | 154 | 157 | 509 |
| 5082 | 154 | 41 | 951 |
| 5083 | 467 | 112 | 783 |
| 5084 | 397 | 838 | 475 |
| 5085 | 459 | 203 | 160 |
| 5086 | 124 | 559 | 8 |
| 5087 | 840 | 150 | 1 |
| 5088 | 58 | 79 | 562 |
| 5089 | 532 | 401 | 127 |
| 5090 | 79 | 370 | 68 |
| 5091 | 458 | 47 | 953 |
| 5092 | 339 | 289 | 994 |
| 5093 | 50 | 12 | 581 |
| 5094 | 344 | 76 | 489 |
| 5095 | 112 | 637 | 48 |
| 5096 | 12 | 181 | 198 |
| 5097 | 523 | 112 | 110 |
| 5098 | 44 | 549 | 22 |
| 5099 | 112 | 518 | 401 |
| 5100 | 389 | 149 | 299 |
| 5101 | 345 | 223 | 50 |
| 5102 | 292 | 939 | 503 |
| 5103 | 291 | 859 | 112 |
| 5104 | 411 | 4 | 25 |
| 5105 | 814 | 1 | 261 |
| 5106 | 371 | 195 | 191 |
| 5107 | 513 | 35 | 289 |
| 5108 | 163 | 255 | 88 |
| 5109 | 187 | 894 | 163 |
| 5110 | 32 | 12 | 912 |
| 5111 | 850 | 50 | 490 |
| 5112 | 2 | 648 | 694 |
| 5113 | 509 | 525 | 24 |
| 5114 | 575 | 342 | 36 |
| 5115 | 903 | 282 | 35 |
| 5116 | 11 | 95 | 963 |
| 5117 | 467 | 3 | 180 |
| 5118 | 407 | 303 | 912 |
| 5119 | 554 | 124 | 461 |
| 5120 | 230 | 420 | 308 |
| 5121 | 43 | 286 | 293 |
| 5122 | 850 | 312 | 641 |
| 5123 | 714 | 67 | 112 |
| 5124 | 60 | 813 | 48 |
| 5125 | 866 | 869 | 561 |
| 5126 | 551 | 706 | 98 |
| 5127 | 35 | 44 | 941 |
| 5128 | 12 | 702 | 758 |
| 5129 | 105 | 88 | 718 |
| 5130 | 457 | 265 | 305 |
| 5131 | 414 | 716 | 158 |
| 5132 | 112 | 554 | 898 |
| 5133 | 45 | 449 | 770 |
| 5134 | 884 | 236 | 133 |
| 5135 | 206 | 675 | 58 |
| 5136 | 898 | 316 | 49 |
| 5137 | 384 | 2 | 16 |
| 5138 | 702 | 69 | 132 |
| 5139 | 856 | 112 | 360 |
| 5140 | 66 | 493 | 28 |
| 5141 | 834 | 64 | 533 |
| 5142 | 951 | 459 | 50 |
| 5143 | 426 | 3 | 440 |
| 5144 | 34 | 127 | 478 |
| 5145 | 56 | 124 | 336 |
| 5146 | 60 | 606 | 725 |
| 5147 | 275 | 803 | 473 |
| 5148 | 707 | 732 | 414 |
| 5149 | 25 | 534 | 153 |
| 5150 | 569 | 81 | 103 |
| 5151 | 706 | 118 | 82 |
| 5152 | 2 | 429 | 702 |
| 5153 | 435 | 541 | 95 |
| 5154 | 23 | 897 | 3 |
| 5155 | 638 | 268 | 52 |
| 5156 | 283 | 112 | 84 |
| 5157 | 35 | 304 | 855 |
| 5158 | 112 | 419 | 15 |
| 5159 | 170 | 124 | 32 |
| 5160 | 51 | 397 | 621 |
| 5161 | 764 | 12 | 881 |
| 5162 | 390 | 701 | 16 |
| 5163 | 39 | 184 | 515 |
| 5164 | 302 | 362 | 272 |
| 5165 | 145 | 171 | 924 |
| 5166 | 441 | 94 | 559 |
| 5167 | 668 | 599 | 114 |
| 5168 | 405 | 124 | 283 |
| 5169 | 12 | 70 | 139 |
| 5170 | 1 | 846 | 544 |
| 5171 | 420 | 58 | 145 |
| 5172 | 74 | 593 | 931 |
| 5173 | 126 | 439 | 112 |
| 5174 | 148 | 69 | 102 |
| 5175 | 17 | 69 | 545 |
| 5176 | 41 | 88 | 626 |
| 5177 | 711 | 28 | 121 |
| 5178 | 530 | 73 | 35 |
| 5179 | 661 | 994 | 377 |
| 5180 | 39 | 12 | 589 |
| 5181 | 112 | 413 | 787 |
| 5182 | 959 | 542 | 525 |
| 5183 | 135 | 545 | 371 |
| 5184 | 650 | 112 | 589 |
| 5185 | 292 | 3 | 20 |
| 5186 | 124 | 693 | 112 |
| 5187 | 744 | 73 | 316 |
| 5188 | 658 | 601 | 127 |
| 5189 | 409 | 389 | 39 |
| 5190 | 60 | 995 | 862 |
| 5191 | 34 | 464 | 190 |
| 5192 | 401 | 23 | 131 |
| 5193 | 473 | 426 | 96 |
| 5194 | 217 | 79 | 31 |
| 5195 | 69 | 54 | 541 |
| 5196 | 688 | 967 | 148 |
| 5197 | 706 | 691 | 145 |
| 5198 | 159 | 50 | 693 |
| 5199 | 710 | 112 | 302 |
| 5200 | 195 | 948 | 21 |
| 5201 | 901 | 25 | 733 |
| 5202 | 403 | 112 | 662 |
| 5203 | 244 | 151 | 159 |
| 5204 | 889 | 37 | 303 |
| 5205 | 397 | 45 | 17 |
| 5206 | 131 | 159 | 447 |
| 5207 | 41 | 482 | 61 |
| 5208 | 439 | 18 | 76 |
| 5209 | 380 | 271 | 467 |
| 5210 | 520 | 93 | 811 |
| 5211 | 112 | 235 | 102 |
| 5212 | 532 | 112 | 904 |
| 5213 | 18 | 628 | 624 |
| 5214 | 12 | 927 | 92 |
| 5215 | 4 | 514 | 56 |
| 5216 | 708 | 43 | 391 |
| 5217 | 112 | 50 | 945 |
| 5218 | 66 | 669 | 961 |
| 5219 | 274 | 32 | 867 |
| 5220 | 994 | 26 | 79 |
| 5221 | 120 | 84 | 599 |
| 5222 | 603 | 323 | 617 |
| 5223 | 780 | 616 | 78 |
| 5224 | 538 | 363 | 803 |
| 5225 | 480 | 204 | 439 |
| 5226 | 61 | 3 | 560 |
| 5227 | 34 | 372 | 744 |
| 5228 | 128 | 876 | 92 |
| 5229 | 963 | 737 | 58 |
| 5230 | 71 | 112 | 297 |
| 5231 | 335 | 50 | 63 |
| 5232 | 12 | 749 | 302 |
| 5233 | 44 | 562 | 378 |
| 5234 | 382 | 3 | 628 |
| 5235 | 546 | 304 | 36 |
| 5236 | 348 | 112 | 654 |
| 5237 | 508 | 45 | 769 |
| 5238 | 368 | 36 | 478 |
| 5239 | 289 | 36 | 3 |
| 5240 | 10 | 889 | 325 |
| 5241 | 949 | 272 | 1 |
| 5242 | 99 | 52 | 942 |
| 5243 | 747 | 124 | 963 |
| 5244 | 410 | 7 | 917 |
| 5245 | 132 | 18 | 728 |
| 5246 | 717 | 561 | 427 |
| 5247 | 950 | 150 | 175 |
| 5248 | 268 | 586 | 260 |
| 5249 | 89 | 38 | 260 |
| 5250 | 935 | 472 | 382 |
| 5251 | 37 | 159 | 468 |
| 5252 | 348 | 91 | 112 |
| 5253 | 7 | 895 | 112 |
| 5254 | 840 | 112 | 930 |
| 5255 | 200 | 508 | 378 |
| 5256 | 141 | 124 | 742 |
| 5257 | 268 | 358 | 110 |
| 5258 | 64 | 352 | 867 |
| 5259 | 971 | 865 | 743 |
| 5260 | 990 | 45 | 731 |
| 5261 | 457 | 10 | 899 |
| 5262 | 40 | 145 | 123 |
| 5263 | 838 | 494 | 302 |
| 5264 | 130 | 295 | 810 |
| 5265 | 36 | 395 | 49 |
| 5266 | 3 | 294 | 881 |
| 5267 | 2 | 693 | 865 |
| 5268 | 46 | 1000 | 864 |
| 5269 | 112 | 1 | 193 |
| 5270 | 848 | 516 | 599 |
| 5271 | 413 | 124 | 443 |
| 5272 | 854 | 473 | 837 |
| 5273 | 47 | 498 | 450 |
| 5274 | 380 | 6 | 532 |
| 5275 | 303 | 464 | 124 |
| 5276 | 766 | 331 | 2 |
| 5277 | 50 | 894 | 83 |
| 5278 | 207 | 429 | 205 |
| 5279 | 58 | 95 | 595 |
| 5280 | 453 | 93 | 605 |
| 5281 | 41 | 730 | 282 |
| 5282 | 373 | 703 | 18 |
| 5283 | 112 | 834 | 919 |
| 5284 | 228 | 292 | 3 |
| 5285 | 865 | 1 | 770 |
| 5286 | 34 | 251 | 204 |
| 5287 | 107 | 121 | 598 |
| 5288 | 12 | 875 | 630 |
| 5289 | 282 | 145 | 939 |
| 5290 | 140 | 923 | 34 |
| 5291 | 205 | 45 | 420 |
| 5292 | 12 | 258 | 486 |
| 5293 | 769 | 5 | 854 |
| 5294 | 981 | 142 | 124 |
| 5295 | 82 | 704 | 12 |
| 5296 | 536 | 114 | 864 |
| 5297 | 104 | 378 | 689 |
| 5298 | 196 | 349 | 159 |
| 5299 | 66 | 974 | 191 |
| 5300 | 197 | 362 | 90 |
| 5301 | 76 | 715 | 641 |
| 5302 | 473 | 330 | 21 |
| 5303 | 130 | 35 | 350 |
| 5304 | 397 | 90 | 717 |
| 5305 | 270 | 745 | 45 |
| 5306 | 627 | 932 | 76 |
| 5307 | 599 | 151 | 74 |
| 5308 | 722 | 124 | 171 |
| 5309 | 352 | 921 | 459 |
| 5310 | 283 | 798 | 800 |
| 5311 | 168 | 338 | 45 |
| 5312 | 863 | 112 | 659 |
| 5313 | 566 | 426 | 427 |
| 5314 | 478 | 37 | 596 |
| 5315 | 60 | 90 | 173 |
| 5316 | 205 | 532 | 112 |
| 5317 | 518 | 124 | 611 |
| 5318 | 124 | 512 | 545 |
| 5319 | 552 | 611 | 329 |
| 5320 | 438 | 12 | 678 |
| 5321 | 292 | 181 | 121 |
| 5322 | 383 | 342 | 738 |
| 5323 | 24 | 74 | 264 |
| 5324 | 27 | 54 | 931 |
| 5325 | 124 | 302 | 357 |
| 5326 | 642 | 25 | 2 |
| 5327 | 658 | 349 | 902 |
| 5328 | 226 | 685 | 71 |
| 5329 | 642 | 472 | 76 |
| 5330 | 19 | 115 | 838 |
| 5331 | 653 | 73 | 24 |
| 5332 | 920 | 507 | 5 |
| 5333 | 64 | 863 | 95 |
| 5334 | 642 | 44 | 544 |
| 5335 | 112 | 774 | 121 |
| 5336 | 594 | 195 | 167 |
| 5337 | 23 | 335 | 611 |
| 5338 | 7 | 633 | 63 |
| 5339 | 124 | 897 | 226 |
| 5340 | 52 | 371 | 134 |
| 5341 | 304 | 401 | 258 |
| 5342 | 61 | 889 | 32 |
| 5343 | 479 | 25 | 268 |
| 5344 | 22 | 520 | 52 |
| 5345 | 413 | 184 | 18 |
| 5346 | 977 | 36 | 2 |
| 5347 | 572 | 58 | 601 |
| 5348 | 1000 | 25 | 590 |
| 5349 | 70 | 506 | 961 |
| 5350 | 185 | 470 | 836 |
| 5351 | 275 | 127 | 791 |
| 5352 | 18 | 367 | 2 |
| 5353 | 452 | 249 | 112 |
| 5354 | 39 | 457 | 2 |
| 5355 | 258 | 58 | 506 |
| 5356 | 79 | 362 | 114 |
| 5357 | 282 | 46 | 927 |
| 5358 | 6 | 372 | 565 |
| 5359 | 390 | 898 | 23 |
| 5360 | 626 | 38 | 367 |
| 5361 | 519 | 59 | 316 |
| 5362 | 35 | 309 | 70 |
| 5363 | 146 | 159 | 704 |
| 5364 | 438 | 124 | 385 |
| 5365 | 566 | 1 | 794 |
| 5366 | 36 | 452 | 275 |
| 5367 | 3 | 404 | 87 |
| 5368 | 946 | 796 | 12 |
| 5369 | 64 | 292 | 160 |
| 5370 | 174 | 694 | 83 |
| 5371 | 32 | 1 | 612 |
| 5372 | 603 | 268 | 51 |
| 5373 | 124 | 429 | 275 |
| 5374 | 489 | 414 | 110 |
| 5375 | 826 | 472 | 54 |
| 5376 | 169 | 349 | 143 |
| 5377 | 85 | 837 | 18 |
| 5378 | 98 | 323 | 87 |
| 5379 | 352 | 53 | 770 |
| 5380 | 17 | 190 | 412 |
| 5381 | 316 | 54 | 471 |
| 5382 | 124 | 421 | 624 |
| 5383 | 724 | 36 | 360 |
| 5384 | 141 | 112 | 663 |
| 5385 | 661 | 37 | 612 |
| 5386 | 95 | 282 | 314 |
| 5387 | 1 | 236 | 475 |
| 5388 | 446 | 470 | 102 |
| 5389 | 395 | 520 | 369 |
| 5390 | 449 | 118 | 827 |
| 5391 | 401 | 132 | 577 |
| 5392 | 132 | 498 | 549 |
| 5393 | 883 | 268 | 34 |
| 5394 | 509 | 2 | 538 |
| 5395 | 122 | 435 | 645 |
| 5396 | 152 | 594 | 305 |
| 5397 | 826 | 803 | 55 |
| 5398 | 520 | 575 | 98 |
| 5399 | 248 | 282 | 527 |
| 5400 | 674 | 602 | 599 |
| 5401 | 806 | 112 | 307 |
| 5402 | 395 | 743 | 101 |
| 5403 | 174 | 2 | 344 |
| 5404 | 32 | 176 | 660 |
| 5405 | 12 | 584 | 996 |
| 5406 | 258 | 352 | 87 |
| 5407 | 162 | 510 | 304 |
| 5408 | 23 | 152 | 545 |
| 5409 | 832 | 150 | 133 |
| 5410 | 522 | 347 | 112 |
| 5411 | 605 | 3 | 604 |
| 5412 | 288 | 175 | 1 |
| 5413 | 593 | 604 | 703 |
| 5414 | 45 | 152 | 459 |
| 5415 | 838 | 112 | 71 |
| 5416 | 65 | 331 | 912 |
| 5417 | 932 | 170 | 18 |
| 5418 | 583 | 154 | 24 |
| 5419 | 995 | 791 | 34 |
| 5420 | 626 | 25 | 175 |
| 5421 | 65 | 956 | 58 |
| 5422 | 230 | 987 | 1 |
| 5423 | 3 | 629 | 710 |
| 5424 | 124 | 454 | 278 |
| 5425 | 360 | 304 | 467 |
| 5426 | 270 | 719 | 810 |
| 5427 | 416 | 886 | 473 |
| 5428 | 170 | 79 | 820 |
| 5429 | 630 | 501 | 34 |
| 5430 | 2 | 319 | 136 |
| 5431 | 45 | 338 | 752 |
| 5432 | 528 | 41 | 867 |
| 5433 | 90 | 156 | 279 |
| 5434 | 175 | 574 | 12 |
| 5435 | 156 | 11 | 49 |
| 5436 | 634 | 361 | 12 |
| 5437 | 4 | 56 | 967 |
| 5438 | 648 | 40 | 190 |
| 5439 | 58 | 23 | 617 |
| 5440 | 725 | 673 | 61 |
| 5441 | 731 | 289 | 741 |
| 5442 | 28 | 69 | 557 |
| 5443 | 184 | 112 | 525 |
| 5444 | 190 | 12 | 966 |
| 5445 | 110 | 473 | 968 |
| 5446 | 2 | 152 | 683 |
| 5447 | 401 | 536 | 272 |
| 5448 | 17 | 493 | 680 |
| 5449 | 29 | 47 | 156 |
| 5450 | 244 | 599 | 302 |
| 5451 | 846 | 45 | 960 |
| 5452 | 215 | 2 | 18 |
| 5453 | 880 | 70 | 633 |
| 5454 | 61 | 36 | 295 |
| 5455 | 346 | 134 | 597 |
| 5456 | 295 | 427 | 594 |
| 5457 | 338 | 7 | 121 |
| 5458 | 877 | 297 | 9 |
| 5459 | 599 | 205 | 117 |
| 5460 | 60 | 352 | 70 |
| 5461 | 814 | 379 | 526 |
| 5462 | 119 | 407 | 316 |
| 5463 | 112 | 716 | 575 |
| 5464 | 115 | 563 | 170 |
| 5465 | 412 | 181 | 626 |
| 5466 | 45 | 879 | 431 |
| 5467 | 922 | 61 | 204 |
| 5468 | 190 | 244 | 64 |
| 5469 | 903 | 67 | 513 |
| 5470 | 743 | 935 | 559 |
| 5471 | 112 | 853 | 738 |
| 5472 | 794 | 152 | 137 |
| 5473 | 153 | 881 | 33 |
| 5474 | 729 | 95 | 48 |
| 5475 | 19 | 78 | 358 |
| 5476 | 593 | 462 | 56 |
| 5477 | 617 | 163 | 140 |
| 5478 | 255 | 447 | 239 |
| 5479 | 275 | 717 | 599 |
| 5480 | 112 | 195 | 2 |
| 5481 | 301 | 176 | 35 |
| 5482 | 184 | 44 | 844 |
| 5483 | 972 | 725 | 69 |
| 5484 | 36 | 892 | 74 |
| 5485 | 354 | 16 | 828 |
| 5486 | 354 | 740 | 268 |
| 5487 | 237 | 139 | 707 |
| 5488 | 35 | 166 | 44 |
| 5489 | 643 | 12 | 653 |
| 5490 | 191 | 886 | 19 |
| 5491 | 161 | 336 | 420 |
| 5492 | 846 | 489 | 41 |
| 5493 | 53 | 32 | 41 |
| 5494 | 897 | 10 | 155 |
| 5495 | 83 | 94 | 35 |
| 5496 | 759 | 24 | 114 |
| 5497 | 25 | 35 | 403 |
| 5498 | 25 | 268 | 249 |
| 5499 | 69 | 175 | 49 |
| 5500 | 196 | 599 | 771 |
| 5501 | 83 | 150 | 60 |
| 5502 | 825 | 12 | 105 |
| 5503 | 57 | 22 | 320 |
| 5504 | 921 | 338 | 637 |
| 5505 | 345 | 268 | 791 |
| 5506 | 387 | 12 | 575 |
| 5507 | 268 | 110 | 761 |
| 5508 | 870 | 248 | 342 |
| 5509 | 782 | 906 | 89 |
| 5510 | 2 | 106 | 643 |
| 5511 | 23 | 71 | 569 |
| 5512 | 185 | 508 | 943 |
| 5513 | 56 | 58 | 112 |
| 5514 | 132 | 94 | 71 |
| 5515 | 8 | 514 | 3 |
| 5516 | 573 | 5 | 554 |
| 5517 | 94 | 584 | 613 |
| 5518 | 130 | 160 | 78 |
| 5519 | 344 | 121 | 906 |
| 5520 | 736 | 2 | 464 |
| 5521 | 906 | 659 | 18 |
| 5522 | 691 | 1 | 274 |
| 5523 | 458 | 135 | 255 |
| 5524 | 706 | 112 | 812 |
| 5525 | 72 | 496 | 3 |
| 5526 | 351 | 709 | 231 |
| 5527 | 235 | 478 | 43 |
| 5528 | 24 | 249 | 2 |
| 5529 | 34 | 929 | 52 |
| 5530 | 4 | 73 | 862 |
| 5531 | 750 | 112 | 583 |
| 5532 | 37 | 980 | 658 |
| 5533 | 112 | 469 | 348 |
| 5534 | 280 | 613 | 21 |
| 5535 | 207 | 979 | 283 |
| 5536 | 81 | 834 | 5 |
| 5537 | 58 | 14 | 961 |
| 5538 | 518 | 502 | 112 |
| 5539 | 636 | 64 | 3 |
| 5540 | 12 | 780 | 927 |
| 5541 | 510 | 693 | 112 |
| 5542 | 691 | 477 | 121 |
| 5543 | 6 | 18 | 961 |
| 5544 | 634 | 810 | 137 |
| 5545 | 127 | 2 | 336 |
| 5546 | 184 | 102 | 45 |
| 5547 | 124 | 710 | 552 |
| 5548 | 34 | 819 | 328 |
| 5549 | 132 | 195 | 875 |
| 5550 | 275 | 114 | 528 |
| 5551 | 102 | 401 | 80 |
| 5552 | 907 | 229 | 323 |
| 5553 | 18 | 906 | 725 |
| 5554 | 541 | 175 | 58 |
| 5555 | 551 | 441 | 360 |
| 5556 | 127 | 886 | 988 |
| 5557 | 563 | 304 | 825 |
| 5558 | 35 | 151 | 873 |
| 5559 | 801 | 496 | 4 |
| 5560 | 167 | 6 | 25 |
| 5561 | 72 | 816 | 268 |
| 5562 | 50 | 244 | 151 |
| 5563 | 3 | 332 | 905 |
| 5564 | 308 | 814 | 125 |
| 5565 | 71 | 323 | 122 |
| 5566 | 21 | 56 | 783 |
| 5567 | 2 | 895 | 518 |
| 5568 | 148 | 663 | 112 |
| 5569 | 43 | 292 | 621 |
| 5570 | 399 | 3 | 936 |
| 5571 | 3 | 213 | 17 |
| 5572 | 263 | 12 | 270 |
| 5573 | 408 | 47 | 420 |
| 5574 | 777 | 371 | 112 |
| 5575 | 293 | 696 | 124 |
| 5576 | 65 | 569 | 733 |
| 5577 | 164 | 496 | 403 |
| 5578 | 92 | 527 | 45 |
| 5579 | 923 | 132 | 69 |
| 5580 | 595 | 12 | 41 |
| 5581 | 12 | 460 | 519 |
| 5582 | 355 | 392 | 22 |
| 5583 | 48 | 393 | 112 |
| 5584 | 114 | 19 | 360 |
| 5585 | 7 | 300 | 107 |
| 5586 | 12 | 192 | 500 |
| 5587 | 881 | 504 | 12 |
| 5588 | 755 | 41 | 150 |
| 5589 | 731 | 654 | 44 |
| 5590 | 282 | 755 | 640 |
| 5591 | 815 | 205 | 34 |
| 5592 | 46 | 502 | 483 |
| 5593 | 594 | 443 | 634 |
| 5594 | 651 | 159 | 302 |
| 5595 | 129 | 275 | 508 |
| 5596 | 48 | 123 | 912 |
| 5597 | 356 | 43 | 698 |
| 5598 | 3 | 776 | 64 |
| 5599 | 43 | 713 | 639 |
| 5600 | 124 | 764 | 912 |
| 5601 | 710 | 680 | 418 |
| 5602 | 137 | 522 | 242 |
| 5603 | 18 | 622 | 191 |
| 5604 | 311 | 35 | 341 |
| 5605 | 244 | 6 | 111 |
| 5606 | 58 | 36 | 560 |
| 5607 | 112 | 774 | 515 |
| 5608 | 902 | 12 | 411 |
| 5609 | 735 | 706 | 63 |
| 5610 | 344 | 545 | 889 |
| 5611 | 73 | 455 | 67 |
| 5612 | 11 | 599 | 546 |
| 5613 | 46 | 495 | 217 |
| 5614 | 741 | 39 | 171 |
| 5615 | 429 | 17 | 473 |
| 5616 | 325 | 656 | 457 |
| 5617 | 883 | 731 | 5 |
| 5618 | 39 | 199 | 779 |
| 5619 | 12 | 279 | 572 |
| 5620 | 349 | 131 | 18 |
| 5621 | 65 | 666 | 6 |
| 5622 | 147 | 124 | 45 |
| 5623 | 9 | 35 | 599 |
| 5624 | 58 | 175 | 243 |
| 5625 | 440 | 478 | 45 |
| 5626 | 960 | 112 | 375 |
| 5627 | 760 | 146 | 699 |
| 5628 | 747 | 346 | 23 |
| 5629 | 292 | 11 | 2 |
| 5630 | 8 | 2 | 921 |
| 5631 | 459 | 130 | 511 |
| 5632 | 902 | 360 | 58 |
| 5633 | 248 | 862 | 358 |
| 5634 | 331 | 33 | 83 |
| 5635 | 104 | 819 | 68 |
| 5636 | 389 | 379 | 58 |
| 5637 | 460 | 63 | 45 |
| 5638 | 753 | 400 | 34 |
| 5639 | 3 | 593 | 41 |
| 5640 | 124 | 384 | 324 |
| 5641 | 65 | 580 | 143 |
| 5642 | 45 | 31 | 281 |
| 5643 | 56 | 112 | 770 |
| 5644 | 64 | 837 | 457 |
| 5645 | 401 | 574 | 177 |
| 5646 | 793 | 45 | 71 |
| 5647 | 112 | 35 | 915 |
| 5648 | 112 | 386 | 873 |
| 5649 | 124 | 749 | 22 |
| 5650 | 124 | 614 | 492 |
| 5651 | 19 | 112 | 666 |
| 5652 | 34 | 860 | 72 |
| 5653 | 60 | 495 | 558 |
| 5654 | 117 | 112 | 83 |
| 5655 | 628 | 575 | 71 |
| 5656 | 3 | 599 | 677 |
| 5657 | 80 | 521 | 41 |
| 5658 | 45 | 25 | 427 |
| 5659 | 165 | 79 | 310 |
| 5660 | 387 | 77 | 39 |
| 5661 | 609 | 124 | 394 |
| 5662 | 668 | 367 | 3 |
| 5663 | 45 | 918 | 408 |
| 5664 | 507 | 115 | 418 |
| 5665 | 67 | 407 | 585 |
| 5666 | 746 | 400 | 367 |
| 5667 | 35 | 350 | 36 |
| 5668 | 611 | 275 | 935 |
| 5669 | 461 | 22 | 53 |
| 5670 | 67 | 304 | 930 |
| 5671 | 28 | 48 | 34 |
| 5672 | 583 | 49 | 33 |
| 5673 | 963 | 35 | 96 |
| 5674 | 117 | 2 | 413 |
| 5675 | 12 | 407 | 1 |
| 5676 | 25 | 837 | 207 |
| 5677 | 104 | 593 | 155 |
| 5678 | 446 | 509 | 24 |
| 5679 | 354 | 802 | 112 |
| 5680 | 195 | 837 | 508 |
| 5681 | 362 | 79 | 317 |
| 5682 | 94 | 690 | 642 |
| 5683 | 5 | 205 | 7 |
| 5684 | 24 | 894 | 453 |
| 5685 | 12 | 537 | 408 |
| 5686 | 435 | 56 | 389 |
| 5687 | 904 | 298 | 61 |
| 5688 | 69 | 292 | 908 |
| 5689 | 546 | 22 | 981 |
| 5690 | 841 | 42 | 35 |
| 5691 | 216 | 89 | 121 |
| 5692 | 112 | 551 | 903 |
| 5693 | 878 | 25 | 11 |
| 5694 | 711 | 534 | 130 |
| 5695 | 301 | 668 | 159 |
| 5696 | 918 | 609 | 64 |
| 5697 | 159 | 113 | 46 |
| 5698 | 64 | 847 | 108 |
| 5699 | 35 | 331 | 620 |
| 5700 | 690 | 480 | 124 |
| 5701 | 112 | 890 | 121 |
| 5702 | 508 | 80 | 45 |
| 5703 | 833 | 897 | 305 |
| 5704 | 617 | 171 | 987 |
| 5705 | 83 | 415 | 110 |
| 5706 | 599 | 34 | 387 |
| 5707 | 453 | 140 | 731 |
| 5708 | 316 | 461 | 36 |
| 5709 | 42 | 710 | 18 |
| 5710 | 566 | 96 | 59 |
| 5711 | 939 | 118 | 230 |
| 5712 | 178 | 726 | 128 |
| 5713 | 197 | 135 | 45 |
| 5714 | 221 | 342 | 186 |
| 5715 | 52 | 89 | 100 |
| 5716 | 985 | 37 | 124 |
| 5717 | 621 | 5 | 53 |
| 5718 | 746 | 820 | 112 |
| 5719 | 427 | 55 | 435 |
| 5720 | 6 | 99 | 352 |
| 5721 | 255 | 336 | 188 |
| 5722 | 709 | 889 | 145 |
| 5723 | 399 | 112 | 573 |
| 5724 | 168 | 25 | 331 |
| 5725 | 2 | 572 | 644 |
| 5726 | 29 | 178 | 412 |
| 5727 | 660 | 345 | 50 |
| 5728 | 21 | 118 | 36 |
| 5729 | 651 | 49 | 436 |
| 5730 | 145 | 25 | 62 |
| 5731 | 150 | 621 | 350 |
| 5732 | 25 | 731 | 422 |
| 5733 | 112 | 870 | 706 |
| 5734 | 321 | 470 | 12 |
| 5735 | 419 | 312 | 18 |
| 5736 | 43 | 509 | 483 |
| 5737 | 60 | 58 | 22 |
| 5738 | 96 | 3 | 324 |
| 5739 | 192 | 91 | 152 |
| 5740 | 35 | 255 | 356 |
| 5741 | 599 | 459 | 302 |
| 5742 | 29 | 595 | 86 |
| 5743 | 601 | 47 | 914 |
| 5744 | 9 | 732 | 155 |
| 5745 | 144 | 55 | 291 |
| 5746 | 64 | 432 | 25 |
| 5747 | 105 | 23 | 837 |
| 5748 | 11 | 152 | 45 |
| 5749 | 149 | 279 | 862 |
| 5750 | 322 | 275 | 497 |
| 5751 | 2 | 276 | 765 |
| 5752 | 937 | 371 | 63 |
| 5753 | 336 | 711 | 467 |
| 5754 | 4 | 940 | 278 |
| 5755 | 104 | 377 | 114 |
| 5756 | 172 | 112 | 396 |
| 5757 | 1 | 94 | 778 |
| 5758 | 83 | 132 | 255 |
| 5759 | 506 | 15 | 490 |
| 5760 | 644 | 673 | 3 |
| 5761 | 18 | 860 | 934 |
| 5762 | 12 | 452 | 665 |
| 5763 | 568 | 336 | 18 |
| 5764 | 124 | 887 | 921 |
| 5765 | 2 | 395 | 522 |
| 5766 | 545 | 34 | 376 |
| 5767 | 763 | 667 | 49 |
| 5768 | 67 | 380 | 520 |
| 5769 | 710 | 723 | 642 |
| 5770 | 34 | 438 | 886 |
| 5771 | 616 | 413 | 195 |
| 5772 | 124 | 591 | 49 |
| 5773 | 270 | 513 | 35 |
| 5774 | 744 | 783 | 3 |
| 5775 | 45 | 827 | 402 |
| 5776 | 528 | 999 | 105 |
| 5777 | 706 | 117 | 836 |
| 5778 | 878 | 155 | 91 |
| 5779 | 25 | 990 | 168 |
| 5780 | 68 | 603 | 7 |
| 5781 | 897 | 90 | 905 |
| 5782 | 52 | 506 | 935 |
| 5783 | 69 | 814 | 544 |
| 5784 | 561 | 238 | 889 |
| 5785 | 282 | 710 | 121 |
| 5786 | 124 | 269 | 360 |
| 5787 | 127 | 877 | 121 |
| 5788 | 429 | 540 | 71 |
| 5789 | 10 | 148 | 711 |
| 5790 | 1 | 342 | 197 |
| 5791 | 160 | 340 | 616 |
| 5792 | 760 | 192 | 124 |
| 5793 | 370 | 83 | 118 |
| 5794 | 23 | 395 | 838 |
| 5795 | 842 | 1 | 449 |
| 5796 | 74 | 12 | 390 |
| 5797 | 58 | 577 | 601 |
| 5798 | 399 | 786 | 124 |
| 5799 | 718 | 66 | 303 |
| 5800 | 706 | 534 | 67 |
| 5801 | 450 | 121 | 149 |
| 5802 | 8 | 725 | 501 |
| 5803 | 599 | 973 | 256 |
| 5804 | 644 | 3 | 665 |
| 5805 | 121 | 828 | 155 |
| 5806 | 483 | 384 | 22 |
| 5807 | 112 | 360 | 214 |
| 5808 | 98 | 986 | 527 |
| 5809 | 2 | 52 | 8 |
| 5810 | 905 | 202 | 11 |
| 5811 | 361 | 484 | 8 |
| 5812 | 617 | 179 | 23 |
| 5813 | 403 | 201 | 18 |
| 5814 | 668 | 963 | 484 |
| 5815 | 1000 | 373 | 645 |
| 5816 | 556 | 124 | 96 |
| 5817 | 380 | 504 | 846 |
| 5818 | 38 | 119 | 20 |
| 5819 | 122 | 38 | 97 |
| 5820 | 453 | 881 | 2 |
| 5821 | 316 | 379 | 449 |
| 5822 | 3 | 605 | 308 |
| 5823 | 800 | 398 | 12 |
| 5824 | 173 | 659 | 40 |
| 5825 | 685 | 112 | 833 |
| 5826 | 827 | 40 | 54 |
| 5827 | 2 | 579 | 375 |
| 5828 | 424 | 3 | 859 |
| 5829 | 269 | 89 | 58 |
| 5830 | 152 | 842 | 78 |
| 5831 | 915 | 19 | 36 |
| 5832 | 25 | 275 | 792 |
| 5833 | 260 | 154 | 2 |
| 5834 | 4 | 45 | 655 |
| 5835 | 818 | 367 | 41 |
| 5836 | 956 | 95 | 641 |

TABLE 3

| | 1st | 2nd | 3rd | | 5th |
|---|---|---|---|---|---|
| | Marker | Marker | Marker | 4th Marker | Marker |
| Signature | (Seq. | (Seq. | (Seq. | (Seq. | (Seq. |
| Number | Number) | Number) | Number) | Number) | Number) |
| 1 | 85 | 58 | 12 | 23 | 49 |
| 2 | 18 | 78 | 1 | 12 | 55 |
| 3 | 50 | 31 | 112 | 25 | 55 |
| 4 | 10 | 47 | 38 | 37 | 109 |
| 5 | 5 | 45 | 12 | 55 | 47 |
| 6 | 64 | 34 | 49 | 41 | 15 |
| 7 | 3 | 35 | 57 | 39 | 16 |
| 8 | 72 | 29 | 22 | 57 | 12 |
| 9 | 109 | 81 | 57 | 65 | 12 |
| 10 | 12 | 56 | 21 | 44 | 10 |
| 11 | 21 | 45 | 90 | 3 | 66 |
| 12 | 62 | 124 | 49 | 5 | 2 |
| 13 | 39 | 83 | 50 | 75 | 10 |
| 14 | 12 | 73 | 43 | 16 | 55 |
| 15 | 54 | 60 | 27 | 56 | 83 |
| 16 | 115 | 56 | 124 | 45 | 29 |
| 17 | 12 | 83 | 35 | 91 | 9 |
| 18 | 44 | 4 | 12 | 67 | 52 |
| 19 | 19 | 63 | 44 | 42 | 12 |
| 20 | 12 | 34 | 53 | 60 | 85 |
| 21 | 39 | 88 | 6 | 127 | 59 |
| 22 | 43 | 25 | 39 | 18 | 28 |
| 23 | 38 | 8 | 22 | 10 | 45 |
| 24 | 65 | 8 | 38 | 12 | 76 |
| 25 | 42 | 45 | 69 | 7 | 12 |
| 26 | 58 | 120 | 16 | 11 | 22 |
| 27 | 61 | 112 | 9 | 72 | 33 |
| 28 | 112 | 78 | 32 | 71 | 33 |
| 29 | 3 | 120 | 41 | 124 | 12 |
| 30 | 6 | 12 | 58 | 23 | 81 |
| 31 | 112 | 121 | 55 | 16 | 28 |
| 32 | 112 | 45 | 36 | 82 | 127 |
| 33 | 78 | 32 | 121 | 12 | 74 |
| 34 | 37 | 130 | 57 | 12 | 87 |
| 35 | 120 | 12 | 41 | 30 | 50 |
| 36 | 127 | 90 | 49 | 83 | 78 |
| 37 | 54 | 85 | 22 | 12 | 37 |
| 38 | 18 | 4 | 89 | 71 | 112 |
| 39 | 46 | 38 | 8 | 73 | 12 |
| 40 | 29 | 12 | 1 | 107 | 49 |
| 41 | 63 | 64 | 12 | 31 | 22 |
| 42 | 127 | 76 | 24 | 12 | 80 |
| 43 | 78 | 72 | 12 | 75 | 60 |
| 44 | 130 | 73 | 43 | 55 | 35 |
| 45 | 32 | 34 | 25 | 23 | 69 |
| 46 | 42 | 3 | 5 | 26 | 25 |
| 47 | 29 | 39 | 127 | 18 | 32 |
| 48 | 24 | 22 | 9 | 124 | 32 |
| 49 | 5 | 127 | 78 | 71 | 80 |
| 50 | 52 | 9 | 25 | 3 | 7 |
| 51 | 32 | 17 | 64 | 12 | 58 |
| 52 | 25 | 42 | 20 | 12 | 19 |
| 53 | 36 | 103 | 124 | 61 | 91 |
| 54 | 12 | 103 | 88 | 1 | 81 |
| 55 | 25 | 69 | 121 | 118 | 124 |
| 56 | 32 | 16 | 64 | 57 | 118 |
| 57 | 127 | 57 | 88 | 61 | 112 |
| 58 | 23 | 12 | 16 | 83 | 15 |
| 59 | 39 | 76 | 34 | 12 | 86 |
| 60 | 112 | 83 | 115 | 85 | 40 |
| 61 | 34 | 55 | 72 | 78 | 12 |
| 62 | 121 | 49 | 18 | 35 | 71 |
| 63 | 35 | 18 | 72 | 54 | 44 |
| 64 | 12 | 77 | 47 | 2 | 85 |
| 65 | 130 | 121 | 21 | 35 | 24 |
| 66 | 63 | 50 | 120 | 16 | 112 |
| 67 | 1 | 22 | 5 | 6 | 38 |
| 68 | 21 | 64 | 35 | 9 | 12 |
| 69 | 12 | 41 | 35 | 89 | 13 |
| 70 | 60 | 3 | 65 | 12 | 18 |
| 71 | 38 | 58 | 76 | 12 | 61 |
| 72 | 37 | 127 | 3 | 89 | 34 |
| 73 | 16 | 56 | 64 | 11 | 66 |
| 74 | 107 | 60 | 18 | 64 | 58 |
| 75 | 39 | 13 | 57 | 12 | 112 |
| 76 | 89 | 12 | 60 | 57 | 1 |
| 77 | 32 | 109 | 49 | 58 | 67 |
| 78 | 38 | 22 | 47 | 56 | 10 |
| 79 | 60 | 55 | 112 | 76 | 44 |
| 80 | 3 | 25 | 78 | 67 | 80 |
| 81 | 121 | 112 | 16 | 55 | 74 |
| 82 | 50 | 127 | 55 | 112 | 91 |
| 83 | 73 | 112 | 1 | 88 | 72 |
| 84 | 35 | 38 | 45 | 31 | 23 |
| 85 | 82 | 19 | 45 | 124 | 43 |
| 86 | 26 | 112 | 25 | 50 | 57 |
| 87 | 57 | 88 | 44 | 67 | 124 |
| 88 | 61 | 7 | 19 | 112 | 22 |
| 89 | 89 | 38 | 26 | 12 | 55 |
| 90 | 17 | 41 | 112 | 81 | 58 |
| 91 | 54 | 25 | 2 | 12 | 37 |
| 92 | 17 | 45 | 63 | 83 | 112 |
| 93 | 88 | 81 | 25 | 112 | 33 |
| 94 | 1 | 12 | 9 | 82 | 57 |
| 95 | 1 | 49 | 41 | 12 | 78 |
| 96 | 72 | 25 | 61 | 10 | 12 |
| 97 | 61 | 32 | 11 | 107 | 39 |
| 98 | 7 | 69 | 68 | 75 | 12 |
| 99 | 29 | 76 | 133 | 12 | 124 |
| 100 | 124 | 83 | 121 | 35 | 59 |
| 101 | 54 | 12 | 63 | 127 | 77 |
| 102 | 44 | 112 | 42 | 124 | 34 |
| 103 | 81 | 127 | 35 | 12 | 16 |
| 104 | 77 | 16 | 18 | 4 | 12 |
| 105 | 82 | 121 | 34 | 103 | 112 |
| 106 | 112 | 15 | 74 | 103 | 11 |
| 107 | 45 | 9 | 17 | 66 | 69 |
| 108 | 121 | 70 | 8 | 35 | 45 |
| 109 | 23 | 42 | 5 | 25 | 112 |
| 110 | 62 | 73 | 43 | 25 | 78 |
| 111 | 82 | 127 | 18 | 57 | 83 |
| 112 | 31 | 22 | 5 | 12 | 83 |
| 113 | 12 | 70 | 58 | 57 | 53 |
| 114 | 124 | 25 | 70 | 67 | 5 |
| 115 | 19 | 17 | 7 | 25 | 12 |
| 116 | 62 | 42 | 21 | 4 | 112 |
| 117 | 12 | 37 | 76 | 39 | 127 |
| 118 | 2 | 53 | 19 | 103 | 89 |
| 119 | 88 | 73 | 121 | 39 | 10 |
| 120 | 7 | 12 | 107 | 59 | 80 |
| 121 | 35 | 112 | 12 | 60 | 15 |
| 122 | 66 | 44 | 55 | 64 | 29 |
| 123 | 58 | 24 | 23 | 127 | 16 |
| 124 | 19 | 38 | 76 | 127 | 12 |
| 125 | 90 | 44 | 39 | 60 | 12 |
| 126 | 35 | 107 | 75 | 74 | 45 |
| 127 | 44 | 12 | 38 | 2 | 8 |
| 128 | 77 | 44 | 12 | 81 | 67 |
| 129 | 49 | 38 | 12 | 6 | 41 |
| 130 | 35 | 12 | 53 | 24 | 76 |
| 131 | 9 | 67 | 1 | 37 | 12 |
| 132 | 49 | 34 | 71 | 1 | 12 |
| 133 | 41 | 103 | 12 | 29 | 80 |
| 134 | 23 | 45 | 3 | 38 | 22 |
| 135 | 74 | 12 | 24 | 25 | 36 |
| 136 | 33 | 64 | 112 | 44 | 11 |
| 137 | 60 | 65 | 32 | 124 | 34 |
| 138 | 124 | 68 | 120 | 45 | 21 |
| 139 | 80 | 25 | 12 | 78 | 107 |
| 140 | 8 | 12 | 112 | 55 | 50 |
| 141 | 124 | 54 | 1 | 60 | 89 |
| 142 | 25 | 80 | 64 | 82 | 71 |
| 143 | 112 | 56 | 87 | 31 | 59 |
| 144 | 68 | 7 | 89 | 45 | 84 |
| 145 | 12 | 25 | 74 | 31 | 118 |
| 146 | 31 | 107 | 67 | 45 | 78 |
| 147 | 12 | 73 | 22 | 66 | 67 |
| 148 | 44 | 50 | 61 | 112 | 90 |
| 149 | 16 | 112 | 71 | 124 | 45 |
| 150 | 47 | 1 | 19 | 57 | 12 |
| 151 | 64 | 124 | 47 | 25 | 60 |
| 152 | 71 | 12 | 39 | 78 | 21 |
| 153 | 109 | 67 | 28 | 12 | 1 |
| 154 | 36 | 3 | 124 | 115 | 32 |
| 155 | 73 | 11 | 64 | 88 | 12 |
| 156 | 38 | 4 | 2 | 8 | 3 |
| 157 | 28 | 82 | 39 | 45 | 4 |
| 158 | 43 | 12 | 17 | 87 | 50 |
| 159 | 45 | 6 | 5 | 38 | 55 |
| 160 | 130 | 83 | 11 | 22 | 76 |
| 161 | 42 | 4 | 112 | 13 | 83 |
| 162 | 91 | 124 | 22 | 10 | 30 |
| 163 | 59 | 36 | 16 | 58 | 55 |
| 164 | 54 | 64 | 12 | 107 | 41 |
| 165 | 17 | 112 | 54 | 103 | 68 |
| 166 | 44 | 55 | 25 | 71 | 8 |
| 167 | 49 | 26 | 39 | 29 | 12 |
| 168 | 53 | 34 | 12 | 85 | 49 |
| 169 | 12 | 33 | 82 | 29 | 31 |
| 170 | 52 | 83 | 39 | 88 | 124 |
| 171 | 64 | 127 | 83 | 112 | 82 |
| 172 | 12 | 2 | 35 | 57 | 45 |
| 173 | 41 | 124 | 24 | 39 | 12 |
| 174 | 8 | 115 | 12 | 5 | 19 |
| 175 | 103 | 64 | 12 | 63 | 107 |
| 176 | 86 | 32 | 41 | 29 | 124 |
| 177 | 45 | 112 | 78 | 13 | 83 |
| 178 | 16 | 50 | 28 | 35 | 82 |
| 179 | 23 | 45 | 34 | 124 | 44 |
| 180 | 73 | 32 | 40 | 16 | 12 |
| 181 | 58 | 76 | 88 | 124 | 45 |
| 182 | 83 | 46 | 66 | 32 | 31 |
| 183 | 34 | 55 | 42 | 12 | 72 |
| 184 | 38 | 9 | 14 | 45 | 57 |
| 185 | 41 | 62 | 14 | 38 | 52 |
| 186 | 25 | 112 | 32 | 17 | 83 |
| 187 | 3 | 66 | 41 | 60 | 33 |
| 188 | 115 | 35 | 61 | 25 | 45 |
| 189 | 49 | 60 | 54 | 45 | 12 |
| 190 | 107 | 57 | 76 | 12 | 39 |
| 191 | 31 | 112 | 45 | 107 | 124 |
| 192 | 53 | 16 | 77 | 45 | 12 |
| 193 | 38 | 28 | 127 | 5 | 35 |
| 194 | 35 | 81 | 133 | 12 | 86 |
| 195 | 45 | 58 | 26 | 124 | 23 |
| 196 | 39 | 62 | 61 | 124 | 21 |
| 197 | 58 | 44 | 7 | 35 | 65 |
| 198 | 26 | 112 | 78 | 127 | 83 |
| 199 | 17 | 69 | 9 | 25 | 112 |
| 200 | 22 | 45 | 61 | 11 | 66 |
| 201 | 84 | 60 | 19 | 28 | 81 |
| 202 | 83 | 20 | 57 | 32 | 112 |
| 203 | 66 | 63 | 18 | 67 | 121 |
| 204 | 42 | 14 | 25 | 112 | 21 |
| 205 | 121 | 83 | 32 | 50 | 3 |
| 206 | 112 | 72 | 85 | 74 | 55 |
| 207 | 12 | 42 | 50 | 22 | 83 |
| 208 | 124 | 5 | 112 | 127 | 45 |
| 209 | 33 | 39 | 61 | 58 | 85 |
| 210 | 12 | 62 | 70 | 74 | 55 |
| 211 | 60 | 12 | 76 | 84 | 40 |
| 212 | 12 | 49 | 73 | 1 | 115 |
| 213 | 35 | 71 | 28 | 41 | 12 |
| 214 | 82 | 12 | 67 | 133 | 127 |
| 215 | 85 | 9 | 78 | 112 | 22 |
| 216 | 57 | 112 | 33 | 11 | 78 |
| 217 | 60 | 57 | 16 | 30 | 12 |
| 218 | 66 | 58 | 29 | 27 | 1 |
| 219 | 3 | 55 | 21 | 91 | 1 |
| 220 | 121 | 15 | 60 | 72 | 112 |
| 221 | 112 | 40 | 89 | 39 | 3 |
| 222 | 60 | 12 | 23 | 32 | 29 |
| 223 | 14 | 88 | 15 | 38 | 109 |
| 224 | 21 | 38 | 31 | 45 | 35 |
| 225 | 39 | 67 | 12 | 65 | 78 |
| 226 | 10 | 3 | 15 | 83 | 38 |
| 227 | 19 | 23 | 12 | 58 | 56 |
| 228 | 55 | 107 | 12 | 72 | 73 |
| 229 | 65 | 21 | 84 | 12 | 75 |
| 230 | 112 | 6 | 85 | 83 | 61 |
| 231 | 8 | 12 | 35 | 31 | 37 |
| 232 | 87 | 49 | 127 | 11 | 66 |
| 233 | 24 | 115 | 112 | 53 | 32 |
| 234 | 69 | 124 | 35 | 65 | 16 |
| 235 | 25 | 23 | 33 | 84 | 29 |
| 236 | 29 | 12 | 49 | 41 | 69 |
| 237 | 53 | 45 | 107 | 22 | 21 |
| 238 | 16 | 10 | 35 | 58 | 25 |
| 239 | 39 | 67 | 50 | 16 | 43 |
| 240 | 112 | 77 | 4 | 34 | 71 |
| 241 | 12 | 64 | 41 | 80 | 46 |
| 242 | 3 | 77 | 91 | 12 | 43 |
| 243 | 124 | 41 | 49 | 44 | 60 |
| 244 | 91 | 64 | 73 | 40 | 112 |
| 245 | 3 | 21 | 23 | 58 | 45 |
| 246 | 32 | 83 | 9 | 64 | 91 |
| 247 | 80 | 44 | 35 | 20 | 57 |
| 248 | 12 | 57 | 53 | 1 | 23 |
| 249 | 41 | 60 | 25 | 28 | 124 |
| 250 | 24 | 69 | 56 | 47 | 112 |
| 251 | 90 | 38 | 16 | 42 | 49 |
| 252 | 84 | 66 | 130 | 88 | 62 |
| 253 | 32 | 29 | 22 | 60 | 124 |
| 254 | 12 | 73 | 31 | 39 | 34 |
| 255 | 9 | 10 | 21 | 12 | 45 |
| 256 | 3 | 38 | 12 | 21 | 56 |
| 257 | 115 | 56 | 66 | 24 | 54 |
| 258 | 21 | 44 | 12 | 18 | 7 |
| 259 | 47 | 33 | 87 | 11 | 49 |
| 260 | 50 | 112 | 71 | 6 | 55 |
| 261 | 130 | 12 | 49 | 57 | 112 |
| 262 | 41 | 55 | 59 | 3 | 47 |
| 263 | 44 | 35 | 75 | 19 | 83 |
| 264 | 25 | 112 | 9 | 31 | 59 |
| 265 | 12 | 64 | 121 | 56 | 120 |
| 266 | 71 | 124 | 82 | 45 | 87 |
| 267 | 83 | 75 | 57 | 78 | 47 |
| 268 | 69 | 44 | 29 | 64 | 88 |
| 269 | 50 | 25 | 58 | 1 | 12 |
| 270 | 73 | 12 | 84 | 55 | 74 |
| 271 | 12 | 72 | 22 | 56 | 19 |
| 272 | 5 | 39 | 4 | 25 | 6 |
| 273 | 103 | 2 | 45 | 133 | 27 |
| 274 | 67 | 19 | 78 | 124 | 25 |
| 275 | 55 | 25 | 44 | 36 | 76 |
| 276 | 82 | 121 | 50 | 112 | 43 |
| 277 | 41 | 21 | 27 | 112 | 40 |
| 278 | 73 | 90 | 37 | 85 | 112 |
| 279 | 76 | 124 | 60 | 133 | 25 |
| 280 | 11 | 66 | 112 | 130 | 55 |
| 281 | 91 | 120 | 23 | 12 | 58 |
| 282 | 39 | 2 | 89 | 3 | 32 |
| 283 | 59 | 60 | 124 | 103 | 47 |
| 284 | 55 | 7 | 53 | 38 | 12 |
| 285 | 45 | 56 | 39 | 38 | 36 |
| 286 | 49 | 112 | 58 | 25 | 50 |
| 287 | 2 | 45 | 81 | 52 | 22 |
| 288 | 124 | 66 | 55 | 127 | 65 |
| 289 | 33 | 124 | 49 | 12 | 32 |
| 290 | 130 | 39 | 77 | 38 | 115 |
| 291 | 74 | 22 | 56 | 12 | 76 |
| 292 | 56 | 44 | 61 | 64 | 124 |
| 293 | 107 | 57 | 12 | 3 | 78 |
| 294 | 12 | 19 | 9 | 45 | 1 |
| 295 | 80 | 21 | 33 | 112 | 11 |
| 296 | 15 | 1 | 60 | 124 | 112 |
| 297 | 35 | 64 | 62 | 17 | 12 |
| 298 | 57 | 25 | 31 | 45 | 35 |
| 299 | 88 | 84 | 82 | 25 | 53 |
| 300 | 12 | 1 | 17 | 63 | 3 |
| 301 | 77 | 55 | 124 | 45 | 12 |
| 302 | 3 | 7 | 81 | 32 | 12 |
| 303 | 45 | 112 | 64 | 16 | 60 |
| 304 | 29 | 1 | 121 | 12 | 78 |
| 305 | 6 | 124 | 1 | 13 | 12 |
| 306 | 127 | 5 | 24 | 2 | 124 |
| 307 | 107 | 124 | 50 | 35 | 34 |
| 308 | 57 | 39 | 77 | 40 | 12 |
| 309 | 84 | 25 | 9 | 115 | 12 |
| 310 | 12 | 56 | 39 | 21 | 62 |
| 311 | 25 | 3 | 17 | 12 | 124 |
| 312 | 15 | 34 | 73 | 124 | 23 |
| 313 | 82 | 25 | 12 | 69 | 46 |
| 314 | 17 | 10 | 45 | 21 | 25 |
| 315 | 66 | 56 | 2 | 43 | 130 |
| 316 | 38 | 57 | 76 | 115 | 12 |
| 317 | 19 | 42 | 49 | 70 | 87 |
| 318 | 55 | 9 | 12 | 2 | 69 |
| 319 | 5 | 33 | 24 | 1 | 12 |
| 320 | 103 | 14 | 12 | 1 | 33 |
| 321 | 18 | 80 | 12 | 3 | 25 |
| 322 | 115 | 57 | 29 | 32 | 73 |
| 323 | 68 | 60 | 112 | 77 | 56 |
| 324 | 23 | 32 | 27 | 69 | 58 |
| 325 | 77 | 121 | 9 | 34 | 12 |
| 326 | 44 | 107 | 39 | 58 | 61 |
| 327 | 34 | 32 | 18 | 19 | 83 |
| 328 | 12 | 85 | 1 | 17 | 69 |
| 329 | 74 | 7 | 1 | 55 | 12 |
| 330 | 41 | 33 | 12 | 25 | 74 |
| 331 | 90 | 73 | 57 | 112 | 75 |
| 332 | 29 | 37 | 41 | 77 | 12 |
| 333 | 38 | 67 | 14 | 112 | 49 |
| 334 | 34 | 83 | 70 | 15 | 12 |
| 335 | 56 | 33 | 16 | 35 | 38 |
| 336 | 37 | 45 | 81 | 50 | 21 |
| 337 | 33 | 6 | 45 | 34 | 83 |
| 338 | 88 | 130 | 25 | 124 | 65 |
| 339 | 8 | 75 | 31 | 35 | 45 |
| 340 | 75 | 89 | 50 | 35 | 56 |
| 341 | 18 | 60 | 54 | 49 | 112 |
| 342 | 12 | 23 | 35 | 41 | 40 |
| 343 | 12 | 46 | 90 | 41 | 64 |
| 344 | 55 | 112 | 68 | 71 | 69 |
| 345 | 39 | 45 | 25 | 6 | 81 |
| 346 | 50 | 10 | 21 | 49 | 57 |
| 347 | 112 | 2 | 121 | 28 | 127 |
| 348 | 25 | 32 | 45 | 3 | 55 |
| 349 | 45 | 5 | 2 | 112 | 27 |
| 350 | 78 | 56 | 112 | 133 | 29 |
| 351 | 38 | 46 | 55 | 30 | 12 |
| 352 | 12 | 35 | 1 | 19 | 109 |
| 353 | 61 | 88 | 25 | 12 | 1 |
| 354 | 44 | 35 | 36 | 12 | 52 |
| 355 | 83 | 19 | 43 | 103 | 22 |
| 356 | 88 | 35 | 12 | 7 | 28 |
| 357 | 76 | 12 | 86 | 25 | 30 |
| 358 | 41 | 56 | 12 | 49 | 71 |
| 359 | 4 | 52 | 18 | 57 | 16 |
| 360 | 35 | 121 | 89 | 50 | 44 |
| 361 | 57 | 80 | 35 | 45 | 118 |
| 362 | 58 | 76 | 44 | 23 | 84 |
| 363 | 88 | 124 | 25 | 19 | 69 |
| 364 | 112 | 82 | 25 | 45 | 1 |
| 365 | 5 | 78 | 39 | 18 | 42 |
| 366 | 124 | 12 | 40 | 45 | 35 |
| 367 | 41 | 12 | 67 | 121 | 91 |
| 368 | 13 | 39 | 12 | 107 | 59 |
| 369 | 121 | 2 | 6 | 82 | 12 |
| 370 | 28 | 29 | 3 | 76 | 12 |
| 371 | 16 | 38 | 45 | 55 | 12 |
| 372 | 68 | 85 | 112 | 7 | 83 |
| 373 | 107 | 90 | 20 | 12 | 41 |
| 374 | 6 | 12 | 22 | 115 | 41 |
| 375 | 60 | 49 | 34 | 103 | 124 |
| 376 | 89 | 90 | 16 | 29 | 49 |
| 377 | 16 | 25 | 13 | 64 | 118 |
| 378 | 12 | 7 | 41 | 40 | 47 |
| 379 | 133 | 43 | 16 | 71 | 32 |
| 380 | 53 | 49 | 74 | 58 | 64 |
| 381 | 76 | 1 | 60 | 83 | 124 |
| 382 | 12 | 66 | 83 | 15 | 39 |
| 383 | 32 | 21 | 89 | 50 | 13 |
| 384 | 69 | 56 | 112 | 4 | 25 |
| 385 | 16 | 124 | 43 | 33 | 32 |
| 386 | 88 | 22 | 124 | 25 | 32 |
| 387 | 127 | 19 | 90 | 56 | 89 |
| 388 | 9 | 29 | 107 | 2 | 12 |
| 389 | 24 | 1 | 118 | 12 | 103 |
| 390 | 24 | 39 | 72 | 67 | 112 |
| 391 | 121 | 11 | 49 | 89 | 53 |
| 392 | 28 | 43 | 16 | 89 | 124 |
| 393 | 12 | 45 | 1 | 62 | 3 |
| 394 | 12 | 23 | 81 | 32 | 124 |
| 395 | 50 | 65 | 3 | 2 | 35 |
| 396 | 36 | 29 | 64 | 26 | 12 |
| 397 | 25 | 17 | 31 | 118 | 112 |
| 398 | 107 | 32 | 133 | 58 | 35 |
| 399 | 60 | 58 | 89 | 16 | 12 |
| 400 | 12 | 115 | 2 | 3 | 34 |
| 401 | 83 | 35 | 69 | 15 | 56 |
| 402 | 38 | 8 | 91 | 54 | 12 |
| 403 | 41 | 29 | 115 | 53 | 12 |
| 404 | 64 | 12 | 24 | 29 | 26 |
| 405 | 35 | 30 | 25 | 12 | 42 |
| 406 | 15 | 112 | 25 | 11 | 45 |
| 407 | 12 | 54 | 18 | 2 | 127 |
| 408 | 6 | 45 | 130 | 55 | 57 |
| 409 | 45 | 112 | 1 | 107 | 73 |
| 410 | 45 | 24 | 12 | 74 | 52 |
| 411 | 87 | 49 | 85 | 46 | 112 |
| 412 | 19 | 12 | 73 | 37 | 70 |
| 413 | 60 | 107 | 55 | 57 | 3 |
| 414 | 124 | 44 | 49 | 12 | 91 |
| 415 | 62 | 45 | 39 | 47 | 112 |
| 416 | 37 | 12 | 64 | 24 | 16 |
| 417 | 30 | 45 | 21 | 22 | 12 |
| 418 | 61 | 12 | 28 | 39 | 66 |
| 419 | 57 | 112 | 83 | 121 | 86 |
| 420 | 12 | 121 | 45 | 133 | 54 |
| 421 | 71 | 45 | 35 | 25 | 9 |
| 422 | 107 | 25 | 24 | 54 | 124 |
| 423 | 31 | 3 | 25 | 54 | 78 |
| 424 | 25 | 7 | 36 | 38 | 109 |
| 425 | 45 | 35 | 43 | 15 | 121 |
| 426 | 55 | 53 | 44 | 12 | 35 |
| 427 | 11 | 12 | 45 | 34 | 6 |
| 428 | 72 | 60 | 62 | 124 | 17 |
| 429 | 22 | 21 | 130 | 11 | 45 |
| 430 | 20 | 64 | 32 | 16 | 59 |
| 431 | 45 | 34 | 124 | 49 | 57 |
| 432 | 23 | 29 | 76 | 12 | 46 |
| 433 | 6 | 52 | 83 | 12 | 30 |
| 434 | 35 | 85 | 12 | 52 | 133 |
| 435 | 24 | 43 | 72 | 17 | 112 |
| 436 | 88 | 52 | 3 | 78 | 8 |
| 437 | 41 | 76 | 12 | 84 | 21 |
| 438 | 124 | 32 | 112 | 50 | 57 |
| 439 | 60 | 54 | 20 | 68 | 112 |
| 440 | 17 | 39 | 86 | 12 | 25 |
| 441 | 121 | 80 | 60 | 12 | 82 |
| 442 | 49 | 112 | 90 | 120 | 32 |
| 443 | 37 | 39 | 32 | 55 | 12 |
| 444 | 22 | 28 | 35 | 43 | 12 |
| 445 | 2 | 103 | 52 | 3 | 133 |
| 446 | 12 | 46 | 37 | 82 | 18 |
| 447 | 34 | 83 | 25 | 12 | 33 |
| 448 | 53 | 41 | 112 | 25 | 133 |
| 449 | 57 | 38 | 1 | 34 | 47 |
| 450 | 64 | 43 | 25 | 59 | 16 |
| 451 | 61 | 109 | 1 | 36 | 12 |
| 452 | 23 | 34 | 82 | 12 | 81 |
| 453 | 25 | 43 | 24 | 7 | 44 |
| 454 | 72 | 12 | 8 | 22 | 45 |
| 455 | 75 | 3 | 18 | 38 | 133 |
| 456 | 12 | 15 | 70 | 60 | 39 |
| 457 | 12 | 55 | 82 | 130 | 33 |
| 458 | 6 | 12 | 2 | 50 | 57 |
| 459 | 12 | 78 | 68 | 103 | 14 |
| 460 | 63 | 12 | 133 | 10 | 25 |
| 461 | 3 | 91 | 61 | 124 | 30 |
| 462 | 71 | 133 | 15 | 112 | 81 |
| 463 | 64 | 44 | 25 | 76 | 2 |
| 464 | 13 | 24 | 112 | 39 | 45 |
| 465 | 57 | 12 | 38 | 58 | 41 |
| 466 | 5 | 77 | 88 | 12 | 45 |
| 467 | 25 | 70 | 56 | 28 | 112 |
| 468 | 81 | 66 | 121 | 60 | 10 |
| 469 | 58 | 9 | 67 | 35 | 16 |
| 470 | 35 | 63 | 24 | 32 | 121 |
| 471 | 19 | 59 | 56 | 12 | 89 |
| 472 | 7 | 57 | 19 | 32 | 40 |
| 473 | 35 | 47 | 75 | 3 | 45 |
| 474 | 78 | 35 | 18 | 38 | 39 |
| 475 | 121 | 83 | 55 | 69 | 1 |
| 476 | 124 | 12 | 32 | 65 | 57 |
| 477 | 57 | 13 | 12 | 49 | 31 |
| 478 | 49 | 124 | 60 | 80 | 52 |
| 479 | 39 | 41 | 124 | 12 | 24 |
| 480 | 49 | 89 | 124 | 12 | 78 |
| 481 | 35 | 16 | 31 | 49 | 90 |
| 482 | 112 | 40 | 39 | 56 | 80 |
| 483 | 1 | 74 | 85 | 83 | 36 |
| 484 | 60 | 55 | 87 | 103 | 47 |
| 485 | 121 | 89 | 83 | 124 | 49 |
| 486 | 91 | 6 | 49 | 4 | 64 |
| 487 | 124 | 23 | 112 | 62 | 5 |
| 488 | 39 | 90 | 45 | 8 | 68 |
| 489 | 55 | 16 | 84 | 65 | 112 |
| 490 | 112 | 82 | 19 | 71 | 45 |
| 491 | 20 | 112 | 8 | 83 | 14 |
| 492 | 112 | 103 | 46 | 22 | 45 |
| 493 | 16 | 61 | 46 | 90 | 19 |
| 494 | 41 | 124 | 130 | 49 | 87 |
| 495 | 12 | 1 | 81 | 130 | 30 |
| 496 | 74 | 112 | 56 | 18 | 31 |
| 497 | 49 | 37 | 124 | 87 | 103 |
| 498 | 12 | 45 | 25 | 59 | 120 |
| 499 | 83 | 115 | 12 | 121 | 15 |
| 500 | 35 | 112 | 16 | 50 | 58 |
| 501 | 17 | 124 | 77 | 38 | 3 |
| 502 | 21 | 53 | 5 | 124 | 2 |
| 503 | 3 | 25 | 58 | 34 | 89 |
| 504 | 43 | 71 | 38 | 41 | 39 |
| 505 | 49 | 23 | 45 | 40 | 12 |
| 506 | 23 | 12 | 17 | 6 | 82 |
| 507 | 112 | 35 | 127 | 82 | 55 |
| 508 | 67 | 29 | 7 | 39 | 45 |
| 509 | 50 | 12 | 35 | 39 | 1 |
| 510 | 66 | 10 | 53 | 24 | 2 |
| 511 | 121 | 39 | 29 | 35 | 103 |
| 512 | 23 | 56 | 64 | 60 | 12 |
| 513 | 4 | 32 | 87 | 57 | 64 |
| 514 | 28 | 60 | 112 | 45 | 68 |
| 515 | 12 | 61 | 15 | 11 | 23 |
| 516 | 73 | 12 | 34 | 47 | 58 |
| 517 | 9 | 32 | 64 | 62 | 37 |
| 518 | 50 | 12 | 41 | 25 | 86 |
| 519 | 17 | 83 | 103 | 42 | 112 |
| 520 | 55 | 27 | 12 | 9 | 112 |
| 521 | 57 | 40 | 12 | 21 | 55 |
| 522 | 124 | 12 | 25 | 49 | 60 |
| 523 | 118 | 19 | 25 | 83 | 42 |
| 524 | 12 | 120 | 56 | 60 | 107 |
| 525 | 13 | 12 | 61 | 25 | 11 |
| 526 | 120 | 86 | 8 | 23 | 25 |
| 527 | 12 | 83 | 62 | 127 | 31 |
| 528 | 49 | 34 | 45 | 12 | 86 |
| 529 | 12 | 109 | 55 | 69 | 121 |
| 530 | 44 | 59 | 64 | 103 | 5 |
| 531 | 50 | 65 | 2 | 112 | 5 |
| 532 | 121 | 32 | 6 | 124 | 12 |
| 533 | 66 | 88 | 12 | 2 | 121 |
| 534 | 127 | 14 | 84 | 83 | 38 |
| 535 | 3 | 90 | 69 | 49 | 73 |
| 536 | 81 | 4 | 37 | 62 | 12 |
| 537 | 112 | 5 | 40 | 69 | 45 |
| 538 | 109 | 34 | 83 | 66 | 45 |
| 539 | 12 | 130 | 82 | 14 | 1 |
| 540 | 81 | 83 | 47 | 56 | 75 |
| 541 | 86 | 85 | 74 | 49 | 87 |
| 542 | 57 | 64 | 72 | 15 | 66 |
| 543 | 124 | 16 | 28 | 109 | 21 |
| 544 | 64 | 133 | 83 | 32 | 75 |
| 545 | 67 | 83 | 49 | 112 | 20 |
| 546 | 72 | 12 | 103 | 7 | 87 |
| 547 | 83 | 88 | 124 | 26 | 62 |
| 548 | 28 | 112 | 121 | 124 | 39 |
| 549 | 64 | 40 | 45 | 107 | 6 |
| 550 | 34 | 64 | 16 | 38 | 86 |
| 551 | 46 | 12 | 133 | 90 | 45 |
| 552 | 121 | 38 | 71 | 55 | 1 |
| 553 | 64 | 7 | 56 | 22 | 112 |
| 554 | 38 | 44 | 3 | 67 | 75 |
| 555 | 82 | 45 | 5 | 58 | 39 |
| 556 | 12 | 41 | 11 | 71 | 5 |
| 557 | 38 | 31 | 39 | 59 | 83 |
| 558 | 35 | 52 | 19 | 70 | 121 |
| 559 | 86 | 124 | 35 | 90 | 89 |
| 560 | 25 | 4 | 61 | 124 | 24 |
| 561 | 63 | 75 | 1 | 35 | 45 |
| 562 | 91 | 14 | 62 | 112 | 29 |
| 563 | 6 | 12 | 53 | 72 | 56 |
| 564 | 56 | 39 | 49 | 87 | 118 |
| 565 | 12 | 65 | 35 | 2 | 15 |
| 566 | 69 | 12 | 41 | 133 | 80 |
| 567 | 35 | 61 | 45 | 62 | 74 |
| 568 | 84 | 87 | 124 | 47 | 60 |
| 569 | 10 | 82 | 12 | 49 | 87 |
| 570 | 43 | 124 | 83 | 88 | 30 |
| 571 | 26 | 21 | 83 | 2 | 12 |
| 572 | 12 | 70 | 41 | 121 | 29 |
| 573 | 71 | 83 | 20 | 103 | 47 |
| 574 | 22 | 12 | 46 | 21 | 57 |
| 575 | 4 | 61 | 55 | 12 | 127 |
| 576 | 42 | 83 | 38 | 121 | 35 |
| 577 | 124 | 5 | 4 | 55 | 15 |
| 578 | 12 | 55 | 57 | 81 | 130 |
| 579 | 50 | 12 | 107 | 34 | 37 |
| 580 | 35 | 24 | 59 | 45 | 38 |
| 581 | 46 | 112 | 42 | 40 | 16 |
| 582 | 45 | 56 | 107 | 112 | 72 |
| 583 | 27 | 35 | 19 | 127 | 44 |
| 584 | 16 | 24 | 59 | 25 | 43 |
| 585 | 9 | 1 | 12 | 28 | 130 |
| 586 | 89 | 21 | 62 | 54 | 124 |
| 587 | 90 | 44 | 88 | 103 | 112 |
| 588 | 47 | 70 | 35 | 12 | 36 |
| 589 | 109 | 37 | 32 | 124 | 16 |
| 590 | 11 | 56 | 38 | 12 | 41 |
| 591 | 112 | 61 | 21 | 121 | 89 |
| 592 | 49 | 12 | 33 | 86 | 34 |
| 593 | 112 | 50 | 27 | 83 | 88 |
| 594 | 11 | 61 | 6 | 12 | 4 |
| 595 | 89 | 34 | 12 | 24 | 86 |
| 596 | 121 | 19 | 50 | 25 | 24 |
| 597 | 1 | 103 | 57 | 12 | 76 |
| 598 | 70 | 57 | 89 | 38 | 3 |
| 599 | 112 | 12 | 16 | 124 | 73 |
| 600 | 18 | 74 | 53 | 39 | 12 |
| 601 | 83 | 9 | 12 | 16 | 59 |
| 602 | 38 | 112 | 14 | 2 | 67 |
| 603 | 84 | 41 | 66 | 35 | 75 |
| 604 | 63 | 57 | 16 | 43 | 83 |
| 605 | 112 | 14 | 56 | 89 | 91 |
| 606 | 53 | 67 | 73 | 1 | 12 |
| 607 | 103 | 91 | 31 | 81 | 35 |
| 608 | 12 | 84 | 120 | 107 | 78 |
| 609 | 103 | 58 | 91 | 45 | 23 |
| 610 | 80 | 124 | 45 | 38 | 54 |
| 611 | 32 | 124 | 68 | 21 | 118 |
| 612 | 27 | 7 | 64 | 12 | 65 |
| 613 | 1 | 12 | 5 | 85 | 76 |
| 614 | 12 | 35 | 17 | 71 | 73 |
| 615 | 32 | 31 | 90 | 34 | 71 |
| 616 | 78 | 19 | 43 | 52 | 127 |
| 617 | 12 | 23 | 41 | 69 | 2 |
| 618 | 45 | 30 | 12 | 38 | 19 |
| 619 | 83 | 52 | 32 | 10 | 50 |
| 620 | 43 | 55 | 103 | 57 | 39 |
| 621 | 45 | 54 | 12 | 29 | 124 |
| 622 | 16 | 19 | 60 | 12 | 80 |
| 623 | 31 | 54 | 115 | 124 | 6 |
| 624 | 9 | 34 | 49 | 43 | 12 |
| 625 | 12 | 69 | 41 | 14 | 22 |
| 626 | 31 | 133 | 66 | 38 | 67 |
| 627 | 62 | 12 | 87 | 32 | 49 |
| 628 | 12 | 63 | 15 | 35 | 3 |
| 629 | 121 | 35 | 12 | 54 | 34 |
| 630 | 22 | 130 | 124 | 26 | 21 |
| 631 | 67 | 12 | 33 | 22 | 73 |
| 632 | 71 | 39 | 16 | 61 | 58 |
| 633 | 127 | 8 | 118 | 35 | 16 |
| 634 | 45 | 16 | 112 | 11 | 17 |
| 635 | 77 | 12 | 64 | 21 | 16 |
| 636 | 16 | 2 | 32 | 75 | 47 |
| 637 | 112 | 60 | 35 | 63 | 133 |
| 638 | 12 | 76 | 73 | 25 | 72 |
| 639 | 64 | 25 | 3 | 46 | 24 |
| 640 | 56 | 35 | 39 | 52 | 36 |
| 641 | 83 | 64 | 47 | 127 | 62 |
| 642 | 69 | 124 | 33 | 6 | 32 |
| 643 | 30 | 112 | 71 | 50 | 55 |
| 644 | 43 | 26 | 45 | 39 | 67 |
| 645 | 83 | 12 | 9 | 87 | 35 |
| 646 | 53 | 37 | 72 | 121 | 35 |
| 647 | 42 | 11 | 112 | 2 | 6 |
| 648 | 61 | 34 | 55 | 12 | 35 |
| 649 | 52 | 112 | 17 | 31 | 127 |
| 650 | 57 | 34 | 33 | 91 | 12 |
| 651 | 112 | 38 | 16 | 50 | 31 |
| 652 | 1 | 87 | 112 | 72 | 5 |
| 653 | 12 | 71 | 34 | 31 | 78 |
| 654 | 12 | 70 | 72 | 7 | 2 |
| 655 | 45 | 22 | 58 | 12 | 109 |
| 656 | 85 | 12 | 66 | 55 | 26 |
| 657 | 112 | 5 | 17 | 53 | 58 |
| 658 | 35 | 45 | 75 | 30 | 5 |
| 659 | 49 | 71 | 112 | 42 | 22 |
| 660 | 6 | 127 | 12 | 23 | 25 |
| 661 | 11 | 83 | 12 | 115 | 90 |
| 662 | 25 | 67 | 124 | 42 | 5 |
| 663 | 46 | 83 | 76 | 12 | 90 |
| 664 | 69 | 112 | 56 | 80 | 42 |
| 665 | 120 | 66 | 37 | 124 | 55 |
| 666 | 13 | 33 | 49 | 87 | 124 |
| 667 | 22 | 82 | 112 | 40 | 42 |
| 668 | 7 | 11 | 69 | 3 | 25 |
| 669 | 45 | 29 | 35 | 50 | 12 |
| 670 | 12 | 52 | 130 | 25 | 67 |
| 671 | 86 | 19 | 83 | 124 | 43 |
| 672 | 26 | 7 | 16 | 12 | 52 |
| 673 | 15 | 28 | 35 | 37 | 27 |
| 674 | 53 | 32 | 47 | 55 | 124 |
| 675 | 3 | 115 | 62 | 25 | 8 |
| 676 | 57 | 25 | 41 | 12 | 121 |
| 677 | 56 | 50 | 35 | 23 | 21 |
| 678 | 61 | 3 | 6 | 25 | 58 |
| 679 | 39 | 81 | 88 | 68 | 12 |
| 680 | 45 | 34 | 12 | 13 | 67 |
| 681 | 107 | 12 | 41 | 31 | 28 |
| 682 | 66 | 30 | 45 | 2 | 40 |
| 683 | 107 | 90 | 15 | 12 | 54 |
| 684 | 12 | 46 | 7 | 83 | 68 |
| 685 | 35 | 38 | 41 | 45 | 53 |
| 686 | 112 | 91 | 30 | 56 | 42 |
| 687 | 7 | 112 | 43 | 35 | 45 |
| 688 | 34 | 86 | 12 | 67 | 76 |
| 689 | 112 | 13 | 86 | 15 | 87 |
| 690 | 55 | 130 | 7 | 10 | 12 |
| 691 | 1 | 12 | 23 | 8 | 73 |
| 692 | 41 | 35 | 12 | 109 | 87 |
| 693 | 24 | 55 | 35 | 84 | 25 |
| 694 | 83 | 58 | 22 | 32 | 16 |
| 695 | 115 | 29 | 12 | 26 | 7 |
| 696 | 45 | 35 | 71 | 38 | 75 |
| 697 | 61 | 60 | 124 | 49 | 87 |
| 698 | 55 | 54 | 115 | 121 | 58 |
| 699 | 39 | 37 | 4 | 45 | 112 |
| 700 | 23 | 13 | 38 | 31 | 18 |
| 701 | 49 | 45 | 12 | 91 | 34 |
| 702 | 84 | 127 | 53 | 78 | 5 |
| 703 | 12 | 112 | 80 | 57 | 53 |
| 704 | 85 | 56 | 40 | 31 | 112 |
| 705 | 57 | 64 | 12 | 19 | 2 |
| 706 | 82 | 10 | 12 | 43 | 1 |
| 707 | 5 | 75 | 46 | 121 | 35 |
| 708 | 5 | 3 | 2 | 32 | 50 |
| 709 | 33 | 35 | 89 | 50 | 57 |
| 710 | 45 | 34 | 1 | 14 | 72 |
| 711 | 54 | 60 | 55 | 63 | 130 |
| 712 | 118 | 38 | 115 | 12 | 22 |
| 713 | 33 | 10 | 87 | 43 | 39 |
| 714 | 45 | 12 | 55 | 83 | 88 |
| 715 | 83 | 72 | 130 | 45 | 103 |
| 716 | 133 | 56 | 60 | 12 | 90 |
| 717 | 17 | 32 | 64 | 118 | 112 |
| 718 | 64 | 83 | 5 | 112 | 72 |
| 719 | 37 | 124 | 44 | 55 | 112 |
| 720 | 27 | 124 | 66 | 88 | 43 |
| 721 | 38 | 14 | 37 | 57 | 15 |
| 722 | 83 | 3 | 32 | 103 | 76 |
| 723 | 120 | 74 | 32 | 64 | 12 |
| 724 | 109 | 58 | 75 | 15 | 12 |
| 725 | 55 | 60 | 112 | 68 | 56 |
| 726 | 49 | 55 | 19 | 87 | 66 |
| 727 | 49 | 124 | 35 | 45 | 59 |
| 728 | 107 | 34 | 12 | 55 | 121 |
| 729 | 35 | 15 | 124 | 41 | 34 |
| 730 | 124 | 2 | 83 | 18 | 43 |
| 731 | 27 | 127 | 88 | 81 | 112 |
| 732 | 45 | 35 | 5 | 1 | 50 |
| 733 | 12 | 85 | 54 | 107 | 2 |
| 734 | 2 | 18 | 107 | 54 | 89 |
| 735 | 39 | 12 | 91 | 55 | 64 |
| 736 | 57 | 15 | 12 | 84 | 55 |
| 737 | 55 | 35 | 41 | 121 | 74 |
| 738 | 12 | 60 | 1 | 47 | 36 |
| 739 | 124 | 49 | 103 | 115 | 54 |
| 740 | 78 | 40 | 57 | 4 | 12 |
| 741 | 77 | 3 | 58 | 22 | 89 |
| 742 | 107 | 12 | 70 | 39 | 1 |
| 743 | 12 | 115 | 118 | 16 | 54 |
| 744 | 76 | 53 | 10 | 45 | 38 |
| 745 | 1 | 12 | 45 | 38 | 39 |
| 746 | 1 | 25 | 61 | 3 | 91 |
| 747 | 24 | 63 | 64 | 76 | 66 |
| 748 | 47 | 1 | 66 | 64 | 103 |
| 749 | 112 | 33 | 83 | 64 | 127 |
| 750 | 1 | 67 | 89 | 60 | 12 |
| 751 | 127 | 91 | 112 | 107 | 90 |
| 752 | 25 | 61 | 55 | 58 | 54 |
| 753 | 60 | 85 | 83 | 88 | 19 |
| 754 | 65 | 62 | 61 | 124 | 64 |
| 755 | 38 | 12 | 32 | 11 | 16 |
| 756 | 25 | 75 | 59 | 49 | 9 |
| 757 | 12 | 133 | 83 | 103 | 121 |
| 758 | 81 | 18 | 38 | 15 | 50 |
| 759 | 38 | 118 | 31 | 10 | 54 |
| 760 | 45 | 6 | 35 | 38 | 40 |
| 761 | 63 | 71 | 91 | 112 | 59 |
| 762 | 12 | 28 | 55 | 35 | 74 |
| 763 | 50 | 12 | 46 | 7 | 25 |
| 764 | 20 | 3 | 120 | 57 | 38 |
| 765 | 86 | 25 | 13 | 55 | 112 |
| 766 | 45 | 49 | 87 | 40 | 69 |
| 767 | 77 | 18 | 12 | 31 | 55 |
| 768 | 37 | 38 | 43 | 33 | 35 |
| 769 | 90 | 49 | 12 | 40 | 29 |
| 770 | 112 | 91 | 2 | 60 | 86 |
| 771 | 62 | 25 | 124 | 9 | 80 |
| 772 | 12 | 25 | 86 | 4 | 88 |
| 773 | 35 | 38 | 81 | 45 | 133 |
| 774 | 1 | 53 | 25 | 12 | 33 |
| 775 | 5 | 84 | 26 | 12 | 7 |
| 776 | 29 | 36 | 1 | 43 | 12 |
| 777 | 28 | 7 | 60 | 46 | 12 |
| 778 | 28 | 38 | 127 | 35 | 60 |
| 779 | 37 | 118 | 32 | 12 | 90 |
| 780 | 124 | 49 | 103 | 17 | 66 |
| 781 | 5 | 50 | 2 | 15 | 103 |
| 782 | 87 | 7 | 31 | 32 | 90 |
| 783 | 87 | 7 | 63 | 38 | 12 |
| 784 | 76 | 5 | 60 | 30 | 124 |
| 785 | 19 | 12 | 62 | 16 | 84 |
| 786 | 45 | 75 | 44 | 87 | 35 |
| 787 | 127 | 83 | 90 | 19 | 57 |
| 788 | 12 | 17 | 4 | 1 | 109 |
| 789 | 58 | 55 | 27 | 25 | 112 |
| 790 | 112 | 121 | 13 | 67 | 64 |
| 791 | 42 | 49 | 85 | 5 | 18 |
| 792 | 14 | 12 | 83 | 20 | 1 |
| 793 | 3 | 35 | 67 | 82 | 58 |
| 794 | 66 | 27 | 124 | 6 | 61 |
| 795 | 82 | 32 | 43 | 54 | 124 |
| 796 | 120 | 12 | 41 | 25 | 45 |
| 797 | 127 | 38 | 89 | 133 | 55 |
| 798 | 90 | 83 | 24 | 5 | 124 |
| 799 | 40 | 66 | 8 | 83 | 3 |
| 800 | 46 | 17 | 39 | 12 | 64 |
| 801 | 49 | 12 | 86 | 35 | 91 |
| 802 | 35 | 86 | 89 | 42 | 58 |
| 803 | 4 | 39 | 2 | 63 | 89 |
| 804 | 32 | 57 | 12 | 133 | 109 |
| 805 | 121 | 43 | 90 | 6 | 55 |
| 806 | 33 | 19 | 83 | 12 | 85 |
| 807 | 69 | 7 | 64 | 107 | 52 |
| 808 | 3 | 14 | 83 | 18 | 38 |
| 809 | 21 | 30 | 18 | 12 | 7 |
| 810 | 112 | 26 | 57 | 25 | 7 |
| 811 | 1 | 22 | 43 | 12 | 53 |
| 812 | 37 | 60 | 54 | 22 | 12 |
| 813 | 83 | 124 | 127 | 43 | 1 |
| 814 | 58 | 55 | 90 | 52 | 16 |
| 815 | 15 | 17 | 45 | 66 | 31 |
| 816 | 4 | 10 | 38 | 16 | 31 |
| 817 | 60 | 42 | 55 | 112 | 121 |
| 818 | 91 | 107 | 124 | 47 | 60 |
| 819 | 86 | 1 | 64 | 66 | 83 |
| 820 | 1 | 60 | 18 | 26 | 12 |
| 821 | 54 | 58 | 33 | 3 | 12 |
| 822 | 112 | 69 | 91 | 56 | 30 |
| 823 | 24 | 6 | 45 | 85 | 83 |
| 824 | 61 | 90 | 66 | 78 | 5 |
| 825 | 19 | 35 | 31 | 63 | 16 |
| 826 | 130 | 5 | 27 | 124 | 22 |
| 827 | 66 | 112 | 55 | 37 | 121 |
| 828 | 73 | 56 | 55 | 83 | 12 |
| 829 | 22 | 91 | 67 | 112 | 17 |
| 830 | 11 | 89 | 112 | 45 | 56 |
| 831 | 7 | 71 | 35 | 115 | 12 |
| 832 | 27 | 112 | 57 | 4 | 16 |
| 833 | 1 | 12 | 77 | 3 | 87 |
| 834 | 28 | 12 | 88 | 64 | 38 |
| 835 | 25 | 69 | 124 | 2 | 9 |
| 836 | 67 | 57 | 31 | 107 | 12 |
| 837 | 85 | 25 | 130 | 82 | 12 |
| 838 | 5 | 103 | 66 | 72 | 2 |
| 839 | 3 | 69 | 55 | 115 | 43 |
| 840 | 25 | 58 | 77 | 124 | 16 |
| 841 | 66 | 47 | 57 | 17 | 83 |
| 842 | 49 | 19 | 87 | 12 | 23 |
| 843 | 34 | 42 | 12 | 13 | 38 |
| 844 | 63 | 55 | 12 | 58 | 41 |
| 845 | 124 | 39 | 17 | 72 | 12 |
| 846 | 18 | 45 | 69 | 112 | 88 |
| 847 | 12 | 32 | 15 | 35 | 2 |
| 848 | 45 | 69 | 38 | 65 | 11 |
| 849 | 107 | 64 | 12 | 14 | 50 |
| 850 | 57 | 88 | 112 | 25 | 2 |
| 851 | 12 | 67 | 74 | 35 | 91 |
| 852 | 12 | 55 | 69 | 80 | 124 |
| 853 | 50 | 76 | 52 | 12 | 4 |
| 854 | 11 | 3 | 2 | 25 | 73 |
| 855 | 47 | 112 | 56 | 124 | 89 |
| 856 | 1 | 62 | 14 | 12 | 20 |
| 857 | 71 | 26 | 88 | 56 | 112 |
| 858 | 17 | 127 | 31 | 112 | 45 |
| 859 | 83 | 39 | 60 | 124 | 15 |
| 860 | 83 | 18 | 7 | 69 | 3 |
| 861 | 127 | 72 | 12 | 24 | 35 |
| 862 | 121 | 31 | 19 | 83 | 78 |
| 863 | 30 | 56 | 69 | 10 | 112 |
| 864 | 25 | 33 | 12 | 28 | 35 |
| 865 | 52 | 103 | 124 | 7 | 21 |
| 866 | 46 | 85 | 55 | 112 | 31 |
| 867 | 56 | 29 | 124 | 25 | 35 |
| 868 | 3 | 133 | 83 | 121 | 112 |
| 869 | 3 | 60 | 39 | 25 | 34 |
| 870 | 12 | 35 | 16 | 109 | 13 |
| 871 | 112 | 42 | 55 | 20 | 91 |
| 872 | 124 | 45 | 60 | 58 | 62 |
| 873 | 59 | 13 | 32 | 42 | 83 |
| 874 | 55 | 71 | 121 | 12 | 88 |
| 875 | 4 | 67 | 12 | 64 | 107 |
| 876 | 2 | 112 | 45 | 27 | 69 |
| 877 | 64 | 61 | 16 | 28 | 2 |
| 878 | 80 | 57 | 47 | 24 | 35 |
| 879 | 77 | 12 | 107 | 85 | 19 |
| 880 | 52 | 38 | 90 | 20 | 49 |
| 881 | 35 | 86 | 42 | 112 | 15 |
| 882 | 61 | 1 | 4 | 12 | 9 |
| 883 | 64 | 84 | 49 | 87 | 121 |
| 884 | 19 | 74 | 76 | 58 | 12 |
| 885 | 75 | 39 | 32 | 19 | 56 |
| 886 | 17 | 32 | 87 | 76 | 112 |
| 887 | 39 | 107 | 90 | 43 | 45 |
| 888 | 1 | 13 | 9 | 103 | 112 |
| 889 | 2 | 53 | 10 | 39 | 66 |
| 890 | 78 | 11 | 66 | 41 | 87 |
| 891 | 12 | 39 | 6 | 55 | 15 |
| 892 | 49 | 87 | 133 | 90 | 15 |
| 893 | 22 | 78 | 58 | 27 | 61 |
| 894 | 70 | 124 | 73 | 12 | 88 |
| 895 | 12 | 58 | 90 | 35 | 32 |
| 896 | 62 | 91 | 27 | 24 | 112 |
| 897 | 25 | 3 | 78 | 31 | 56 |
| 898 | 69 | 71 | 23 | 112 | 7 |
| 899 | 39 | 36 | 69 | 112 | 55 |
| 900 | 112 | 115 | 14 | 90 | 5 |
| 901 | 85 | 90 | 5 | 38 | 14 |
| 902 | 61 | 58 | 23 | 130 | 107 |
| 903 | 83 | 55 | 40 | 6 | 45 |
| 904 | 12 | 78 | 72 | 35 | 50 |
| 905 | 58 | 3 | 49 | 76 | 55 |
| 906 | 45 | 65 | 69 | 78 | 44 |
| 907 | 88 | 42 | 15 | 39 | 112 |
| 908 | 56 | 91 | 112 | 18 | 9 |
| 909 | 107 | 8 | 78 | 12 | 60 |
| 910 | 63 | 27 | 45 | 2 | 19 |
| 911 | 87 | 44 | 35 | 3 | 57 |
| 912 | 57 | 47 | 83 | 120 | 4 |
| 913 | 72 | 12 | 28 | 60 | 78 |
| 914 | 19 | 57 | 60 | 24 | 49 |
| 915 | 120 | 15 | 35 | 124 | 56 |
| 916 | 91 | 3 | 124 | 82 | 39 |
| 917 | 112 | 25 | 56 | 65 | 18 |
| 918 | 34 | 124 | 18 | 12 | 49 |
| 919 | 3 | 64 | 37 | 41 | 107 |
| 920 | 56 | 25 | 124 | 112 | 53 |
| 921 | 11 | 71 | 50 | 12 | 35 |
| 922 | 12 | 59 | 5 | 41 | 24 |
| 923 | 55 | 112 | 107 | 12 | 54 |
| 924 | 124 | 61 | 15 | 35 | 88 |
| 925 | 13 | 12 | 2 | 38 | 67 |
| 926 | 35 | 55 | 124 | 121 | 15 |
| 927 | 77 | 88 | 12 | 39 | 50 |
| 928 | 28 | 7 | 12 | 112 | 25 |
| 929 | 12 | 41 | 24 | 1 | 29 |
| 930 | 61 | 78 | 39 | 3 | 28 |
| 931 | 41 | 112 | 88 | 12 | 31 |
| 932 | 112 | 2 | 81 | 19 | 57 |
| 933 | 10 | 27 | 71 | 115 | 32 |
| 934 | 12 | 38 | 84 | 87 | 5 |
| 935 | 53 | 3 | 21 | 5 | 25 |
| 936 | 1 | 77 | 12 | 60 | 27 |
| 937 | 19 | 42 | 22 | 58 | 12 |
| 938 | 6 | 83 | 85 | 37 | 46 |
| 939 | 84 | 67 | 49 | 64 | 4 |
| 940 | 44 | 34 | 15 | 9 | 124 |
| 941 | 112 | 22 | 78 | 45 | 69 |
| 942 | 45 | 55 | 68 | 3 | 69 |
| 943 | 45 | 55 | 12 | 5 | 87 |
| 944 | 1 | 34 | 45 | 52 | 115 |
| 945 | 69 | 120 | 112 | 45 | 49 |
| 946 | 41 | 53 | 7 | 60 | 12 |
| 947 | 45 | 109 | 69 | 64 | 49 |
| 948 | 36 | 1 | 21 | 4 | 12 |
| 949 | 53 | 42 | 10 | 112 | 2 |
| 950 | 41 | 3 | 80 | 83 | 12 |
| 951 | 1 | 72 | 37 | 66 | 45 |
| 952 | 54 | 124 | 21 | 107 | 12 |
| 953 | 22 | 33 | 12 | 112 | 11 |
| 954 | 73 | 19 | 67 | 76 | 12 |
| 955 | 35 | 55 | 121 | 84 | 8 |
| 956 | 12 | 55 | 74 | 84 | 3 |
| 957 | 75 | 35 | 32 | 10 | 47 |
| 958 | 72 | 25 | 17 | 112 | 70 |
| 959 | 73 | 47 | 1 | 54 | 24 |
| 960 | 55 | 66 | 42 | 25 | 76 |
| 961 | 81 | 45 | 12 | 34 | 90 |
| 962 | 112 | 83 | 81 | 64 | 43 |
| 963 | 90 | 12 | 124 | 107 | 45 |
| 964 | 75 | 59 | 2 | 112 | 42 |
| 965 | 66 | 2 | 22 | 11 | 58 |
| 966 | 25 | 124 | 88 | 50 | 54 |
| 967 | 115 | 124 | 44 | 35 | 90 |
| 968 | 42 | 23 | 12 | 34 | 80 |
| 969 | 40 | 127 | 112 | 22 | 2 |
| 970 | 6 | 12 | 49 | 83 | 7 |
| 971 | 12 | 62 | 88 | 11 | 35 |
| 972 | 80 | 40 | 41 | 12 | 5 |
| 973 | 45 | 3 | 12 | 69 | 133 |
| 974 | 38 | 89 | 25 | 2 | 3 |
| 975 | 40 | 88 | 27 | 90 | 112 |
| 976 | 35 | 124 | 45 | 60 | 58 |
| 977 | 10 | 56 | 112 | 45 | 70 |
| 978 | 12 | 35 | 70 | 127 | 56 |
| 979 | 73 | 53 | 39 | 90 | 49 |
| 980 | 73 | 50 | 29 | 12 | 64 |
| 981 | 12 | 67 | 78 | 17 | 107 |
| 982 | 12 | 24 | 115 | 25 | 127 |
| 983 | 112 | 17 | 71 | 28 | 49 |
| 984 | 121 | 35 | 112 | 78 | 9 |
| 985 | 56 | 112 | 67 | 31 | 70 |
| 986 | 15 | 75 | 57 | 12 | 19 |
| 987 | 83 | 56 | 57 | 61 | 124 |
| 988 | 42 | 3 | 10 | 124 | 49 |
| 989 | 3 | 12 | 15 | 31 | 35 |
| 990 | 35 | 1 | 112 | 45 | 69 |
| 991 | 40 | 3 | 73 | 12 | 49 |
| 992 | 8 | 55 | 36 | 59 | 25 |
| 993 | 89 | 67 | 49 | 18 | 39 |
| 994 | 47 | 57 | 71 | 64 | 112 |
| 995 | 17 | 25 | 3 | 50 | 2 |
| 996 | 14 | 35 | 58 | 77 | 32 |
| 997 | 5 | 13 | 58 | 22 | 71 |
| 998 | 75 | 36 | 10 | 2 | 12 |
| 999 | 12 | 57 | 43 | 10 | 49 |
| 1000 | 38 | 3 | 84 | 60 | 124 |
| 1001 | 85 | 12 | 56 | 57 | 1 |
| 1002 | 25 | 46 | 124 | 121 | 45 |
| 1003 | 12 | 18 | 19 | 78 | 41 |
| 1004 | 55 | 12 | 61 | 130 | 30 |
| 1005 | 12 | 72 | 73 | 41 | 25 |
| 1006 | 55 | 73 | 21 | 45 | 35 |
| 1007 | 19 | 35 | 121 | 112 | 124 |
| 1008 | 60 | 45 | 124 | 27 | 69 |
| 1009 | 112 | 69 | 56 | 61 | 133 |
| 1010 | 124 | 3 | 88 | 43 | 16 |
| 1011 | 8 | 81 | 22 | 25 | 58 |
| 1012 | 127 | 17 | 87 | 124 | 49 |
| 1013 | 24 | 21 | 43 | 1 | 39 |
| 1014 | 29 | 74 | 45 | 83 | 2 |
| 1015 | 9 | 10 | 12 | 45 | 2 |
| 1016 | 12 | 5 | 72 | 18 | 83 |
| 1017 | 42 | 35 | 91 | 41 | 112 |
| 1018 | 78 | 5 | 2 | 89 | 52 |
| 1019 | 44 | 39 | 130 | 12 | 107 |
| 1020 | 121 | 12 | 7 | 71 | 60 |
| 1021 | 83 | 32 | 18 | 55 | 112 |
| 1022 | 35 | 121 | 21 | 25 | 45 |
| 1023 | 12 | 32 | 6 | 16 | 115 |
| 1024 | 34 | 50 | 27 | 18 | 32 |
| 1025 | 25 | 112 | 27 | 88 | 8 |
| 1026 | 50 | 23 | 22 | 16 | 5 |
| 1027 | 3 | 6 | 83 | 22 | 121 |
| 1028 | 90 | 17 | 44 | 124 | 60 |
| 1029 | 73 | 84 | 12 | 118 | 55 |
| 1030 | 41 | 12 | 39 | 64 | 8 |
| 1031 | 34 | 14 | 54 | 90 | 12 |
| 1032 | 90 | 25 | 73 | 76 | 124 |
| 1033 | 77 | 12 | 9 | 71 | 127 |
| 1034 | 53 | 28 | 75 | 112 | 56 |
| 1035 | 130 | 115 | 90 | 23 | 124 |
| 1036 | 3 | 10 | 35 | 64 | 62 |
| 1037 | 86 | 34 | 124 | 32 | 67 |
| 1038 | 36 | 107 | 64 | 2 | 124 |
| 1039 | 35 | 77 | 41 | 12 | 103 |
| 1040 | 1 | 33 | 38 | 12 | 71 |
| 1041 | 64 | 12 | 27 | 5 | 55 |
| 1042 | 10 | 42 | 3 | 38 | 5 |
| 1043 | 39 | 3 | 40 | 12 | 87 |
| 1044 | 12 | 64 | 28 | 22 | 71 |
| 1045 | 60 | 37 | 71 | 12 | 41 |
| 1046 | 112 | 29 | 37 | 56 | 31 |
| 1047 | 47 | 32 | 124 | 36 | 24 |
| 1048 | 12 | 44 | 6 | 55 | 65 |
| 1049 | 73 | 41 | 44 | 12 | 22 |
| 1050 | 56 | 25 | 19 | 12 | 127 |
| 1051 | 43 | 39 | 56 | 87 | 88 |
| 1052 | 12 | 7 | 69 | 74 | 72 |
| 1053 | 83 | 90 | 41 | 85 | 6 |
| 1054 | 62 | 12 | 4 | 1 | 118 |
| 1055 | 12 | 120 | 5 | 6 | 20 |
| 1056 | 112 | 71 | 107 | 52 | 56 |
| 1057 | 55 | 83 | 45 | 6 | 65 |
| 1058 | 16 | 74 | 12 | 87 | 19 |
| 1059 | 2 | 41 | 29 | 112 | 31 |
| 1060 | 121 | 32 | 12 | 78 | 40 |
| 1061 | 115 | 16 | 52 | 64 | 118 |
| 1062 | 82 | 112 | 55 | 32 | 66 |
| 1063 | 40 | 3 | 130 | 32 | 112 |
| 1064 | 4 | 124 | 22 | 15 | 58 |
| 1065 | 6 | 124 | 64 | 32 | 75 |
| 1066 | 78 | 63 | 44 | 45 | 66 |
| 1067 | 5 | 41 | 76 | 124 | 78 |
| 1068 | 12 | 35 | 77 | 62 | 4 |
| 1069 | 112 | 7 | 78 | 11 | 19 |
| 1070 | 58 | 133 | 60 | 65 | 73 |
| 1071 | 49 | 52 | 15 | 64 | 89 |
| 1072 | 5 | 3 | 2 | 81 | 25 |
| 1073 | 64 | 61 | 85 | 12 | 83 |
| 1074 | 25 | 66 | 45 | 55 | 30 |
| 1075 | 35 | 39 | 57 | 36 | 72 |
| 1076 | 57 | 127 | 2 | 83 | 9 |
| 1077 | 19 | 53 | 82 | 12 | 42 |
| 1078 | 87 | 9 | 18 | 49 | 1 |
| 1079 | 45 | 7 | 83 | 12 | 53 |
| 1080 | 55 | 82 | 25 | 12 | 74 |
| 1081 | 58 | 107 | 76 | 118 | 22 |
| 1082 | 57 | 12 | 2 | 64 | 53 |
| 1083 | 12 | 53 | 76 | 21 | 19 |
| 1084 | 3 | 21 | 64 | 28 | 89 |
| 1085 | 83 | 86 | 45 | 112 | 12 |
| 1086 | 10 | 12 | 52 | 45 | 80 |
| 1087 | 52 | 13 | 85 | 12 | 1 |
| 1088 | 124 | 57 | 11 | 86 | 38 |
| 1089 | 86 | 73 | 12 | 37 | 65 |
| 1090 | 86 | 34 | 80 | 45 | 12 |
| 1091 | 72 | 81 | 44 | 60 | 124 |
| 1092 | 78 | 112 | 103 | 28 | 67 |
| 1093 | 67 | 18 | 12 | 42 | 66 |
| 1094 | 124 | 45 | 49 | 55 | 66 |
| 1095 | 8 | 112 | 53 | 31 | 21 |
| 1096 | 57 | 1 | 38 | 45 | 36 |
| 1097 | 32 | 3 | 35 | 12 | 16 |
| 1098 | 52 | 55 | 121 | 12 | 69 |
| 1099 | 25 | 124 | 4 | 41 | 49 |
| 1100 | 53 | 22 | 87 | 91 | 124 |
| 1101 | 39 | 12 | 70 | 41 | 80 |
| 1102 | 5 | 59 | 28 | 124 | 2 |
| 1103 | 25 | 55 | 54 | 67 | 112 |
| 1104 | 25 | 124 | 61 | 56 | 49 |
| 1105 | 40 | 32 | 30 | 37 | 12 |
| 1106 | 133 | 88 | 12 | 35 | 50 |
| 1107 | 130 | 39 | 2 | 57 | 47 |
| 1108 | 72 | 4 | 45 | 12 | 112 |
| 1109 | 3 | 34 | 58 | 77 | 39 |
| 1110 | 1 | 118 | 20 | 12 | 8 |
| 1111 | 112 | 83 | 84 | 44 | 124 |
| 1112 | 17 | 90 | 66 | 5 | 115 |
| 1113 | 3 | 35 | 19 | 130 | 75 |
| 1114 | 62 | 13 | 12 | 41 | 22 |
| 1115 | 36 | 82 | 25 | 8 | 1 |
| 1116 | 7 | 60 | 46 | 9 | 12 |
| 1117 | 13 | 23 | 58 | 37 | 16 |
| 1118 | 28 | 8 | 50 | 16 | 35 |
| 1119 | 52 | 69 | 87 | 39 | 49 |
| 1120 | 18 | 50 | 124 | 2 | 118 |
| 1121 | 3 | 63 | 112 | 69 | 90 |
| 1122 | 12 | 56 | 115 | 71 | 10 |
| 1123 | 24 | 62 | 3 | 25 | 75 |
| 1124 | 62 | 69 | 89 | 57 | 112 |
| 1125 | 83 | 66 | 46 | 41 | 31 |
| 1126 | 9 | 41 | 124 | 12 | 107 |
| 1127 | 11 | 22 | 32 | 89 | 19 |
| 1128 | 28 | 88 | 124 | 61 | 47 |
| 1129 | 84 | 31 | 19 | 78 | 112 |
| 1130 | 55 | 8 | 107 | 3 | 84 |
| 1131 | 12 | 22 | 9 | 63 | 42 |
| 1132 | 24 | 52 | 32 | 81 | 12 |
| 1133 | 130 | 83 | 39 | 57 | 66 |
| 1134 | 1 | 17 | 19 | 56 | 12 |
| 1135 | 38 | 49 | 76 | 57 | 86 |
| 1136 | 44 | 124 | 12 | 43 | 55 |
| 1137 | 50 | 71 | 20 | 12 | 133 |
| 1138 | 39 | 83 | 76 | 65 | 38 |
| 1139 | 41 | 124 | 83 | 5 | 70 |
| 1140 | 39 | 56 | 124 | 5 | 21 |
| 1141 | 52 | 12 | 35 | 124 | 71 |
| 1142 | 3 | 66 | 42 | 19 | 124 |
| 1143 | 72 | 64 | 55 | 121 | 35 |
| 1144 | 53 | 112 | 2 | 90 | 50 |
| 1145 | 84 | 34 | 42 | 19 | 89 |
| 1146 | 76 | 80 | 12 | 25 | 64 |
| 1147 | 66 | 43 | 39 | 55 | 62 |
| 1148 | 22 | 130 | 83 | 23 | 82 |
| 1149 | 133 | 25 | 124 | 45 | 28 |
| 1150 | 76 | 12 | 55 | 5 | 50 |
| 1151 | 39 | 49 | 50 | 90 | 83 |
| 1152 | 58 | 83 | 38 | 112 | 55 |
| 1153 | 112 | 45 | 4 | 31 | 30 |
| 1154 | 77 | 46 | 18 | 23 | 12 |
| 1155 | 18 | 5 | 52 | 124 | 9 |
| 1156 | 12 | 112 | 62 | 133 | 71 |
| 1157 | 56 | 112 | 70 | 121 | 25 |
| 1158 | 22 | 12 | 107 | 41 | 67 |
| 1159 | 16 | 14 | 12 | 35 | 124 |
| 1160 | 121 | 12 | 71 | 58 | 35 |
| 1161 | 2 | 16 | 47 | 64 | 61 |
| 1162 | 61 | 57 | 121 | 112 | 65 |
| 1163 | 115 | 69 | 3 | 12 | 73 |
| 1164 | 32 | 25 | 12 | 88 | 118 |
| 1165 | 5 | 112 | 50 | 32 | 67 |
| 1166 | 16 | 64 | 89 | 30 | 50 |
| 1167 | 1 | 29 | 57 | 90 | 66 |
| 1168 | 46 | 12 | 55 | 87 | 121 |
| 1169 | 22 | 16 | 38 | 61 | 11 |
| 1170 | 27 | 14 | 112 | 84 | 90 |
| 1171 | 60 | 5 | 69 | 68 | 124 |
| 1172 | 124 | 38 | 8 | 73 | 86 |
| 1173 | 12 | 37 | 7 | 17 | 35 |
| 1174 | 85 | 7 | 53 | 12 | 91 |
| 1175 | 112 | 46 | 87 | 11 | 17 |
| 1176 | 53 | 9 | 50 | 35 | 12 |
| 1177 | 29 | 120 | 72 | 31 | 12 |
| 1178 | 63 | 32 | 2 | 75 | 39 |
| 1179 | 10 | 60 | 12 | 73 | 32 |
| 1180 | 70 | 86 | 16 | 12 | 34 |
| 1181 | 35 | 30 | 45 | 121 | 1 |
| 1182 | 5 | 124 | 103 | 80 | 68 |
| 1183 | 130 | 35 | 61 | 55 | 121 |
| 1184 | 65 | 87 | 12 | 54 | 69 |
| 1185 | 60 | 133 | 71 | 66 | 64 |
| 1186 | 71 | 49 | 35 | 57 | 47 |
| 1187 | 66 | 52 | 60 | 124 | 91 |
| 1188 | 112 | 12 | 124 | 127 | 89 |
| 1189 | 16 | 64 | 52 | 38 | 59 |
| 1190 | 50 | 12 | 77 | 67 | 64 |
| 1191 | 35 | 124 | 3 | 17 | 34 |
| 1192 | 21 | 66 | 44 | 16 | 1 |
| 1193 | 112 | 45 | 39 | 67 | 69 |
| 1194 | 124 | 32 | 69 | 40 | 31 |
| 1195 | 127 | 112 | 83 | 18 | 78 |
| 1196 | 3 | 57 | 12 | 84 | 1 |
| 1197 | 44 | 55 | 34 | 12 | 19 |
| 1198 | 15 | 112 | 71 | 12 | 22 |
| 1199 | 49 | 64 | 18 | 40 | 112 |
| 1200 | 124 | 120 | 32 | 4 | 83 |
| 1201 | 16 | 63 | 34 | 12 | 1 |
| 1202 | 57 | 27 | 69 | 1 | 11 |
| 1203 | 72 | 121 | 29 | 21 | 10 |
| 1204 | 39 | 32 | 50 | 133 | 22 |
| 1205 | 68 | 45 | 78 | 58 | 76 |
| 1206 | 49 | 30 | 60 | 2 | 124 |
| 1207 | 19 | 124 | 16 | 91 | 42 |
| 1208 | 130 | 10 | 12 | 60 | 65 |
| 1209 | 83 | 12 | 14 | 121 | 84 |
| 1210 | 55 | 112 | 68 | 44 | 20 |
| 1211 | 58 | 7 | 21 | 121 | 55 |
| 1212 | 76 | 40 | 12 | 4 | 54 |
| 1213 | 12 | 11 | 67 | 49 | 87 |
| 1214 | 25 | 88 | 84 | 65 | 124 |
| 1215 | 60 | 55 | 18 | 28 | 54 |
| 1216 | 1 | 47 | 12 | 118 | 30 |
| 1217 | 90 | 86 | 1 | 5 | 12 |
| 1218 | 71 | 27 | 112 | 28 | 55 |
| 1219 | 41 | 68 | 66 | 24 | 65 |
| 1220 | 90 | 124 | 85 | 83 | 49 |
| 1221 | 12 | 64 | 57 | 29 | 20 |
| 1222 | 112 | 64 | 75 | 45 | 88 |
| 1223 | 120 | 37 | 38 | 53 | 12 |
| 1224 | 55 | 69 | 6 | 16 | 38 |
| 1225 | 65 | 41 | 12 | 42 | 39 |
| 1226 | 118 | 45 | 60 | 112 | 76 |
| 1227 | 12 | 30 | 112 | 45 | 16 |
| 1228 | 66 | 34 | 124 | 60 | 76 |
| 1229 | 84 | 89 | 47 | 8 | 58 |
| 1230 | 32 | 112 | 26 | 17 | 57 |
| 1231 | 25 | 35 | 9 | 112 | 84 |
| 1232 | 124 | 50 | 60 | 74 | 47 |
| 1233 | 1 | 112 | 133 | 4 | 56 |
| 1234 | 124 | 121 | 73 | 3 | 88 |
| 1235 | 64 | 74 | 12 | 91 | 77 |
| 1236 | 25 | 45 | 2 | 66 | 32 |
| 1237 | 83 | 66 | 50 | 32 | 81 |
| 1238 | 37 | 57 | 64 | 28 | 60 |
| 1239 | 23 | 124 | 36 | 25 | 67 |
| 1240 | 35 | 78 | 118 | 127 | 25 |
| 1241 | 12 | 36 | 1 | 31 | 67 |
| 1242 | 55 | 58 | 54 | 21 | 18 |
| 1243 | 118 | 74 | 8 | 55 | 25 |
| 1244 | 12 | 76 | 1 | 27 | 67 |
| 1245 | 69 | 43 | 6 | 12 | 1 |
| 1246 | 25 | 24 | 19 | 76 | 72 |
| 1247 | 78 | 7 | 61 | 16 | 12 |
| 1248 | 115 | 64 | 60 | 12 | 107 |
| 1249 | 88 | 2 | 17 | 12 | 1 |
| 1250 | 112 | 12 | 7 | 19 | 24 |
| 1251 | 25 | 89 | 28 | 3 | 61 |
| 1252 | 127 | 35 | 16 | 124 | 12 |
| 1253 | 60 | 25 | 23 | 124 | 5 |
| 1254 | 121 | 112 | 11 | 22 | 115 |
| 1255 | 12 | 3 | 6 | 45 | 41 |
| 1256 | 3 | 82 | 107 | 45 | 38 |
| 1257 | 35 | 31 | 103 | 8 | 16 |
| 1258 | 80 | 55 | 57 | 12 | 72 |
| 1259 | 75 | 69 | 74 | 12 | 32 |
| 1260 | 45 | 39 | 33 | 12 | 41 |
| 1261 | 12 | 17 | 21 | 54 | 39 |
| 1262 | 23 | 90 | 45 | 74 | 12 |
| 1263 | 49 | 10 | 60 | 56 | 112 |
| 1264 | 76 | 6 | 12 | 20 | 26 |
| 1265 | 76 | 12 | 10 | 69 | 46 |
| 1266 | 83 | 124 | 43 | 87 | 90 |
| 1267 | 74 | 37 | 35 | 57 | 121 |
| 1268 | 37 | 12 | 81 | 13 | 19 |
| 1269 | 3 | 18 | 25 | 115 | 19 |
| 1270 | 75 | 133 | 1 | 107 | 66 |
| 1271 | 57 | 112 | 45 | 76 | 62 |
| 1272 | 90 | 2 | 67 | 40 | 112 |
| 1273 | 3 | 61 | 65 | 34 | 25 |
| 1274 | 8 | 133 | 43 | 57 | 22 |
| 1275 | 54 | 33 | 61 | 6 | 124 |
| 1276 | 88 | 82 | 55 | 127 | 103 |
| 1277 | 49 | 84 | 12 | 118 | 35 |
| 1278 | 14 | 47 | 56 | 112 | 88 |
| 1279 | 55 | 112 | 16 | 50 | 71 |
| 1280 | 31 | 81 | 82 | 45 | 38 |
| 1281 | 10 | 44 | 69 | 12 | 60 |
| 1282 | 15 | 12 | 58 | 19 | 84 |
| 1283 | 32 | 58 | 69 | 115 | 64 |
| 1284 | 1 | 46 | 16 | 118 | 38 |
| 1285 | 7 | 68 | 41 | 12 | 107 |
| 1286 | 10 | 45 | 73 | 22 | 12 |
| 1287 | 46 | 15 | 85 | 112 | 45 |
| 1288 | 12 | 7 | 46 | 36 | 29 |
| 1289 | 40 | 60 | 41 | 42 | 12 |
| 1290 | 22 | 23 | 12 | 85 | 40 |
| 1291 | 83 | 64 | 31 | 127 | 49 |
| 1292 | 9 | 35 | 1 | 45 | 112 |
| 1293 | 36 | 12 | 44 | 26 | 39 |
| 1294 | 124 | 37 | 86 | 66 | 38 |
| 1295 | 29 | 45 | 39 | 85 | 76 |
| 1296 | 64 | 41 | 11 | 25 | 12 |
| 1297 | 90 | 112 | 45 | 121 | 31 |
| 1298 | 19 | 112 | 87 | 5 | 1 |
| 1299 | 21 | 115 | 45 | 124 | 29 |
| 1300 | 37 | 72 | 23 | 12 | 57 |
| 1301 | 107 | 12 | 78 | 118 | 45 |
| 1302 | 58 | 124 | 35 | 57 | 15 |
| 1303 | 83 | 28 | 58 | 103 | 32 |
| 1304 | 22 | 77 | 12 | 21 | 56 |
| 1305 | 68 | 32 | 12 | 67 | 78 |
| 1306 | 86 | 36 | 58 | 83 | 49 |
| 1307 | 26 | 34 | 12 | 16 | 124 |
| 1308 | 22 | 12 | 45 | 83 | 1 |
| 1309 | 36 | 112 | 45 | 83 | 4 |
| 1310 | 34 | 32 | 124 | 7 | 57 |
| 1311 | 9 | 12 | 57 | 39 | 10 |
| 1312 | 15 | 56 | 19 | 12 | 77 |
| 1313 | 74 | 12 | 55 | 25 | 3 |
| 1314 | 35 | 45 | 12 | 15 | 75 |
| 1315 | 57 | 30 | 55 | 103 | 12 |
| 1316 | 14 | 121 | 83 | 35 | 120 |
| 1317 | 18 | 112 | 91 | 84 | 38 |
| 1318 | 60 | 22 | 124 | 62 | 19 |
| 1319 | 103 | 12 | 72 | 39 | 41 |
| 1320 | 56 | 80 | 112 | 50 | 91 |
| 1321 | 41 | 3 | 89 | 34 | 37 |
| 1322 | 64 | 118 | 21 | 25 | 124 |
| 1323 | 55 | 27 | 23 | 45 | 90 |
| 1324 | 59 | 64 | 124 | 91 | 49 |
| 1325 | 41 | 121 | 124 | 2 | 69 |
| 1326 | 71 | 112 | 2 | 87 | 45 |
| 1327 | 46 | 57 | 8 | 83 | 66 |
| 1328 | 16 | 46 | 33 | 58 | 35 |
| 1329 | 80 | 37 | 12 | 40 | 71 |
| 1330 | 62 | 32 | 83 | 42 | 130 |
| 1331 | 20 | 49 | 69 | 3 | 38 |
| 1332 | 60 | 112 | 35 | 69 | 45 |
| 1333 | 85 | 3 | 49 | 90 | 91 |
| 1334 | 12 | 35 | 50 | 17 | 86 |
| 1335 | 34 | 62 | 29 | 12 | 45 |
| 1336 | 8 | 75 | 35 | 39 | 66 |
| 1337 | 88 | 112 | 127 | 33 | 31 |
| 1338 | 21 | 10 | 55 | 57 | 50 |
| 1339 | 55 | 85 | 20 | 12 | 65 |
| 1340 | 45 | 124 | 75 | 64 | 83 |
| 1341 | 62 | 58 | 45 | 112 | 35 |
| 1342 | 60 | 88 | 1 | 12 | 103 |
| 1343 | 19 | 27 | 45 | 124 | 2 |
| 1344 | 112 | 45 | 27 | 76 | 7 |
| 1345 | 47 | 12 | 55 | 11 | 127 |
| 1346 | 57 | 35 | 5 | 45 | 73 |
| 1347 | 52 | 60 | 35 | 124 | 72 |
| 1348 | 57 | 22 | 52 | 4 | 45 |
| 1349 | 12 | 52 | 17 | 1 | 4 |
| 1350 | 45 | 58 | 18 | 15 | 78 |
| 1351 | 124 | 15 | 35 | 103 | 32 |
| 1352 | 17 | 121 | 78 | 52 | 112 |
| 1353 | 28 | 109 | 12 | 34 | 41 |
| 1354 | 55 | 54 | 8 | 121 | 89 |
| 1355 | 71 | 124 | 35 | 16 | 44 |
| 1356 | 91 | 124 | 38 | 121 | 45 |
| 1357 | 35 | 127 | 58 | 73 | 49 |
| 1358 | 39 | 71 | 49 | 127 | 35 |
| 1359 | 12 | 39 | 17 | 34 | 73 |
| 1360 | 49 | 56 | 121 | 19 | 35 |
| 1361 | 54 | 25 | 103 | 55 | 89 |
| 1362 | 67 | 124 | 32 | 31 | 56 |
| 1363 | 55 | 127 | 45 | 70 | 25 |
| 1364 | 34 | 32 | 124 | 86 | 74 |
| 1365 | 65 | 83 | 31 | 57 | 112 |
| 1366 | 1 | 83 | 36 | 127 | 40 |
| 1367 | 52 | 8 | 50 | 35 | 62 |
| 1368 | 12 | 28 | 1 | 23 | 36 |
| 1369 | 49 | 26 | 124 | 60 | 85 |
| 1370 | 76 | 12 | 55 | 50 | 127 |
| 1371 | 124 | 9 | 7 | 121 | 35 |
| 1372 | 3 | 45 | 112 | 68 | 57 |
| 1373 | 12 | 34 | 55 | 86 | 80 |
| 1374 | 124 | 88 | 5 | 2 | 1 |
| 1375 | 23 | 38 | 127 | 76 | 49 |
| 1376 | 45 | 124 | 34 | 18 | 81 |
| 1377 | 12 | 87 | 41 | 22 | 3 |
| 1378 | 22 | 1 | 12 | 45 | 25 |
| 1379 | 124 | 23 | 25 | 103 | 67 |
| 1380 | 121 | 50 | 28 | 49 | 87 |
| 1381 | 3 | 31 | 32 | 24 | 83 |
| 1382 | 86 | 28 | 25 | 43 | 35 |
| 1383 | 83 | 38 | 115 | 39 | 46 |
| 1384 | 37 | 10 | 15 | 124 | 34 |
| 1385 | 57 | 44 | 22 | 12 | 77 |
| 1386 | 107 | 78 | 56 | 88 | 12 |
| 1387 | 35 | 46 | 25 | 64 | 44 |
| 1388 | 109 | 12 | 7 | 23 | 73 |
| 1389 | 36 | 78 | 69 | 83 | 121 |
| 1390 | 44 | 76 | 47 | 58 | 55 |
| 1391 | 90 | 5 | 70 | 127 | 78 |
| 1392 | 45 | 77 | 12 | 86 | 37 |
| 1393 | 38 | 55 | 16 | 14 | 1 |
| 1394 | 61 | 127 | 70 | 56 | 112 |
| 1395 | 25 | 4 | 45 | 12 | 61 |
| 1396 | 1 | 35 | 112 | 42 | 17 |
| 1397 | 53 | 44 | 2 | 35 | 75 |
| 1398 | 72 | 61 | 112 | 121 | 50 |
| 1399 | 18 | 41 | 39 | 38 | 127 |
| 1400 | 55 | 24 | 37 | 12 | 47 |
| 1401 | 88 | 25 | 19 | 53 | 21 |
| 1402 | 1 | 42 | 12 | 38 | 109 |
| 1403 | 4 | 21 | 127 | 89 | 55 |
| 1404 | 31 | 8 | 103 | 72 | 112 |
| 1405 | 32 | 60 | 124 | 16 | 90 |
| 1406 | 8 | 121 | 72 | 68 | 35 |
| 1407 | 29 | 12 | 56 | 107 | 80 |
| 1408 | 59 | 41 | 12 | 23 | 54 |
| 1409 | 103 | 33 | 23 | 112 | 15 |
| 1410 | 82 | 85 | 21 | 87 | 86 |
| 1411 | 82 | 18 | 35 | 124 | 15 |
| 1412 | 35 | 41 | 23 | 12 | 9 |
| 1413 | 12 | 90 | 124 | 35 | 32 |
| 1414 | 8 | 41 | 12 | 36 | 30 |
| 1415 | 70 | 1 | 12 | 57 | 22 |
| 1416 | 33 | 4 | 49 | 25 | 112 |
| 1417 | 88 | 32 | 6 | 124 | 75 |
| 1418 | 10 | 43 | 107 | 124 | 86 |
| 1419 | 124 | 55 | 130 | 44 | 21 |
| 1420 | 130 | 69 | 20 | 35 | 16 |
| 1421 | 23 | 90 | 53 | 91 | 112 |
| 1422 | 54 | 32 | 124 | 11 | 76 |
| 1423 | 73 | 19 | 55 | 12 | 6 |
| 1424 | 12 | 18 | 77 | 74 | 127 |
| 1425 | 39 | 124 | 9 | 107 | 2 |
| 1426 | 124 | 10 | 8 | 49 | 115 |
| 1427 | 65 | 112 | 121 | 3 | 67 |
| 1428 | 12 | 10 | 59 | 124 | 19 |
| 1429 | 124 | 74 | 84 | 23 | 12 |
| 1430 | 112 | 38 | 21 | 90 | 130 |
| 1431 | 49 | 107 | 75 | 46 | 90 |
| 1432 | 33 | 12 | 10 | 35 | 22 |
| 1433 | 30 | 1 | 43 | 24 | 12 |
| 1434 | 12 | 112 | 20 | 26 | 54 |
| 1435 | 107 | 3 | 4 | 88 | 25 |
| 1436 | 32 | 41 | 103 | 124 | 45 |
| 1437 | 49 | 130 | 90 | 112 | 17 |
| 1438 | 58 | 16 | 44 | 25 | 55 |
| 1439 | 5 | 112 | 53 | 30 | 57 |
| 1440 | 77 | 39 | 87 | 49 | 88 |
| 1441 | 124 | 17 | 57 | 12 | 35 |
| 1442 | 112 | 82 | 49 | 45 | 53 |
| 1443 | 63 | 121 | 124 | 35 | 10 |
| 1444 | 43 | 60 | 65 | 124 | 91 |
| 1445 | 26 | 14 | 38 | 60 | 124 |
| 1446 | 130 | 45 | 57 | 83 | 18 |
| 1447 | 83 | 18 | 47 | 56 | 12 |
| 1448 | 57 | 60 | 35 | 11 | 121 |
| 1449 | 52 | 15 | 12 | 9 | 112 |
| 1450 | 8 | 16 | 1 | 88 | 12 |
| 1451 | 91 | 60 | 1 | 57 | 66 |
| 1452 | 55 | 12 | 35 | 84 | 127 |
| 1453 | 23 | 12 | 21 | 81 | 1 |
| 1454 | 25 | 10 | 71 | 13 | 7 |
| 1455 | 12 | 59 | 34 | 45 | 75 |
| 1456 | 55 | 56 | 57 | 17 | 12 |
| 1457 | 59 | 38 | 3 | 133 | 5 |
| 1458 | 2 | 83 | 124 | 61 | 56 |
| 1459 | 3 | 66 | 56 | 40 | 89 |
| 1460 | 23 | 2 | 21 | 57 | 127 |
| 1461 | 60 | 112 | 91 | 121 | 56 |
| 1462 | 25 | 124 | 5 | 3 | 91 |
| 1463 | 4 | 3 | 25 | 50 | 67 |
| 1464 | 83 | 5 | 42 | 124 | 43 |
| 1465 | 53 | 76 | 73 | 25 | 3 |
| 1466 | 65 | 112 | 45 | 86 | 58 |
| 1467 | 15 | 47 | 55 | 12 | 76 |
| 1468 | 12 | 81 | 112 | 124 | 37 |
| 1469 | 7 | 84 | 15 | 55 | 12 |
| 1470 | 90 | 112 | 63 | 19 | 30 |
| 1471 | 20 | 12 | 60 | 1 | 44 |
| 1472 | 12 | 59 | 21 | 41 | 56 |
| 1473 | 12 | 50 | 25 | 81 | 34 |
| 1474 | 36 | 78 | 50 | 39 | 83 |
| 1475 | 74 | 80 | 37 | 124 | 41 |
| 1476 | 16 | 35 | 12 | 10 | 45 |
| 1477 | 35 | 55 | 72 | 112 | 50 |
| 1478 | 2 | 1 | 64 | 12 | 47 |
| 1479 | 50 | 5 | 49 | 112 | 15 |
| 1480 | 39 | 67 | 3 | 18 | 130 |
| 1481 | 7 | 29 | 14 | 12 | 8 |
| 1482 | 1 | 44 | 67 | 45 | 34 |
| 1483 | 61 | 41 | 56 | 64 | 12 |
| 1484 | 2 | 86 | 66 | 85 | 55 |
| 1485 | 82 | 60 | 45 | 12 | 83 |
| 1486 | 46 | 63 | 16 | 115 | 124 |
| 1487 | 60 | 52 | 49 | 124 | 39 |
| 1488 | 29 | 12 | 19 | 46 | 24 |
| 1489 | 124 | 49 | 7 | 120 | 60 |
| 1490 | 121 | 83 | 82 | 18 | 3 |
| 1491 | 103 | 112 | 53 | 31 | 25 |
| 1492 | 22 | 27 | 12 | 6 | 77 |
| 1493 | 55 | 45 | 1 | 58 | 46 |
| 1494 | 25 | 7 | 22 | 3 | 24 |
| 1495 | 83 | 121 | 35 | 9 | 30 |
| 1496 | 10 | 55 | 38 | 3 | 7 |
| 1497 | 76 | 44 | 57 | 64 | 124 |
| 1498 | 35 | 124 | 42 | 15 | 13 |
| 1499 | 57 | 5 | 12 | 39 | 4 |
| 1500 | 41 | 42 | 112 | 72 | 22 |
| 1501 | 45 | 78 | 33 | 31 | 112 |
| 1502 | 35 | 28 | 12 | 127 | 133 |
| 1503 | 45 | 82 | 35 | 124 | 90 |
| 1504 | 60 | 21 | 64 | 16 | 25 |
| 1505 | 107 | 78 | 12 | 112 | 54 |
| 1506 | 1 | 81 | 25 | 55 | 36 |
| 1507 | 75 | 38 | 45 | 34 | 12 |
| 1508 | 19 | 17 | 41 | 124 | 60 |
| 1509 | 44 | 73 | 23 | 12 | 57 |
| 1510 | 12 | 118 | 46 | 35 | 85 |
| 1511 | 32 | 12 | 65 | 17 | 7 |
| 1512 | 22 | 72 | 5 | 121 | 35 |
| 1513 | 50 | 121 | 124 | 2 | 90 |
| 1514 | 15 | 18 | 23 | 56 | 112 |
| 1515 | 2 | 60 | 33 | 1 | 12 |
| 1516 | 39 | 112 | 50 | 4 | 83 |
| 1517 | 130 | 32 | 67 | 64 | 16 |
| 1518 | 39 | 61 | 25 | 60 | 13 |
| 1519 | 7 | 121 | 55 | 11 | 83 |
| 1520 | 25 | 115 | 3 | 57 | 60 |
| 1521 | 16 | 35 | 124 | 56 | 40 |
| 1522 | 88 | 37 | 12 | 74 | 41 |
| 1523 | 55 | 86 | 109 | 127 | 5 |
| 1524 | 107 | 12 | 86 | 31 | 19 |
| 1525 | 127 | 56 | 39 | 45 | 24 |
| 1526 | 40 | 4 | 112 | 67 | 66 |
| 1527 | 81 | 16 | 77 | 115 | 12 |
| 1528 | 78 | 45 | 1 | 57 | 38 |
| 1529 | 78 | 62 | 35 | 12 | 69 |
| 1530 | 25 | 81 | 8 | 12 | 3 |
| 1531 | 12 | 45 | 112 | 60 | 15 |
| 1532 | 50 | 65 | 2 | 112 | 42 |
| 1533 | 7 | 16 | 17 | 6 | 12 |
| 1534 | 10 | 25 | 2 | 35 | 12 |
| 1535 | 3 | 63 | 71 | 16 | 35 |
| 1536 | 46 | 83 | 13 | 45 | 39 |
| 1537 | 19 | 58 | 12 | 10 | 28 |
| 1538 | 37 | 14 | 127 | 112 | 55 |
| 1539 | 133 | 36 | 50 | 63 | 12 |
| 1540 | 18 | 112 | 124 | 45 | 80 |
| 1541 | 63 | 10 | 71 | 25 | 12 |
| 1542 | 12 | 87 | 38 | 56 | 39 |
| 1543 | 80 | 86 | 12 | 64 | 17 |
| 1544 | 70 | 103 | 63 | 133 | 47 |
| 1545 | 11 | 7 | 90 | 3 | 25 |
| 1546 | 4 | 25 | 3 | 88 | 53 |
| 1547 | 75 | 130 | 19 | 12 | 34 |
| 1548 | 38 | 115 | 35 | 39 | 32 |
| 1549 | 2 | 34 | 127 | 120 | 12 |
| 1550 | 1 | 124 | 27 | 54 | 70 |
| 1551 | 60 | 12 | 8 | 49 | 20 |
| 1552 | 18 | 58 | 23 | 16 | 29 |
| 1553 | 81 | 12 | 30 | 1 | 78 |
| 1554 | 21 | 41 | 12 | 65 | 26 |
| 1555 | 25 | 12 | 56 | 68 | 90 |
| 1556 | 4 | 1 | 66 | 124 | 85 |
| 1557 | 66 | 12 | 46 | 44 | 10 |
| 1558 | 12 | 68 | 88 | 16 | 76 |
| 1559 | 12 | 47 | 44 | 54 | 25 |
| 1560 | 133 | 49 | 25 | 69 | 124 |
| 1561 | 68 | 49 | 84 | 124 | 16 |
| 1562 | 124 | 121 | 35 | 33 | 21 |
| 1563 | 12 | 72 | 5 | 17 | 80 |
| 1564 | 2 | 12 | 5 | 25 | 8 |
| 1565 | 70 | 91 | 66 | 124 | 60 |
| 1566 | 83 | 29 | 50 | 112 | 37 |
| 1567 | 39 | 38 | 121 | 3 | 10 |
| 1568 | 62 | 63 | 13 | 41 | 12 |
| 1569 | 41 | 35 | 66 | 76 | 83 |
| 1570 | 107 | 39 | 3 | 30 | 90 |
| 1571 | 35 | 37 | 83 | 32 | 46 |
| 1572 | 44 | 47 | 35 | 75 | 115 |
| 1573 | 12 | 28 | 35 | 109 | 58 |
| 1574 | 46 | 16 | 39 | 8 | 35 |
| 1575 | 64 | 112 | 5 | 18 | 83 |
| 1576 | 42 | 45 | 40 | 82 | 38 |
| 1577 | 1 | 124 | 87 | 112 | 57 |
| 1578 | 76 | 112 | 35 | 91 | 42 |
| 1579 | 31 | 36 | 85 | 55 | 8 |
| 1580 | 61 | 15 | 112 | 124 | 38 |
| 1581 | 6 | 65 | 44 | 12 | 57 |
| 1582 | 76 | 23 | 12 | 57 | 22 |
| 1583 | 56 | 8 | 49 | 2 | 3 |
| 1584 | 16 | 90 | 118 | 61 | 124 |
| 1585 | 26 | 87 | 54 | 12 | 121 |
| 1586 | 83 | 124 | 7 | 127 | 5 |
| 1587 | 121 | 64 | 88 | 78 | 12 |
| 1588 | 25 | 61 | 9 | 46 | 3 |
| 1589 | 6 | 41 | 10 | 23 | 12 |
| 1590 | 46 | 12 | 67 | 84 | 38 |
| 1591 | 64 | 133 | 45 | 107 | 12 |
| 1592 | 87 | 25 | 78 | 43 | 61 |
| 1593 | 44 | 61 | 3 | 39 | 25 |
| 1594 | 28 | 61 | 8 | 66 | 55 |
| 1595 | 49 | 4 | 112 | 87 | 42 |
| 1596 | 38 | 60 | 109 | 1 | 12 |
| 1597 | 112 | 121 | 67 | 90 | 4 |
| 1598 | 47 | 66 | 35 | 7 | 12 |
| 1599 | 90 | 112 | 75 | 58 | 91 |
| 1600 | 35 | 103 | 85 | 112 | 91 |
| 1601 | 27 | 60 | 15 | 1 | 12 |
| 1602 | 19 | 41 | 65 | 67 | 12 |
| 1603 | 66 | 124 | 59 | 46 | 5 |
| 1604 | 72 | 40 | 41 | 12 | 47 |
| 1605 | 12 | 57 | 74 | 8 | 35 |
| 1606 | 34 | 9 | 112 | 45 | 78 |
| 1607 | 89 | 38 | 35 | 86 | 71 |
| 1608 | 91 | 3 | 64 | 82 | 112 |
| 1609 | 55 | 45 | 22 | 69 | 75 |
| 1610 | 41 | 6 | 12 | 11 | 4 |
| 1611 | 127 | 1 | 67 | 38 | 3 |
| 1612 | 34 | 45 | 109 | 90 | 88 |
| 1613 | 91 | 12 | 121 | 76 | 37 |
| 1614 | 46 | 12 | 24 | 6 | 41 |
| 1615 | 45 | 25 | 35 | 23 | 91 |
| 1616 | 12 | 67 | 1 | 4 | 72 |
| 1617 | 28 | 34 | 35 | 12 | 86 |
| 1618 | 53 | 57 | 10 | 12 | 16 |
| 1619 | 16 | 38 | 69 | 60 | 12 |
| 1620 | 57 | 25 | 2 | 112 | 4 |
| 1621 | 124 | 81 | 31 | 112 | 37 |
| 1622 | 45 | 8 | 64 | 38 | 3 |
| 1623 | 1 | 115 | 3 | 38 | 80 |
| 1624 | 74 | 12 | 38 | 22 | 42 |
| 1625 | 16 | 7 | 121 | 12 | 52 |
| 1626 | 59 | 52 | 1 | 55 | 12 |
| 1627 | 25 | 36 | 33 | 82 | 54 |
| 1628 | 1 | 40 | 45 | 12 | 103 |
| 1629 | 25 | 112 | 50 | 28 | 3 |
| 1630 | 41 | 32 | 124 | 25 | 20 |
| 1631 | 18 | 57 | 24 | 12 | 19 |
| 1632 | 34 | 50 | 12 | 60 | 56 |
| 1633 | 70 | 12 | 37 | 32 | 21 |
| 1634 | 85 | 18 | 27 | 21 | 58 |
| 1635 | 54 | 112 | 83 | 8 | 22 |
| 1636 | 49 | 84 | 124 | 43 | 91 |
| 1637 | 12 | 112 | 121 | 64 | 58 |
| 1638 | 38 | 45 | 30 | 17 | 22 |
| 1639 | 59 | 121 | 38 | 3 | 133 |
| 1640 | 43 | 83 | 57 | 71 | 4 |
| 1641 | 42 | 15 | 112 | 71 | 23 |
| 1642 | 66 | 8 | 75 | 25 | 3 |
| 1643 | 2 | 57 | 121 | 112 | 70 |
| 1644 | 59 | 23 | 121 | 112 | 70 |
| 1645 | 19 | 12 | 26 | 8 | 60 |
| 1646 | 124 | 41 | 59 | 6 | 80 |
| 1647 | 12 | 74 | 49 | 54 | 78 |
| 1648 | 118 | 121 | 12 | 22 | 34 |
| 1649 | 107 | 12 | 124 | 56 | 37 |
| 1650 | 83 | 39 | 77 | 25 | 45 |
| 1651 | 35 | 52 | 45 | 23 | 66 |
| 1652 | 90 | 29 | 39 | 49 | 87 |
| 1653 | 49 | 69 | 91 | 12 | 11 |
| 1654 | 12 | 41 | 84 | 22 | 57 |
| 1655 | 103 | 12 | 1 | 88 | 49 |
| 1656 | 50 | 55 | 21 | 3 | 109 |
| 1657 | 124 | 35 | 60 | 27 | 66 |
| 1658 | 40 | 43 | 15 | 112 | 8 |
| 1659 | 38 | 133 | 5 | 45 | 60 |
| 1660 | 5 | 78 | 34 | 127 | 74 |
| 1661 | 12 | 45 | 53 | 69 | 1 |
| 1662 | 115 | 83 | 12 | 6 | 53 |
| 1663 | 3 | 31 | 57 | 45 | 35 |
| 1664 | 3 | 23 | 83 | 31 | 45 |
| 1665 | 88 | 12 | 5 | 107 | 39 |
| 1666 | 14 | 2 | 57 | 25 | 127 |
| 1667 | 12 | 42 | 19 | 82 | 81 |
| 1668 | 24 | 39 | 12 | 81 | 25 |
| 1669 | 55 | 61 | 73 | 130 | 12 |
| 1670 | 70 | 73 | 12 | 35 | 41 |
| 1671 | 25 | 1 | 8 | 38 | 118 |
| 1672 | 47 | 12 | 36 | 38 | 2 |
| 1673 | 88 | 45 | 34 | 64 | 78 |
| 1674 | 35 | 87 | 38 | 3 | 18 |
| 1675 | 5 | 56 | 112 | 6 | 15 |
| 1676 | 27 | 41 | 78 | 45 | 12 |
| 1677 | 39 | 60 | 10 | 8 | 3 |
| 1678 | 16 | 55 | 31 | 45 | 112 |
| 1679 | 42 | 68 | 55 | 87 | 130 |
| 1680 | 112 | 124 | 61 | 50 | 16 |
| 1681 | 35 | 83 | 36 | 75 | 19 |
| 1682 | 60 | 56 | 38 | 10 | 18 |
| 1683 | 83 | 67 | 66 | 85 | 90 |
| 1684 | 18 | 61 | 124 | 31 | 49 |
| 1685 | 3 | 50 | 37 | 39 | 61 |
| 1686 | 25 | 58 | 36 | 7 | 12 |
| 1687 | 75 | 90 | 68 | 1 | 5 |
| 1688 | 56 | 39 | 45 | 21 | 85 |
| 1689 | 59 | 75 | 41 | 12 | 29 |
| 1690 | 32 | 45 | 65 | 90 | 21 |
| 1691 | 32 | 2 | 64 | 45 | 124 |
| 1692 | 133 | 17 | 58 | 55 | 5 |
| 1693 | 62 | 30 | 12 | 6 | 19 |
| 1694 | 7 | 74 | 25 | 12 | 42 |
| 1695 | 50 | 47 | 12 | 64 | 34 |
| 1696 | 76 | 12 | 39 | 107 | 86 |
| 1697 | 35 | 47 | 89 | 54 | 75 |
| 1698 | 12 | 67 | 25 | 16 | 22 |
| 1699 | 57 | 30 | 4 | 2 | 112 |
| 1700 | 80 | 12 | 15 | 67 | 25 |
| 1701 | 39 | 3 | 83 | 58 | 32 |
| 1702 | 45 | 124 | 73 | 21 | 34 |
| 1703 | 65 | 12 | 78 | 6 | 45 |
| 1704 | 15 | 36 | 83 | 127 | 124 |
| 1705 | 50 | 90 | 112 | 24 | 19 |
| 1706 | 81 | 60 | 77 | 46 | 112 |
| 1707 | 20 | 73 | 12 | 34 | 76 |
| 1708 | 120 | 3 | 25 | 69 | 30 |
| 1709 | 2 | 53 | 66 | 45 | 65 |
| 1710 | 33 | 18 | 56 | 25 | 112 |
| 1711 | 57 | 63 | 14 | 88 | 66 |
| 1712 | 130 | 23 | 75 | 86 | 83 |
| 1713 | 39 | 14 | 12 | 31 | 38 |
| 1714 | 83 | 35 | 61 | 12 | 41 |
| 1715 | 38 | 8 | 23 | 26 | 33 |
| 1716 | 66 | 35 | 82 | 130 | 83 |
| 1717 | 85 | 89 | 56 | 19 | 83 |
| 1718 | 29 | 12 | 49 | 124 | 65 |
| 1719 | 39 | 63 | 120 | 61 | 53 |
| 1720 | 58 | 74 | 55 | 112 | 10 |
| 1721 | 18 | 44 | 23 | 12 | 1 |
| 1722 | 88 | 90 | 112 | 21 | 27 |
| 1723 | 11 | 55 | 112 | 91 | 60 |
| 1724 | 12 | 85 | 82 | 63 | 28 |
| 1725 | 14 | 12 | 35 | 45 | 57 |
| 1726 | 16 | 60 | 112 | 86 | 72 |
| 1727 | 1 | 23 | 36 | 12 | 67 |
| 1728 | 24 | 45 | 83 | 3 | 21 |
| 1729 | 88 | 45 | 112 | 41 | 11 |
| 1730 | 35 | 57 | 12 | 23 | 1 |
| 1731 | 29 | 124 | 59 | 16 | 35 |
| 1732 | 71 | 46 | 49 | 124 | 5 |
| 1733 | 85 | 64 | 44 | 33 | 66 |
| 1734 | 5 | 3 | 54 | 107 | 124 |
| 1735 | 15 | 18 | 20 | 12 | 67 |
| 1736 | 12 | 30 | 86 | 34 | 118 |
| 1737 | 25 | 41 | 84 | 21 | 112 |
| 1738 | 38 | 22 | 45 | 58 | 5 |
| 1739 | 12 | 11 | 84 | 62 | 43 |
| 1740 | 86 | 124 | 10 | 25 | 31 |
| 1741 | 25 | 3 | 42 | 55 | 50 |
| 1742 | 7 | 36 | 57 | 83 | 84 |
| 1743 | 56 | 5 | 124 | 35 | 37 |
| 1744 | 15 | 112 | 103 | 5 | 4 |
| 1745 | 10 | 45 | 86 | 78 | 12 |
| 1746 | 35 | 72 | 8 | 60 | 12 |
| 1747 | 47 | 87 | 42 | 66 | 55 |
| 1748 | 88 | 124 | 59 | 7 | 25 |
| 1749 | 37 | 72 | 81 | 112 | 85 |
| 1750 | 18 | 12 | 41 | 68 | 63 |
| 1751 | 75 | 83 | 47 | 57 | 15 |
| 1752 | 41 | 20 | 16 | 28 | 35 |
| 1753 | 35 | 103 | 9 | 89 | 49 |
| 1754 | 12 | 124 | 1 | 70 | 23 |
| 1755 | 35 | 64 | 15 | 71 | 124 |
| 1756 | 45 | 23 | 59 | 12 | 38 |
| 1757 | 54 | 12 | 47 | 87 | 15 |
| 1758 | 24 | 66 | 63 | 56 | 59 |
| 1759 | 41 | 17 | 46 | 39 | 12 |
| 1760 | 55 | 37 | 35 | 121 | 65 |
| 1761 | 78 | 70 | 69 | 45 | 35 |
| 1762 | 57 | 2 | 12 | 88 | 46 |
| 1763 | 34 | 86 | 15 | 53 | 12 |
| 1764 | 112 | 20 | 71 | 38 | 78 |
| 1765 | 39 | 47 | 59 | 38 | 43 |
| 1766 | 66 | 55 | 12 | 121 | 53 |
| 1767 | 39 | 8 | 3 | 87 | 35 |
| 1768 | 90 | 21 | 60 | 16 | 64 |
| 1769 | 38 | 39 | 35 | 75 | 15 |
| 1770 | 12 | 7 | 87 | 42 | 107 |
| 1771 | 41 | 26 | 103 | 115 | 12 |
| 1772 | 32 | 6 | 54 | 12 | 87 |
| 1773 | 6 | 32 | 124 | 34 | 80 |
| 1774 | 73 | 43 | 12 | 62 | 38 |
| 1775 | 73 | 16 | 10 | 9 | 35 |
| 1776 | 11 | 32 | 124 | 133 | 130 |
| 1777 | 22 | 42 | 133 | 121 | 38 |
| 1778 | 12 | 14 | 20 | 1 | 45 |
| 1779 | 1 | 25 | 124 | 61 | 68 |
| 1780 | 58 | 12 | 32 | 55 | 27 |
| 1781 | 115 | 127 | 57 | 35 | 46 |
| 1782 | 67 | 121 | 12 | 60 | 19 |
| 1783 | 3 | 90 | 21 | 15 | 62 |
| 1784 | 49 | 82 | 133 | 50 | 21 |
| 1785 | 16 | 37 | 12 | 58 | 5 |
| 1786 | 112 | 83 | 43 | 84 | 57 |
| 1787 | 25 | 86 | 65 | 112 | 85 |
| 1788 | 32 | 124 | 5 | 46 | 45 |
| 1789 | 9 | 66 | 78 | 5 | 41 |
| 1790 | 124 | 32 | 22 | 121 | 33 |
| 1791 | 26 | 16 | 58 | 35 | 12 |
| 1792 | 61 | 49 | 21 | 121 | 124 |
| 1793 | 35 | 121 | 12 | 23 | 64 |
| 1794 | 133 | 34 | 57 | 12 | 83 |
| 1795 | 69 | 22 | 8 | 80 | 32 |
| 1796 | 33 | 124 | 118 | 115 | 2 |
| 1797 | 55 | 35 | 12 | 45 | 57 |
| 1798 | 69 | 45 | 35 | 57 | 1 |
| 1799 | 112 | 10 | 130 | 90 | 73 |
| 1800 | 49 | 112 | 83 | 74 | 6 |
| 1801 | 41 | 55 | 112 | 12 | 18 |
| 1802 | 12 | 31 | 58 | 15 | 83 |
| 1803 | 35 | 89 | 27 | 72 | 49 |
| 1804 | 33 | 7 | 45 | 55 | 12 |
| 1805 | 47 | 7 | 22 | 12 | 86 |
| 1806 | 15 | 12 | 72 | 35 | 40 |
| 1807 | 121 | 35 | 91 | 124 | 76 |
| 1808 | 31 | 49 | 35 | 124 | 121 |
| 1809 | 60 | 78 | 32 | 124 | 22 |
| 1810 | 87 | 66 | 124 | 11 | 45 |
| 1811 | 112 | 88 | 59 | 72 | 127 |
| 1812 | 1 | 12 | 29 | 31 | 37 |
| 1813 | 39 | 71 | 49 | 41 | 38 |
| 1814 | 70 | 53 | 124 | 45 | 34 |
| 1815 | 88 | 55 | 12 | 6 | 81 |
| 1816 | 12 | 24 | 55 | 9 | 38 |
| 1817 | 83 | 85 | 127 | 2 | 22 |
| 1818 | 22 | 124 | 45 | 83 | 109 |
| 1819 | 15 | 52 | 49 | 87 | 5 |
| 1820 | 67 | 1 | 86 | 69 | 12 |
| 1821 | 121 | 112 | 6 | 56 | 55 |
| 1822 | 6 | 32 | 3 | 89 | 25 |
| 1823 | 112 | 15 | 25 | 78 | 60 |
| 1824 | 73 | 12 | 45 | 107 | 24 |
| 1825 | 20 | 17 | 91 | 112 | 59 |
| 1826 | 19 | 67 | 124 | 62 | 60 |
| 1827 | 12 | 17 | 41 | 80 | 37 |
| 1828 | 8 | 60 | 45 | 52 | 12 |
| 1829 | 56 | 16 | 35 | 21 | 58 |
| 1830 | 30 | 13 | 60 | 12 | 1 |
| 1831 | 35 | 121 | 127 | 55 | 45 |
| 1832 | 35 | 12 | 52 | 39 | 80 |
| 1833 | 71 | 49 | 60 | 12 | 43 |
| 1834 | 112 | 42 | 17 | 23 | 35 |
| 1835 | 64 | 107 | 89 | 12 | 43 |
| 1836 | 58 | 65 | 78 | 40 | 12 |
| 1837 | 81 | 45 | 38 | 34 | 31 |
| 1838 | 56 | 29 | 12 | 6 | 1 |
| 1839 | 12 | 16 | 60 | 47 | 130 |
| 1840 | 56 | 3 | 5 | 45 | 88 |
| 1841 | 57 | 18 | 121 | 35 | 23 |
| 1842 | 19 | 57 | 49 | 50 | 60 |
| 1843 | 69 | 73 | 20 | 49 | 19 |
| 1844 | 3 | 8 | 45 | 55 | 32 |
| 1845 | 55 | 61 | 127 | 8 | 112 |
| 1846 | 59 | 16 | 124 | 83 | 62 |
| 1847 | 46 | 59 | 85 | 12 | 7 |
| 1848 | 109 | 76 | 78 | 8 | 32 |
| 1849 | 65 | 1 | 12 | 2 | 60 |
| 1850 | 2 | 12 | 118 | 1 | 61 |
| 1851 | 45 | 49 | 33 | 124 | 60 |
| 1852 | 124 | 71 | 91 | 61 | 56 |
| 1853 | 45 | 28 | 112 | 53 | 65 |
| 1854 | 60 | 76 | 12 | 21 | 40 |
| 1855 | 32 | 124 | 2 | 84 | 34 |
| 1856 | 60 | 25 | 23 | 107 | 124 |
| 1857 | 12 | 56 | 57 | 21 | 107 |
| 1858 | 81 | 50 | 12 | 84 | 21 |
| 1859 | 19 | 69 | 12 | 35 | 24 |
| 1860 | 15 | 112 | 69 | 17 | 78 |
| 1861 | 30 | 49 | 12 | 56 | 38 |
| 1862 | 121 | 32 | 50 | 22 | 124 |
| 1863 | 121 | 60 | 55 | 5 | 12 |
| 1864 | 62 | 5 | 124 | 16 | 32 |
| 1865 | 88 | 15 | 12 | 30 | 26 |
| 1866 | 121 | 83 | 10 | 46 | 38 |
| 1867 | 7 | 12 | 65 | 25 | 83 |
| 1868 | 124 | 3 | 41 | 45 | 12 |
| 1869 | 61 | 112 | 3 | 24 | 69 |
| 1870 | 35 | 47 | 16 | 15 | 12 |
| 1871 | 35 | 45 | 15 | 124 | 4 |
| 1872 | 59 | 64 | 5 | 25 | 8 |
| 1873 | 18 | 115 | 107 | 58 | 31 |
| 1874 | 107 | 68 | 109 | 12 | 64 |
| 1875 | 12 | 85 | 2 | 50 | 6 |
| 1876 | 2 | 50 | 21 | 39 | 7 |
| 1877 | 30 | 12 | 10 | 77 | 44 |
| 1878 | 86 | 35 | 45 | 12 | 107 |
| 1879 | 45 | 25 | 61 | 34 | 55 |
| 1880 | 31 | 12 | 1 | 23 | 53 |
| 1881 | 88 | 12 | 3 | 34 | 80 |
| 1882 | 50 | 38 | 10 | 19 | 12 |
| 1883 | 55 | 43 | 16 | 12 | 35 |
| 1884 | 42 | 38 | 39 | 124 | 133 |
| 1885 | 121 | 49 | 11 | 12 | 21 |
| 1886 | 13 | 16 | 32 | 88 | 124 |
| 1887 | 2 | 75 | 19 | 81 | 12 |
| 1888 | 87 | 121 | 64 | 25 | 88 |
| 1889 | 133 | 45 | 17 | 12 | 13 |
| 1890 | 32 | 37 | 124 | 103 | 86 |
| 1891 | 64 | 83 | 49 | 85 | 44 |
| 1892 | 80 | 1 | 50 | 12 | 21 |
| 1893 | 20 | 112 | 38 | 86 | 133 |
| 1894 | 63 | 6 | 58 | 84 | 89 |
| 1895 | 87 | 38 | 118 | 49 | 35 |
| 1896 | 39 | 60 | 124 | 6 | 22 |
| 1897 | 42 | 33 | 112 | 71 | 2 |
| 1898 | 41 | 20 | 12 | 74 | 19 |
| 1899 | 61 | 37 | 67 | 124 | 83 |
| 1900 | 6 | 9 | 55 | 17 | 12 |
| 1901 | 39 | 37 | 25 | 56 | 112 |
| 1902 | 12 | 7 | 25 | 21 | 57 |
| 1903 | 12 | 28 | 72 | 41 | 39 |
| 1904 | 60 | 5 | 120 | 25 | 124 |
| 1905 | 25 | 78 | 74 | 49 | 11 |
| 1906 | 22 | 115 | 35 | 44 | 58 |
| 1907 | 45 | 12 | 58 | 81 | 40 |
| 1908 | 38 | 12 | 34 | 41 | 84 |
| 1909 | 78 | 63 | 47 | 112 | 75 |
| 1910 | 33 | 133 | 70 | 27 | 112 |
| 1911 | 49 | 69 | 90 | 67 | 43 |
| 1912 | 23 | 76 | 46 | 72 | 12 |
| 1913 | 31 | 49 | 87 | 85 | 90 |
| 1914 | 5 | 72 | 124 | 13 | 60 |
| 1915 | 42 | 5 | 49 | 18 | 71 |
| 1916 | 50 | 25 | 89 | 18 | 3 |
| 1917 | 112 | 56 | 11 | 88 | 91 |
| 1918 | 19 | 30 | 43 | 33 | 12 |
| 1919 | 50 | 133 | 62 | 61 | 19 |
| 1920 | 124 | 3 | 5 | 8 | 45 |
| 1921 | 49 | 133 | 40 | 18 | 12 |
| 1922 | 35 | 31 | 54 | 124 | 45 |
| 1923 | 124 | 49 | 83 | 45 | 54 |
| 1924 | 112 | 56 | 70 | 5 | 83 |
| 1925 | 17 | 57 | 12 | 45 | 70 |
| 1926 | 21 | 69 | 89 | 103 | 124 |
| 1927 | 59 | 109 | 89 | 32 | 3 |
| 1928 | 39 | 57 | 75 | 29 | 12 |
| 1929 | 35 | 112 | 45 | 46 | 91 |
| 1930 | 50 | 55 | 112 | 69 | 53 |
| 1931 | 25 | 22 | 124 | 67 | 4 |
| 1932 | 16 | 58 | 15 | 22 | 17 |
| 1933 | 47 | 31 | 24 | 38 | 28 |
| 1934 | 87 | 27 | 90 | 35 | 8 |
| 1935 | 29 | 39 | 25 | 41 | 12 |
| 1936 | 45 | 76 | 21 | 49 | 90 |
| 1937 | 35 | 12 | 55 | 54 | 30 |
| 1938 | 89 | 37 | 31 | 65 | 12 |
| 1939 | 55 | 25 | 112 | 124 | 67 |
| 1940 | 43 | 88 | 62 | 124 | 16 |
| 1941 | 91 | 13 | 127 | 83 | 57 |
| 1942 | 18 | 27 | 47 | 81 | 12 |
| 1943 | 12 | 10 | 133 | 103 | 41 |
| 1944 | 33 | 115 | 2 | 124 | 118 |
| 1945 | 88 | 35 | 71 | 121 | 109 |
| 1946 | 23 | 1 | 12 | 8 | 60 |
| 1947 | 3 | 17 | 10 | 88 | 25 |
| 1948 | 66 | 120 | 3 | 88 | 57 |
| 1949 | 35 | 85 | 112 | 31 | 34 |
| 1950 | 22 | 12 | 52 | 85 | 20 |
| 1951 | 25 | 47 | 61 | 39 | 50 |
| 1952 | 35 | 12 | 71 | 34 | 37 |
| 1953 | 8 | 11 | 32 | 69 | 22 |
| 1954 | 121 | 88 | 12 | 22 | 63 |
| 1955 | 25 | 53 | 66 | 88 | 112 |
| 1956 | 112 | 28 | 38 | 45 | 55 |
| 1957 | 12 | 41 | 13 | 53 | 25 |
| 1958 | 19 | 24 | 17 | 12 | 70 |
| 1959 | 47 | 60 | 124 | 74 | 35 |
| 1960 | 45 | 22 | 12 | 127 | 9 |
| 1961 | 23 | 5 | 124 | 107 | 55 |
| 1962 | 17 | 19 | 80 | 3 | 12 |
| 1963 | 10 | 25 | 18 | 5 | 124 |
| 1964 | 67 | 12 | 4 | 1 | 120 |
| 1965 | 38 | 5 | 133 | 3 | 20 |
| 1966 | 37 | 83 | 45 | 39 | 46 |
| 1967 | 112 | 127 | 21 | 55 | 24 |
| 1968 | 130 | 55 | 17 | 66 | 88 |
| 1969 | 41 | 54 | 12 | 34 | 76 |
| 1970 | 78 | 107 | 10 | 44 | 58 |
| 1971 | 8 | 121 | 22 | 2 | 75 |
| 1972 | 49 | 115 | 124 | 60 | 85 |
| 1973 | 32 | 16 | 64 | 14 | 83 |
| 1974 | 67 | 12 | 73 | 24 | 87 |
| 1975 | 25 | 34 | 88 | 1 | 12 |
| 1976 | 12 | 38 | 2 | 45 | 71 |
| 1977 | 16 | 12 | 25 | 1 | 24 |
| 1978 | 45 | 85 | 112 | 121 | 74 |
| 1979 | 124 | 73 | 23 | 16 | 88 |
| 1980 | 34 | 33 | 60 | 12 | 16 |
| 1981 | 38 | 12 | 34 | 61 | 127 |
| 1982 | 12 | 58 | 67 | 32 | 56 |
| 1983 | 35 | 29 | 16 | 23 | 130 |
| 1984 | 5 | 53 | 74 | 1 | 12 |
| 1985 | 12 | 109 | 50 | 36 | 35 |
| 1986 | 16 | 35 | 24 | 12 | 39 |
| 1987 | 66 | 47 | 103 | 67 | 2 |
| 1988 | 33 | 80 | 52 | 10 | 12 |
| 1989 | 57 | 25 | 39 | 2 | 43 |
| 1990 | 16 | 133 | 124 | 12 | 69 |
| 1991 | 25 | 57 | 12 | 65 | 40 |
| 1992 | 53 | 1 | 107 | 2 | 12 |
| 1993 | 12 | 24 | 45 | 16 | 133 |
| 1994 | 25 | 45 | 2 | 53 | 28 |
| 1995 | 120 | 67 | 124 | 25 | 54 |
| 1996 | 55 | 69 | 12 | 27 | 37 |
| 1997 | 26 | 133 | 121 | 55 | 38 |
| 1998 | 59 | 60 | 12 | 52 | 56 |
| 1999 | 73 | 124 | 50 | 35 | 89 |
| 2000 | 18 | 38 | 52 | 45 | 46 |
| 2001 | 21 | 50 | 67 | 19 | 63 |
| 2002 | 12 | 72 | 7 | 49 | 57 |
| 2003 | 121 | 71 | 35 | 64 | 49 |
| 2004 | 124 | 40 | 91 | 118 | 49 |
| 2005 | 31 | 30 | 90 | 85 | 112 |
| 2006 | 29 | 39 | 16 | 35 | 12 |
| 2007 | 38 | 85 | 76 | 81 | 12 |
| 2008 | 62 | 6 | 38 | 3 | 40 |
| 2009 | 121 | 55 | 38 | 53 | 133 |
| 2010 | 38 | 15 | 56 | 47 | 12 |
| 2011 | 112 | 69 | 25 | 31 | 61 |
| 2012 | 16 | 35 | 19 | 9 | 37 |
| 2013 | 58 | 8 | 65 | 35 | 22 |
| 2014 | 124 | 133 | 25 | 6 | 9 |
| 2015 | 52 | 57 | 9 | 24 | 12 |
| 2016 | 61 | 56 | 39 | 70 | 25 |
| 2017 | 46 | 64 | 5 | 37 | 38 |
| 2018 | 127 | 35 | 55 | 30 | 25 |
| 2019 | 38 | 34 | 3 | 83 | 78 |
| 2020 | 3 | 112 | 45 | 88 | 40 |
| 2021 | 133 | 12 | 25 | 43 | 35 |
| 2022 | 35 | 62 | 56 | 12 | 115 |
| 2023 | 35 | 32 | 11 | 45 | 38 |
| 2024 | 41 | 12 | 130 | 39 | 23 |
| 2025 | 109 | 45 | 22 | 58 | 30 |
| 2026 | 78 | 20 | 112 | 27 | 58 |
| 2027 | 112 | 45 | 49 | 133 | 27 |
| 2028 | 60 | 90 | 9 | 65 | 112 |
| 2029 | 124 | 63 | 31 | 76 | 38 |
| 2030 | 112 | 89 | 85 | 17 | 42 |
| 2031 | 29 | 55 | 25 | 127 | 86 |
| 2032 | 85 | 83 | 49 | 35 | 109 |
| 2033 | 35 | 57 | 120 | 121 | 7 |
| 2034 | 72 | 12 | 10 | 22 | 57 |
| 2035 | 38 | 45 | 124 | 88 | 67 |
| 2036 | 56 | 52 | 37 | 12 | 77 |
| 2037 | 35 | 12 | 127 | 34 | 124 |
| 2038 | 91 | 88 | 84 | 12 | 32 |
| 2039 | 17 | 53 | 112 | 34 | 32 |
| 2040 | 54 | 87 | 55 | 49 | 66 |
| 2041 | 28 | 17 | 35 | 45 | 52 |
| 2042 | 12 | 14 | 29 | 19 | 87 |
| 2043 | 84 | 54 | 3 | 1 | 120 |
| 2044 | 30 | 12 | 47 | 57 | 4 |
| 2045 | 63 | 60 | 16 | 45 | 78 |
| 2046 | 83 | 1 | 81 | 9 | 112 |
| 2047 | 22 | 41 | 57 | 118 | 12 |
| 2048 | 12 | 83 | 36 | 28 | 37 |
| 2049 | 112 | 32 | 50 | 28 | 55 |
| 2050 | 5 | 61 | 107 | 52 | 124 |
| 2051 | 5 | 124 | 70 | 60 | 35 |
| 2052 | 65 | 66 | 118 | 1 | 4 |
| 2053 | 25 | 55 | 72 | 12 | 124 |
| 2054 | 124 | 25 | 90 | 67 | 81 |
| 2055 | 87 | 4 | 12 | 84 | 55 |
| 2056 | 52 | 58 | 35 | 16 | 71 |
| 2057 | 57 | 86 | 65 | 73 | 12 |
| 2058 | 127 | 12 | 88 | 31 | 63 |
| 2059 | 89 | 69 | 45 | 90 | 22 |
| 2060 | 38 | 133 | 35 | 57 | 12 |
| 2061 | 57 | 45 | 38 | 77 | 124 |
| 2062 | 12 | 67 | 82 | 57 | 1 |
| 2063 | 38 | 66 | 50 | 133 | 62 |
| 2064 | 83 | 44 | 121 | 50 | 88 |
| 2065 | 12 | 77 | 45 | 78 | 32 |
| 2066 | 42 | 25 | 118 | 12 | 7 |
| 2067 | 70 | 83 | 43 | 47 | 45 |
| 2068 | 4 | 89 | 18 | 38 | 11 |
| 2069 | 112 | 25 | 22 | 56 | 63 |
| 2070 | 2 | 25 | 130 | 66 | 5 |
| 2071 | 16 | 50 | 23 | 112 | 19 |
| 2072 | 44 | 83 | 20 | 21 | 56 |
| 2073 | 82 | 83 | 37 | 32 | 39 |
| 2074 | 16 | 57 | 22 | 85 | 35 |
| 2075 | 57 | 60 | 39 | 43 | 41 |
| 2076 | 35 | 84 | 82 | 85 | 83 |
| 2077 | 103 | 53 | 12 | 50 | 17 |
| 2078 | 33 | 57 | 83 | 47 | 2 |
| 2079 | 56 | 124 | 89 | 63 | 71 |
| 2080 | 54 | 78 | 32 | 124 | 73 |
| 2081 | 118 | 78 | 32 | 46 | 12 |
| 2082 | 35 | 57 | 20 | 23 | 45 |
| 2083 | 5 | 60 | 124 | 41 | 10 |
| 2084 | 81 | 12 | 107 | 2 | 64 |
| 2085 | 10 | 17 | 12 | 72 | 71 |
| 2086 | 1 | 66 | 57 | 14 | 87 |
| 2087 | 45 | 5 | 34 | 64 | 24 |
| 2088 | 89 | 130 | 7 | 25 | 12 |
| 2089 | 62 | 37 | 18 | 12 | 23 |
| 2090 | 71 | 12 | 55 | 27 | 19 |
| 2091 | 4 | 50 | 1 | 112 | 59 |
| 2092 | 45 | 21 | 9 | 112 | 75 |
| 2093 | 53 | 34 | 54 | 18 | 38 |
| 2094 | 121 | 84 | 25 | 112 | 82 |
| 2095 | 37 | 45 | 22 | 73 | 66 |
| 2096 | 124 | 7 | 39 | 61 | 71 |
| 2097 | 20 | 12 | 30 | 72 | 23 |
| 2098 | 22 | 83 | 103 | 35 | 112 |
| 2099 | 29 | 76 | 41 | 74 | 12 |
| 2100 | 39 | 60 | 124 | 69 | 32 |
| 2101 | 124 | 60 | 9 | 5 | 68 |
| 2102 | 45 | 12 | 65 | 9 | 35 |
| 2103 | 112 | 121 | 45 | 50 | 61 |
| 2104 | 36 | 45 | 67 | 57 | 38 |
| 2105 | 60 | 127 | 49 | 12 | 32 |
| 2106 | 19 | 12 | 22 | 27 | 57 |
| 2107 | 112 | 41 | 85 | 12 | 54 |
| 2108 | 112 | 42 | 4 | 56 | 74 |
| 2109 | 72 | 121 | 35 | 56 | 64 |
| 2110 | 67 | 103 | 45 | 80 | 21 |
| 2111 | 130 | 46 | 16 | 12 | 60 |
| 2112 | 23 | 45 | 28 | 8 | 12 |
| 2113 | 61 | 103 | 120 | 124 | 87 |
| 2114 | 12 | 130 | 55 | 21 | 88 |
| 2115 | 43 | 25 | 2 | 31 | 78 |
| 2116 | 39 | 57 | 60 | 88 | 43 |
| 2117 | 88 | 5 | 12 | 63 | 41 |
| 2118 | 112 | 124 | 91 | 30 | 18 |
| 2119 | 45 | 82 | 38 | 39 | 69 |
| 2120 | 76 | 3 | 84 | 25 | 35 |
| 2121 | 41 | 6 | 61 | 12 | 89 |
| 2122 | 6 | 115 | 49 | 90 | 130 |
| 2123 | 39 | 34 | 12 | 71 | 45 |
| 2124 | 118 | 36 | 21 | 115 | 124 |
| 2125 | 12 | 65 | 1 | 90 | 66 |
| 2126 | 89 | 90 | 3 | 112 | 23 |
| 2127 | 84 | 115 | 89 | 12 | 56 |
| 2128 | 45 | 39 | 12 | 25 | 115 |
| 2129 | 12 | 10 | 25 | 77 | 73 |
| 2130 | 124 | 22 | 25 | 109 | 19 |
| 2131 | 2 | 36 | 83 | 85 | 1 |
| 2132 | 25 | 59 | 124 | 35 | 127 |
| 2133 | 64 | 16 | 19 | 49 | 60 |
| 2134 | 73 | 67 | 12 | 55 | 22 |
| 2135 | 37 | 112 | 11 | 15 | 70 |
| 2136 | 42 | 25 | 24 | 4 | 76 |
| 2137 | 38 | 41 | 60 | 12 | 15 |
| 2138 | 25 | 7 | 21 | 64 | 4 |
| 2139 | 53 | 25 | 40 | 43 | 107 |
| 2140 | 12 | 16 | 91 | 84 | 30 |
| 2141 | 12 | 29 | 31 | 72 | 7 |
| 2142 | 10 | 4 | 3 | 38 | 28 |
| 2143 | 46 | 121 | 47 | 12 | 34 |
| 2144 | 49 | 43 | 12 | 41 | 78 |
| 2145 | 85 | 83 | 19 | 56 | 21 |
| 2146 | 12 | 55 | 25 | 41 | 8 |
| 2147 | 124 | 53 | 49 | 90 | 12 |
| 2148 | 10 | 16 | 58 | 12 | 43 |
| 2149 | 91 | 112 | 22 | 53 | 55 |
| 2150 | 89 | 32 | 124 | 3 | 81 |
| 2151 | 47 | 89 | 3 | 25 | 91 |
| 2152 | 5 | 2 | 124 | 71 | 87 |
| 2153 | 76 | 12 | 24 | 115 | 1 |
| 2154 | 15 | 112 | 40 | 22 | 30 |
| 2155 | 15 | 124 | 83 | 18 | 39 |
| 2156 | 1 | 5 | 34 | 12 | 107 |
| 2157 | 50 | 12 | 34 | 56 | 38 |
| 2158 | 85 | 12 | 55 | 42 | 66 |
| 2159 | 55 | 69 | 127 | 120 | 5 |
| 2160 | 49 | 35 | 124 | 47 | 18 |
| 2161 | 12 | 109 | 5 | 40 | 41 |
| 2162 | 12 | 3 | 54 | 133 | 41 |
| 2163 | 41 | 46 | 12 | 78 | 13 |
| 2164 | 49 | 58 | 86 | 41 | 12 |
| 2165 | 45 | 50 | 35 | 10 | 39 |
| 2166 | 76 | 35 | 12 | 121 | 59 |
| 2167 | 25 | 112 | 130 | 31 | 2 |
| 2168 | 39 | 56 | 64 | 12 | 66 |
| 2169 | 7 | 8 | 67 | 12 | 72 |
| 2170 | 15 | 39 | 83 | 124 | 66 |
| 2171 | 12 | 30 | 29 | 13 | 1 |
| 2172 | 50 | 78 | 83 | 70 | 35 |
| 2173 | 5 | 16 | 32 | 133 | 88 |
| 2174 | 63 | 22 | 31 | 58 | 16 |
| 2175 | 89 | 19 | 69 | 112 | 58 |
| 2176 | 130 | 83 | 77 | 32 | 29 |
| 2177 | 77 | 3 | 12 | 45 | 67 |
| 2178 | 60 | 3 | 62 | 86 | 64 |
| 2179 | 18 | 21 | 16 | 66 | 1 |
| 2180 | 90 | 35 | 127 | 38 | 3 |
| 2181 | 35 | 29 | 83 | 50 | 112 |
| 2182 | 22 | 112 | 67 | 50 | 88 |
| 2183 | 63 | 86 | 32 | 12 | 10 |
| 2184 | 27 | 55 | 58 | 112 | 29 |
| 2185 | 67 | 32 | 45 | 37 | 38 |
| 2186 | 112 | 38 | 42 | 2 | 57 |
| 2187 | 47 | 60 | 41 | 112 | 83 |
| 2188 | 81 | 58 | 49 | 57 | 36 |
| 2189 | 17 | 66 | 49 | 72 | 12 |
| 2190 | 15 | 41 | 12 | 25 | 2 |
| 2191 | 124 | 72 | 56 | 7 | 12 |
| 2192 | 75 | 49 | 35 | 16 | 8 |
| 2193 | 57 | 121 | 43 | 85 | 35 |
| 2194 | 21 | 56 | 112 | 107 | 50 |
| 2195 | 44 | 26 | 15 | 34 | 12 |
| 2196 | 12 | 61 | 67 | 10 | 71 |
| 2197 | 59 | 12 | 1 | 84 | 28 |
| 2198 | 60 | 11 | 65 | 112 | 130 |
| 2199 | 74 | 84 | 87 | 12 | 49 |
| 2200 | 103 | 85 | 5 | 124 | 47 |
| 2201 | 7 | 124 | 112 | 60 | 54 |
| 2202 | 130 | 77 | 66 | 88 | 24 |
| 2203 | 5 | 25 | 3 | 112 | 85 |
| 2204 | 62 | 86 | 67 | 112 | 27 |
| 2205 | 12 | 42 | 127 | 107 | 18 |
| 2206 | 64 | 12 | 72 | 13 | 7 |
| 2207 | 80 | 103 | 1 | 3 | 133 |
| 2208 | 37 | 86 | 30 | 38 | 31 |
| 2209 | 30 | 64 | 25 | 76 | 18 |
| 2210 | 56 | 12 | 38 | 22 | 64 |
| 2211 | 11 | 60 | 121 | 82 | 12 |
| 2212 | 64 | 47 | 57 | 83 | 13 |
| 2213 | 30 | 35 | 12 | 23 | 59 |
| 2214 | 64 | 16 | 109 | 61 | 20 |
| 2215 | 61 | 71 | 25 | 124 | 76 |
| 2216 | 14 | 1 | 36 | 83 | 57 |
| 2217 | 109 | 12 | 52 | 57 | 7 |
| 2218 | 21 | 12 | 57 | 24 | 26 |
| 2219 | 121 | 83 | 35 | 31 | 62 |
| 2220 | 26 | 77 | 120 | 12 | 41 |
| 2221 | 3 | 82 | 58 | 71 | 76 |
| 2222 | 12 | 118 | 38 | 46 | 34 |
| 2223 | 61 | 22 | 12 | 44 | 25 |
| 2224 | 35 | 16 | 44 | 59 | 58 |
| 2225 | 32 | 34 | 120 | 133 | 124 |
| 2226 | 112 | 40 | 53 | 45 | 69 |
| 2227 | 67 | 43 | 12 | 39 | 28 |
| 2228 | 53 | 56 | 35 | 55 | 16 |
| 2229 | 23 | 40 | 12 | 80 | 49 |
| 2230 | 49 | 84 | 69 | 90 | 112 |
| 2231 | 12 | 35 | 20 | 83 | 36 |
| 2232 | 55 | 12 | 50 | 62 | 6 |
| 2233 | 5 | 78 | 45 | 88 | 12 |
| 2234 | 87 | 49 | 112 | 50 | 30 |
| 2235 | 124 | 38 | 15 | 45 | 2 |
| 2236 | 89 | 84 | 5 | 29 | 64 |
| 2237 | 124 | 36 | 50 | 5 | 83 |
| 2238 | 13 | 46 | 64 | 112 | 49 |
| 2239 | 50 | 72 | 130 | 83 | 38 |
| 2240 | 17 | 130 | 12 | 127 | 20 |
| 2241 | 16 | 13 | 8 | 35 | 72 |
| 2242 | 73 | 91 | 35 | 12 | 41 |
| 2243 | 69 | 29 | 49 | 54 | 12 |
| 2244 | 47 | 12 | 21 | 64 | 56 |
| 2245 | 57 | 12 | 34 | 29 | 45 |
| 2246 | 45 | 112 | 115 | 27 | 29 |
| 2247 | 60 | 2 | 41 | 57 | 127 |
| 2248 | 50 | 78 | 22 | 43 | 124 |
| 2249 | 83 | 90 | 15 | 19 | 112 |
| 2250 | 112 | 34 | 5 | 83 | 8 |
| 2251 | 71 | 124 | 120 | 90 | 45 |
| 2252 | 130 | 124 | 5 | 36 | 64 |
| 2253 | 88 | 124 | 35 | 39 | 3 |
| 2254 | 124 | 43 | 83 | 76 | 31 |
| 2255 | 3 | 12 | 38 | 67 | 66 |
| 2256 | 25 | 56 | 124 | 60 | 23 |
| 2257 | 12 | 90 | 60 | 25 | 14 |
| 2258 | 26 | 1 | 12 | 37 | 28 |
| 2259 | 121 | 12 | 74 | 89 | 34 |
| 2260 | 124 | 37 | 91 | 6 | 49 |
| 2261 | 133 | 34 | 82 | 87 | 12 |
| 2262 | 36 | 9 | 83 | 133 | 1 |
| 2263 | 78 | 12 | 11 | 65 | 41 |
| 2264 | 43 | 50 | 88 | 12 | 90 |
| 2265 | 25 | 3 | 53 | 78 | 7 |
| 2266 | 64 | 112 | 87 | 28 | 53 |
| 2267 | 12 | 10 | 8 | 71 | 4 |
| 2268 | 81 | 73 | 57 | 75 | 12 |
| 2269 | 47 | 4 | 49 | 69 | 20 |
| 2270 | 39 | 124 | 130 | 35 | 45 |
| 2271 | 52 | 12 | 127 | 45 | 81 |
| 2272 | 50 | 89 | 63 | 64 | 86 |
| 2273 | 46 | 12 | 88 | 78 | 41 |
| 2274 | 55 | 27 | 58 | 6 | 44 |
| 2275 | 12 | 34 | 41 | 31 | 66 |
| 2276 | 67 | 84 | 12 | 115 | 52 |
| 2277 | 39 | 29 | 12 | 1 | 9 |
| 2278 | 57 | 21 | 86 | 32 | 2 |
| 2279 | 90 | 112 | 121 | 56 | 60 |
| 2280 | 36 | 10 | 12 | 35 | 1 |
| 2281 | 30 | 83 | 19 | 31 | 57 |
| 2282 | 53 | 8 | 75 | 35 | 66 |
| 2283 | 44 | 124 | 68 | 35 | 45 |
| 2284 | 12 | 39 | 57 | 54 | 38 |
| 2285 | 2 | 16 | 118 | 45 | 109 |
| 2286 | 62 | 21 | 49 | 130 | 50 |
| 2287 | 77 | 109 | 22 | 8 | 69 |
| 2288 | 35 | 28 | 112 | 56 | 121 |
| 2289 | 112 | 47 | 39 | 25 | 56 |
| 2290 | 53 | 124 | 60 | 16 | 49 |
| 2291 | 75 | 78 | 12 | 41 | 25 |
| 2292 | 5 | 112 | 56 | 124 | 25 |
| 2293 | 10 | 32 | 81 | 70 | 12 |
| 2294 | 124 | 49 | 38 | 60 | 25 |
| 2295 | 124 | 121 | 60 | 12 | 61 |
| 2296 | 31 | 12 | 43 | 83 | 47 |
| 2297 | 31 | 38 | 27 | 45 | 55 |
| 2298 | 45 | 57 | 23 | 112 | 103 |
| 2299 | 22 | 107 | 21 | 90 | 12 |
| 2300 | 34 | 41 | 35 | 55 | 130 |
| 2301 | 56 | 112 | 20 | 27 | 90 |
| 2302 | 29 | 16 | 109 | 12 | 7 |
| 2303 | 118 | 37 | 124 | 91 | 112 |
| 2304 | 10 | 49 | 12 | 46 | 82 |
| 2305 | 12 | 7 | 31 | 86 | 72 |
| 2306 | 32 | 39 | 4 | 87 | 90 |
| 2307 | 107 | 87 | 58 | 35 | 18 |
| 2308 | 19 | 72 | 89 | 61 | 78 |
| 2309 | 124 | 16 | 112 | 76 | 25 |
| 2310 | 112 | 83 | 84 | 7 | 67 |
| 2311 | 118 | 42 | 124 | 87 | 45 |
| 2312 | 57 | 45 | 78 | 49 | 12 |
| 2313 | 32 | 85 | 40 | 57 | 18 |
| 2314 | 83 | 5 | 124 | 57 | 1 |
| 2315 | 130 | 88 | 35 | 112 | 121 |
| 2316 | 112 | 57 | 33 | 87 | 42 |
| 2317 | 24 | 5 | 25 | 39 | 2 |
| 2318 | 4 | 16 | 124 | 91 | 118 |
| 2319 | 12 | 91 | 78 | 60 | 56 |
| 2320 | 25 | 17 | 87 | 8 | 124 |
| 2321 | 25 | 2 | 39 | 127 | 35 |
| 2322 | 16 | 21 | 56 | 33 | 35 |
| 2323 | 16 | 27 | 78 | 41 | 12 |
| 2324 | 57 | 12 | 87 | 39 | 9 |
| 2325 | 42 | 58 | 53 | 112 | 22 |
| 2326 | 38 | 5 | 14 | 73 | 15 |
| 2327 | 81 | 112 | 6 | 49 | 12 |
| 2328 | 124 | 1 | 91 | 22 | 17 |
| 2329 | 55 | 15 | 69 | 19 | 12 |
| 2330 | 26 | 41 | 5 | 88 | 124 |
| 2331 | 45 | 35 | 124 | 80 | 24 |
| 2332 | 12 | 41 | 64 | 23 | 88 |
| 2333 | 12 | 31 | 103 | 38 | 67 |
| 2334 | 36 | 12 | 2 | 44 | 28 |
| 2335 | 38 | 76 | 86 | 66 | 39 |
| 2336 | 12 | 57 | 83 | 44 | 22 |
| 2337 | 19 | 32 | 58 | 81 | 12 |
| 2338 | 72 | 43 | 87 | 49 | 118 |
| 2339 | 3 | 64 | 57 | 21 | 133 |
| 2340 | 71 | 75 | 133 | 5 | 38 |
| 2341 | 12 | 60 | 84 | 16 | 2 |
| 2342 | 112 | 8 | 90 | 5 | 62 |
| 2343 | 66 | 55 | 112 | 50 | 31 |
| 2344 | 88 | 56 | 39 | 43 | 19 |
| 2345 | 23 | 127 | 16 | 69 | 32 |
| 2346 | 25 | 121 | 109 | 2 | 124 |
| 2347 | 16 | 42 | 82 | 45 | 78 |
| 2348 | 12 | 21 | 64 | 56 | 69 |
| 2349 | 16 | 59 | 29 | 64 | 38 |
| 2350 | 38 | 6 | 34 | 45 | 124 |
| 2351 | 74 | 64 | 25 | 16 | 54 |
| 2352 | 112 | 127 | 66 | 7 | 83 |
| 2353 | 5 | 12 | 41 | 40 | 22 |
| 2354 | 109 | 77 | 121 | 35 | 52 |
| 2355 | 7 | 35 | 61 | 37 | 39 |
| 2356 | 19 | 55 | 62 | 103 | 12 |
| 2357 | 112 | 45 | 70 | 12 | 109 |
| 2358 | 84 | 38 | 47 | 39 | 67 |
| 2359 | 12 | 21 | 53 | 59 | 50 |
| 2360 | 133 | 87 | 86 | 107 | 49 |
| 2361 | 20 | 45 | 133 | 6 | 12 |
| 2362 | 29 | 1 | 112 | 121 | 35 |
| 2363 | 58 | 107 | 57 | 86 | 23 |
| 2364 | 124 | 35 | 121 | 12 | 88 |
| 2365 | 10 | 12 | 38 | 52 | 43 |
| 2366 | 55 | 3 | 12 | 7 | 34 |
| 2367 | 35 | 15 | 27 | 12 | 25 |
| 2368 | 12 | 1 | 49 | 90 | 5 |
| 2369 | 20 | 18 | 19 | 83 | 42 |
| 2370 | 133 | 69 | 49 | 87 | 121 |
| 2371 | 45 | 83 | 19 | 5 | 50 |
| 2372 | 31 | 17 | 64 | 9 | 112 |
| 2373 | 33 | 112 | 35 | 81 | 50 |
| 2374 | 47 | 50 | 112 | 86 | 21 |
| 2375 | 71 | 124 | 15 | 9 | 22 |
| 2376 | 38 | 9 | 55 | 121 | 45 |
| 2377 | 25 | 120 | 12 | 21 | 17 |
| 2378 | 107 | 55 | 64 | 12 | 73 |
| 2379 | 34 | 60 | 47 | 64 | 2 |
| 2380 | 57 | 47 | 55 | 103 | 118 |
| 2381 | 71 | 133 | 87 | 12 | 27 |
| 2382 | 55 | 12 | 27 | 34 | 81 |
| 2383 | 8 | 12 | 58 | 15 | 109 |
| 2384 | 84 | 124 | 83 | 34 | 45 |
| 2385 | 36 | 12 | 17 | 40 | 133 |
| 2386 | 87 | 84 | 12 | 37 | 44 |
| 2387 | 71 | 9 | 39 | 11 | 112 |
| 2388 | 2 | 46 | 62 | 17 | 66 |
| 2389 | 53 | 12 | 35 | 124 | 67 |
| 2390 | 20 | 88 | 49 | 27 | 112 |
| 2391 | 38 | 56 | 45 | 53 | 55 |
| 2392 | 90 | 112 | 61 | 27 | 26 |
| 2393 | 12 | 84 | 52 | 58 | 7 |
| 2394 | 38 | 35 | 52 | 62 | 54 |
| 2395 | 33 | 63 | 84 | 12 | 55 |
| 2396 | 38 | 75 | 71 | 10 | 25 |
| 2397 | 78 | 62 | 127 | 19 | 77 |
| 2398 | 38 | 10 | 35 | 42 | 18 |
| 2399 | 45 | 65 | 12 | 14 | 58 |
| 2400 | 52 | 56 | 39 | 25 | 2 |
| 2401 | 124 | 49 | 27 | 22 | 87 |
| 2402 | 133 | 35 | 58 | 55 | 121 |
| 2403 | 60 | 112 | 17 | 3 | 13 |
| 2404 | 45 | 85 | 112 | 21 | 1 |
| 2405 | 31 | 118 | 38 | 35 | 13 |
| 2406 | 83 | 32 | 115 | 18 | 82 |
| 2407 | 133 | 68 | 12 | 45 | 78 |
| 2408 | 124 | 16 | 35 | 28 | 103 |
| 2409 | 87 | 39 | 12 | 30 | 120 |
| 2410 | 41 | 39 | 64 | 12 | 54 |
| 2411 | 5 | 46 | 57 | 127 | 112 |
| 2412 | 12 | 120 | 55 | 47 | 45 |
| 2413 | 57 | 3 | 35 | 90 | 47 |
| 2414 | 40 | 57 | 12 | 29 | 16 |
| 2415 | 121 | 112 | 60 | 55 | 71 |
| 2416 | 69 | 124 | 80 | 57 | 49 |
| 2417 | 21 | 103 | 49 | 50 | 39 |
| 2418 | 38 | 133 | 12 | 13 | 41 |
| 2419 | 78 | 28 | 12 | 5 | 83 |
| 2420 | 12 | 10 | 49 | 18 | 87 |
| 2421 | 46 | 81 | 12 | 9 | 40 |
| 2422 | 18 | 32 | 24 | 35 | 26 |
| 2423 | 27 | 12 | 88 | 39 | 130 |
| 2424 | 88 | 6 | 124 | 44 | 107 |
| 2425 | 30 | 56 | 49 | 124 | 12 |
| 2426 | 12 | 6 | 20 | 41 | 69 |
| 2427 | 47 | 50 | 41 | 67 | 12 |
| 2428 | 112 | 11 | 121 | 88 | 90 |
| 2429 | 3 | 39 | 24 | 68 | 71 |
| 2430 | 3 | 36 | 12 | 61 | 2 |
| 2431 | 11 | 41 | 47 | 12 | 29 |
| 2432 | 72 | 88 | 12 | 44 | 103 |
| 2433 | 127 | 30 | 61 | 55 | 130 |
| 2434 | 19 | 55 | 50 | 12 | 62 |
| 2435 | 8 | 70 | 14 | 64 | 112 |
| 2436 | 49 | 85 | 61 | 84 | 124 |
| 2437 | 77 | 12 | 33 | 31 | 41 |
| 2438 | 29 | 23 | 53 | 8 | 32 |
| 2439 | 33 | 37 | 25 | 10 | 12 |
| 2440 | 67 | 25 | 124 | 64 | 69 |
| 2441 | 130 | 29 | 12 | 39 | 55 |
| 2442 | 112 | 58 | 22 | 35 | 121 |
| 2443 | 65 | 56 | 45 | 58 | 23 |
| 2444 | 112 | 127 | 130 | 55 | 26 |
| 2445 | 15 | 2 | 35 | 57 | 69 |
| 2446 | 55 | 15 | 112 | 37 | 32 |
| 2447 | 87 | 73 | 45 | 85 | 22 |
| 2448 | 40 | 83 | 53 | 112 | 50 |
| 2449 | 124 | 45 | 78 | 24 | 34 |
| 2450 | 35 | 87 | 55 | 38 | 11 |
| 2451 | 58 | 65 | 77 | 66 | 16 |
| 2452 | 91 | 55 | 12 | 29 | 130 |
| 2453 | 82 | 17 | 12 | 121 | 21 |
| 2454 | 67 | 74 | 3 | 17 | 25 |
| 2455 | 36 | 55 | 2 | 39 | 58 |
| 2456 | 1 | 103 | 12 | 59 | 81 |
| 2457 | 12 | 72 | 5 | 55 | 87 |
| 2458 | 121 | 78 | 65 | 90 | 67 |
| 2459 | 8 | 17 | 29 | 90 | 112 |
| 2460 | 6 | 28 | 112 | 35 | 45 |
| 2461 | 60 | 52 | 12 | 121 | 35 |
| 2462 | 35 | 17 | 7 | 82 | 50 |
| 2463 | 50 | 112 | 68 | 81 | 83 |
| 2464 | 6 | 45 | 25 | 124 | 36 |
| 2465 | 75 | 38 | 12 | 2 | 46 |
| 2466 | 25 | 57 | 3 | 55 | 66 |
| 2467 | 12 | 57 | 53 | 2 | 124 |
| 2468 | 55 | 127 | 19 | 27 | 25 |
| 2469 | 12 | 39 | 78 | 47 | 25 |
| 2470 | 71 | 20 | 50 | 49 | 83 |
| 2471 | 107 | 61 | 130 | 58 | 23 |
| 2472 | 118 | 83 | 33 | 35 | 121 |
| 2473 | 115 | 49 | 16 | 50 | 29 |
| 2474 | 1 | 22 | 12 | 9 | 43 |
| 2475 | 17 | 69 | 45 | 78 | 34 |
| 2476 | 19 | 84 | 12 | 69 | 82 |
| 2477 | 50 | 86 | 35 | 56 | 107 |
| 2478 | 38 | 53 | 10 | 25 | 107 |
| 2479 | 55 | 54 | 127 | 121 | 25 |
| 2480 | 66 | 76 | 41 | 12 | 39 |
| 2481 | 133 | 38 | 14 | 12 | 103 |
| 2482 | 29 | 61 | 12 | 56 | 21 |
| 2483 | 74 | 43 | 82 | 84 | 12 |
| 2484 | 41 | 55 | 12 | 59 | 69 |
| 2485 | 21 | 12 | 19 | 50 | 76 |
| 2486 | 18 | 22 | 33 | 90 | 12 |
| 2487 | 68 | 64 | 44 | 88 | 37 |
| 2488 | 21 | 22 | 49 | 45 | 50 |
| 2489 | 35 | 47 | 49 | 44 | 124 |
| 2490 | 22 | 33 | 11 | 89 | 12 |
| 2491 | 58 | 15 | 83 | 45 | 12 |
| 2492 | 85 | 78 | 47 | 112 | 83 |
| 2493 | 12 | 133 | 65 | 40 | 49 |
| 2494 | 52 | 12 | 10 | 65 | 25 |
| 2495 | 32 | 10 | 38 | 58 | 6 |
| 2496 | 72 | 53 | 112 | 7 | 5 |
| 2497 | 130 | 67 | 115 | 12 | 54 |
| 2498 | 72 | 118 | 45 | 67 | 112 |
| 2499 | 43 | 109 | 62 | 39 | 4 |
| 2500 | 124 | 5 | 107 | 80 | 133 |
| 2501 | 75 | 35 | 69 | 85 | 16 |
| 2502 | 5 | 63 | 121 | 35 | 124 |
| 2503 | 70 | 124 | 25 | 54 | 12 |
| 2504 | 55 | 72 | 112 | 56 | 60 |
| 2505 | 58 | 25 | 3 | 55 | 41 |
| 2506 | 76 | 21 | 112 | 50 | 28 |
| 2507 | 37 | 60 | 55 | 127 | 47 |
| 2508 | 112 | 64 | 39 | 44 | 88 |
| 2509 | 41 | 12 | 124 | 25 | 56 |
| 2510 | 12 | 127 | 5 | 8 | 87 |
| 2511 | 13 | 6 | 21 | 12 | 55 |
| 2512 | 87 | 35 | 66 | 124 | 45 |
| 2513 | 5 | 90 | 56 | 124 | 80 |
| 2514 | 84 | 50 | 25 | 22 | 5 |
| 2515 | 62 | 63 | 124 | 37 | 52 |
| 2516 | 25 | 112 | 6 | 90 | 17 |
| 2517 | 35 | 4 | 63 | 16 | 71 |
| 2518 | 12 | 42 | 26 | 25 | 9 |
| 2519 | 121 | 35 | 82 | 5 | 28 |
| 2520 | 41 | 38 | 1 | 45 | 42 |
| 2521 | 83 | 57 | 118 | 8 | 47 |
| 2522 | 90 | 35 | 72 | 49 | 50 |
| 2523 | 55 | 1 | 36 | 54 | 25 |
| 2524 | 10 | 103 | 5 | 38 | 45 |
| 2525 | 49 | 87 | 67 | 69 | 39 |
| 2526 | 66 | 45 | 15 | 90 | 1 |
| 2527 | 70 | 3 | 82 | 69 | 57 |
| 2528 | 103 | 45 | 57 | 12 | 77 |
| 2529 | 69 | 72 | 46 | 62 | 32 |
| 2530 | 18 | 38 | 31 | 90 | 1 |
| 2531 | 18 | 81 | 85 | 60 | 69 |
| 2532 | 83 | 2 | 53 | 66 | 8 |
| 2533 | 18 | 44 | 85 | 52 | 5 |
| 2534 | 19 | 57 | 35 | 53 | 44 |
| 2535 | 27 | 82 | 90 | 50 | 35 |
| 2536 | 12 | 65 | 39 | 41 | 17 |
| 2537 | 2 | 49 | 69 | 121 | 12 |
| 2538 | 42 | 12 | 55 | 25 | 9 |
| 2539 | 60 | 124 | 25 | 35 | 58 |
| 2540 | 35 | 5 | 32 | 63 | 39 |
| 2541 | 109 | 72 | 55 | 12 | 81 |
| 2542 | 35 | 112 | 86 | 121 | 71 |
| 2543 | 2 | 35 | 53 | 89 | 12 |
| 2544 | 83 | 25 | 57 | 12 | 58 |
| 2545 | 121 | 89 | 91 | 58 | 84 |
| 2546 | 35 | 72 | 118 | 80 | 12 |
| 2547 | 112 | 31 | 56 | 118 | 3 |
| 2548 | 64 | 27 | 66 | 133 | 58 |
| 2549 | 35 | 27 | 45 | 130 | 91 |
| 2550 | 12 | 107 | 45 | 63 | 67 |
| 2551 | 57 | 44 | 2 | 12 | 33 |
| 2552 | 58 | 109 | 14 | 39 | 112 |
| 2553 | 60 | 121 | 12 | 7 | 130 |
| 2554 | 63 | 35 | 50 | 23 | 16 |
| 2555 | 15 | 127 | 82 | 112 | 22 |
| 2556 | 12 | 25 | 6 | 76 | 19 |
| 2557 | 1 | 12 | 73 | 61 | 118 |
| 2558 | 23 | 121 | 35 | 57 | 69 |
| 2559 | 107 | 2 | 109 | 33 | 3 |
| 2560 | 73 | 12 | 45 | 64 | 28 |
| 2561 | 75 | 133 | 12 | 56 | 1 |
| 2562 | 34 | 88 | 12 | 124 | 91 |
| 2563 | 27 | 21 | 8 | 112 | 9 |
| 2564 | 61 | 69 | 84 | 1 | 12 |
| 2565 | 46 | 1 | 12 | 68 | 43 |
| 2566 | 55 | 121 | 57 | 7 | 58 |
| 2567 | 124 | 44 | 45 | 32 | 34 |
| 2568 | 5 | 35 | 52 | 130 | 89 |
| 2569 | 63 | 23 | 62 | 58 | 16 |
| 2570 | 112 | 15 | 37 | 91 | 11 |
| 2571 | 107 | 120 | 103 | 7 | 11 |
| 2572 | 112 | 47 | 15 | 78 | 21 |
| 2573 | 38 | 23 | 49 | 64 | 19 |
| 2574 | 25 | 124 | 50 | 10 | 44 |
| 2575 | 112 | 16 | 50 | 66 | 4 |
| 2576 | 49 | 124 | 37 | 5 | 89 |
| 2577 | 55 | 35 | 38 | 3 | 17 |
| 2578 | 68 | 29 | 20 | 76 | 12 |
| 2579 | 36 | 59 | 12 | 75 | 65 |
| 2580 | 88 | 12 | 35 | 67 | 73 |
| 2581 | 8 | 49 | 112 | 69 | 71 |
| 2582 | 35 | 63 | 19 | 45 | 57 |
| 2583 | 39 | 33 | 81 | 43 | 103 |
| 2584 | 16 | 12 | 54 | 60 | 53 |
| 2585 | 32 | 29 | 56 | 12 | 3 |
| 2586 | 2 | 21 | 45 | 57 | 65 |
| 2587 | 103 | 112 | 57 | 16 | 4 |
| 2588 | 88 | 37 | 18 | 38 | 64 |
| 2589 | 18 | 55 | 58 | 10 | 12 |
| 2590 | 112 | 90 | 115 | 19 | 31 |
| 2591 | 45 | 24 | 112 | 31 | 81 |
| 2592 | 18 | 124 | 5 | 45 | 77 |
| 2593 | 63 | 89 | 84 | 19 | 54 |
| 2594 | 39 | 71 | 45 | 30 | 112 |
| 2595 | 55 | 107 | 91 | 12 | 21 |
| 2596 | 87 | 55 | 91 | 59 | 12 |
| 2597 | 45 | 112 | 9 | 59 | 17 |
| 2598 | 27 | 18 | 76 | 78 | 16 |
| 2599 | 14 | 112 | 45 | 67 | 121 |
| 2600 | 124 | 16 | 8 | 21 | 12 |
| 2601 | 33 | 35 | 45 | 109 | 91 |
| 2602 | 2 | 133 | 14 | 45 | 12 |
| 2603 | 49 | 12 | 109 | 91 | 69 |
| 2604 | 2 | 50 | 16 | 112 | 53 |
| 2605 | 25 | 8 | 87 | 12 | 61 |
| 2606 | 12 | 52 | 37 | 39 | 127 |
| 2607 | 45 | 35 | 22 | 31 | 9 |
| 2608 | 83 | 3 | 58 | 121 | 57 |
| 2609 | 112 | 22 | 42 | 37 | 11 |
| 2610 | 42 | 17 | 50 | 68 | 112 |
| 2611 | 57 | 12 | 42 | 38 | 56 |
| 2612 | 15 | 70 | 21 | 45 | 1 |
| 2613 | 55 | 16 | 88 | 58 | 66 |
| 2614 | 38 | 28 | 6 | 86 | 90 |
| 2615 | 107 | 3 | 124 | 24 | 25 |
| 2616 | 37 | 109 | 73 | 12 | 22 |
| 2617 | 81 | 112 | 50 | 72 | 56 |
| 2618 | 34 | 45 | 90 | 124 | 55 |
| 2619 | 66 | 76 | 55 | 124 | 7 |
| 2620 | 66 | 1 | 58 | 86 | 22 |
| 2621 | 7 | 45 | 50 | 25 | 6 |
| 2622 | 127 | 124 | 52 | 32 | 15 |
| 2623 | 35 | 27 | 120 | 124 | 5 |
| 2624 | 80 | 12 | 36 | 7 | 39 |
| 2625 | 4 | 55 | 83 | 50 | 33 |
| 2626 | 25 | 47 | 70 | 61 | 39 |
| 2627 | 53 | 49 | 107 | 2 | 7 |
| 2628 | 45 | 78 | 22 | 58 | 31 |
| 2629 | 35 | 41 | 8 | 16 | 124 |
| 2630 | 112 | 85 | 2 | 20 | 42 |
| 2631 | 3 | 49 | 124 | 12 | 37 |
| 2632 | 55 | 24 | 112 | 67 | 25 |
| 2633 | 50 | 90 | 49 | 21 | 55 |
| 2634 | 46 | 72 | 23 | 127 | 12 |
| 2635 | 12 | 6 | 24 | 103 | 1 |
| 2636 | 124 | 58 | 22 | 5 | 7 |
| 2637 | 58 | 18 | 35 | 107 | 118 |
| 2638 | 16 | 103 | 12 | 133 | 35 |
| 2639 | 64 | 60 | 44 | 18 | 38 |
| 2640 | 12 | 25 | 84 | 28 | 67 |
| 2641 | 25 | 3 | 71 | 46 | 55 |
| 2642 | 87 | 1 | 3 | 38 | 62 |
| 2643 | 24 | 12 | 34 | 32 | 64 |
| 2644 | 38 | 82 | 1 | 61 | 3 |
| 2645 | 32 | 45 | 58 | 26 | 109 |
| 2646 | 50 | 112 | 87 | 16 | 22 |
| 2647 | 43 | 12 | 37 | 54 | 35 |
| 2648 | 23 | 38 | 16 | 54 | 1 |
| 2649 | 130 | 35 | 41 | 25 | 56 |
| 2650 | 85 | 45 | 124 | 6 | 107 |
| 2651 | 49 | 17 | 81 | 50 | 12 |
| 2652 | 2 | 23 | 25 | 12 | 74 |
| 2653 | 32 | 39 | 58 | 10 | 12 |
| 2654 | 118 | 133 | 7 | 124 | 25 |
| 2655 | 2 | 12 | 8 | 120 | 3 |
| 2656 | 112 | 21 | 74 | 56 | 46 |
| 2657 | 56 | 61 | 20 | 12 | 1 |
| 2658 | 19 | 115 | 35 | 44 | 56 |
| 2659 | 112 | 60 | 38 | 90 | 49 |
| 2660 | 57 | 12 | 70 | 50 | 1 |
| 2661 | 12 | 124 | 78 | 44 | 36 |
| 2662 | 1 | 103 | 60 | 71 | 124 |
| 2663 | 18 | 112 | 28 | 60 | 45 |
| 2664 | 72 | 64 | 16 | 23 | 12 |
| 2665 | 35 | 12 | 45 | 80 | 28 |
| 2666 | 133 | 12 | 49 | 130 | 55 |
| 2667 | 12 | 23 | 21 | 33 | 10 |
| 2668 | 82 | 64 | 45 | 21 | 8 |
| 2669 | 25 | 64 | 88 | 84 | 45 |
| 2670 | 35 | 16 | 89 | 31 | 86 |
| 2671 | 32 | 19 | 83 | 57 | 61 |
| 2672 | 4 | 45 | 86 | 124 | 29 |
| 2673 | 49 | 124 | 64 | 127 | 35 |
| 2674 | 60 | 85 | 12 | 42 | 66 |
| 2675 | 12 | 89 | 54 | 13 | 2 |
| 2676 | 72 | 21 | 82 | 56 | 112 |
| 2677 | 86 | 80 | 124 | 22 | 15 |
| 2678 | 39 | 120 | 60 | 3 | 68 |
| 2679 | 5 | 61 | 121 | 2 | 35 |
| 2680 | 55 | 90 | 35 | 38 | 121 |
| 2681 | 38 | 86 | 124 | 45 | 115 |
| 2682 | 17 | 58 | 91 | 50 | 112 |
| 2683 | 54 | 124 | 32 | 28 | 21 |
| 2684 | 35 | 40 | 12 | 72 | 86 |
| 2685 | 74 | 88 | 15 | 12 | 127 |
| 2686 | 58 | 90 | 3 | 78 | 65 |
| 2687 | 76 | 8 | 65 | 12 | 63 |
| 2688 | 124 | 77 | 42 | 38 | 45 |
| 2689 | 29 | 67 | 12 | 50 | 34 |
| 2690 | 88 | 66 | 56 | 35 | 90 |
| 2691 | 2 | 5 | 121 | 73 | 12 |
| 2692 | 34 | 57 | 115 | 112 | 50 |
| 2693 | 112 | 75 | 1 | 130 | 36 |
| 2694 | 60 | 45 | 44 | 88 | 39 |
| 2695 | 46 | 12 | 112 | 67 | 19 |
| 2696 | 12 | 65 | 34 | 86 | 89 |
| 2697 | 28 | 89 | 61 | 12 | 21 |
| 2698 | 76 | 3 | 10 | 38 | 1 |
| 2699 | 72 | 112 | 11 | 60 | 78 |
| 2700 | 112 | 64 | 17 | 61 | 10 |
| 2701 | 13 | 20 | 84 | 112 | 25 |
| 2702 | 27 | 80 | 87 | 64 | 112 |
| 2703 | 121 | 12 | 38 | 43 | 36 |
| 2704 | 60 | 62 | 78 | 124 | 49 |
| 2705 | 34 | 45 | 12 | 61 | 103 |
| 2706 | 12 | 40 | 55 | 5 | 38 |
| 2707 | 49 | 5 | 60 | 124 | 38 |
| 2708 | 71 | 89 | 12 | 55 | 73 |
| 2709 | 3 | 54 | 55 | 25 | 86 |
| 2710 | 75 | 61 | 64 | 91 | 17 |
| 2711 | 57 | 25 | 35 | 115 | 15 |
| 2712 | 130 | 10 | 3 | 46 | 83 |
| 2713 | 124 | 34 | 49 | 8 | 3 |
| 2714 | 12 | 53 | 8 | 19 | 112 |
| 2715 | 124 | 5 | 21 | 34 | 15 |
| 2716 | 78 | 121 | 83 | 69 | 19 |
| 2717 | 39 | 61 | 107 | 43 | 87 |
| 2718 | 90 | 44 | 109 | 6 | 55 |
| 2719 | 67 | 40 | 86 | 5 | 124 |
| 2720 | 12 | 43 | 81 | 34 | 71 |
| 2721 | 121 | 2 | 107 | 55 | 52 |
| 2722 | 6 | 12 | 26 | 41 | 82 |
| 2723 | 124 | 60 | 5 | 11 | 130 |
| 2724 | 12 | 26 | 15 | 109 | 35 |
| 2725 | 11 | 69 | 39 | 61 | 124 |
| 2726 | 47 | 61 | 64 | 1 | 12 |
| 2727 | 27 | 12 | 39 | 2 | 76 |
| 2728 | 115 | 121 | 69 | 35 | 55 |
| 2729 | 58 | 35 | 8 | 16 | 54 |
| 2730 | 87 | 83 | 120 | 31 | 66 |
| 2731 | 57 | 12 | 35 | 72 | 14 |
| 2732 | 2 | 59 | 12 | 1 | 6 |
| 2733 | 2 | 82 | 12 | 88 | 1 |
| 2734 | 85 | 12 | 71 | 57 | 38 |
| 2735 | 89 | 15 | 77 | 64 | 49 |
| 2736 | 61 | 12 | 11 | 34 | 64 |
| 2737 | 58 | 18 | 3 | 60 | 68 |
| 2738 | 12 | 39 | 38 | 74 | 32 |
| 2739 | 45 | 112 | 90 | 47 | 2 |
| 2740 | 60 | 4 | 58 | 18 | 25 |
| 2741 | 20 | 55 | 12 | 133 | 6 |
| 2742 | 35 | 32 | 57 | 127 | 87 |
| 2743 | 112 | 15 | 86 | 66 | 87 |
| 2744 | 12 | 35 | 50 | 21 | 75 |
| 2745 | 25 | 130 | 72 | 24 | 112 |
| 2746 | 112 | 47 | 78 | 60 | 27 |
| 2747 | 35 | 26 | 17 | 12 | 7 |
| 2748 | 38 | 18 | 32 | 39 | 13 |
| 2749 | 12 | 31 | 62 | 55 | 2 |
| 2750 | 133 | 66 | 27 | 115 | 124 |
| 2751 | 88 | 21 | 42 | 90 | 112 |
| 2752 | 7 | 85 | 3 | 34 | 12 |
| 2753 | 25 | 67 | 43 | 124 | 72 |
| 2754 | 22 | 41 | 66 | 12 | 109 |
| 2755 | 64 | 72 | 22 | 17 | 12 |
| 2756 | 55 | 54 | 12 | 118 | 38 |
| 2757 | 35 | 45 | 70 | 4 | 121 |
| 2758 | 73 | 25 | 12 | 31 | 54 |
| 2759 | 14 | 124 | 66 | 38 | 84 |
| 2760 | 130 | 22 | 23 | 57 | 12 |
| 2761 | 83 | 130 | 66 | 78 | 44 |
| 2762 | 46 | 12 | 6 | 16 | 2 |
| 2763 | 77 | 47 | 45 | 89 | 12 |
| 2764 | 12 | 54 | 16 | 38 | 2 |
| 2765 | 59 | 39 | 42 | 120 | 83 |
| 2766 | 41 | 124 | 25 | 32 | 35 |
| 2767 | 24 | 124 | 91 | 23 | 22 |
| 2768 | 19 | 36 | 46 | 26 | 12 |
| 2769 | 76 | 118 | 12 | 25 | 91 |
| 2770 | 2 | 47 | 34 | 12 | 53 |
| 2771 | 12 | 34 | 39 | 124 | 60 |
| 2772 | 21 | 90 | 32 | 23 | 39 |
| 2773 | 38 | 3 | 41 | 78 | 39 |
| 2774 | 58 | 6 | 12 | 71 | 65 |
| 2775 | 89 | 72 | 3 | 87 | 25 |
| 2776 | 3 | 121 | 78 | 83 | 10 |
| 2777 | 56 | 12 | 64 | 2 | 57 |
| 2778 | 13 | 22 | 55 | 30 | 12 |
| 2779 | 10 | 2 | 124 | 5 | 6 |
| 2780 | 32 | 31 | 12 | 73 | 78 |
| 2781 | 86 | 61 | 124 | 83 | 15 |
| 2782 | 109 | 124 | 62 | 35 | 32 |
| 2783 | 85 | 23 | 22 | 12 | 30 |
| 2784 | 12 | 91 | 55 | 9 | 17 |
| 2785 | 45 | 130 | 64 | 77 | 112 |
| 2786 | 45 | 81 | 39 | 112 | 11 |
| 2787 | 39 | 10 | 32 | 37 | 12 |
| 2788 | 112 | 88 | 30 | 45 | 83 |
| 2789 | 83 | 112 | 64 | 39 | 73 |
| 2790 | 7 | 19 | 65 | 89 | 2 |
| 2791 | 28 | 87 | 2 | 9 | 3 |
| 2792 | 47 | 39 | 61 | 109 | 25 |
| 2793 | 35 | 22 | 124 | 71 | 45 |
| 2794 | 67 | 58 | 25 | 83 | 39 |
| 2795 | 29 | 89 | 78 | 3 | 31 |
| 2796 | 35 | 12 | 52 | 62 | 120 |
| 2797 | 39 | 45 | 103 | 49 | 87 |
| 2798 | 39 | 16 | 10 | 45 | 29 |
| 2799 | 83 | 121 | 2 | 36 | 118 |
| 2800 | 120 | 32 | 21 | 60 | 124 |
| 2801 | 37 | 107 | 55 | 12 | 71 |
| 2802 | 12 | 56 | 60 | 78 | 65 |
| 2803 | 13 | 7 | 58 | 12 | 35 |
| 2804 | 31 | 11 | 32 | 59 | 35 |
| 2805 | 33 | 35 | 107 | 86 | 11 |
| 2806 | 1 | 69 | 12 | 22 | 16 |
| 2807 | 1 | 22 | 33 | 4 | 12 |
| 2808 | 89 | 85 | 1 | 12 | 29 |
| 2809 | 12 | 112 | 87 | 32 | 72 |
| 2810 | 124 | 120 | 5 | 72 | 41 |
| 2811 | 41 | 81 | 25 | 12 | 4 |
| 2812 | 12 | 64 | 37 | 82 | 33 |
| 2813 | 3 | 7 | 25 | 63 | 16 |
| 2814 | 41 | 49 | 38 | 3 | 45 |
| 2815 | 19 | 7 | 46 | 12 | 61 |
| 2816 | 35 | 69 | 12 | 25 | 127 |
| 2817 | 61 | 112 | 71 | 127 | 55 |
| 2818 | 58 | 47 | 16 | 71 | 22 |
| 2819 | 66 | 2 | 85 | 52 | 12 |
| 2820 | 1 | 50 | 109 | 5 | 12 |
| 2821 | 12 | 41 | 7 | 67 | 103 |
| 2822 | 25 | 3 | 34 | 61 | 28 |
| 2823 | 50 | 24 | 87 | 124 | 25 |
| 2824 | 25 | 86 | 42 | 87 | 49 |
| 2825 | 91 | 52 | 112 | 38 | 18 |
| 2826 | 7 | 3 | 78 | 29 | 68 |
| 2827 | 19 | 50 | 112 | 21 | 10 |
| 2828 | 59 | 60 | 49 | 124 | 130 |
| 2829 | 58 | 27 | 16 | 3 | 22 |
| 2830 | 35 | 76 | 57 | 38 | 16 |
| 2831 | 77 | 12 | 90 | 7 | 1 |
| 2832 | 61 | 124 | 89 | 3 | 43 |
| 2833 | 84 | 16 | 58 | 54 | 64 |
| 2834 | 42 | 112 | 10 | 50 | 55 |
| 2835 | 130 | 55 | 39 | 16 | 58 |
| 2836 | 1 | 8 | 12 | 61 | 63 |
| 2837 | 45 | 41 | 44 | 12 | 1 |
| 2838 | 3 | 55 | 69 | 35 | 15 |
| 2839 | 50 | 12 | 35 | 33 | 16 |
| 2840 | 90 | 112 | 38 | 3 | 21 |
| 2841 | 88 | 49 | 103 | 130 | 87 |
| 2842 | 38 | 80 | 12 | 23 | 45 |
| 2843 | 41 | 28 | 34 | 62 | 12 |
| 2844 | 25 | 107 | 91 | 55 | 12 |
| 2845 | 7 | 35 | 11 | 16 | 44 |
| 2846 | 124 | 85 | 88 | 7 | 25 |
| 2847 | 43 | 38 | 3 | 31 | 32 |
| 2848 | 12 | 20 | 16 | 29 | 83 |
| 2849 | 56 | 35 | 90 | 109 | 16 |
| 2850 | 85 | 32 | 11 | 24 | 31 |
| 2851 | 56 | 59 | 112 | 36 | 31 |
| 2852 | 12 | 127 | 2 | 17 | 130 |
| 2853 | 44 | 41 | 17 | 47 | 12 |
| 2854 | 86 | 43 | 57 | 124 | 83 |
| 2855 | 72 | 2 | 45 | 25 | 5 |
| 2856 | 10 | 12 | 4 | 5 | 53 |
| 2857 | 12 | 121 | 23 | 37 | 19 |
| 2858 | 55 | 36 | 35 | 58 | 34 |
| 2859 | 1 | 12 | 78 | 71 | 30 |
| 2860 | 43 | 39 | 25 | 115 | 38 |
| 2861 | 86 | 35 | 45 | 57 | 26 |
| 2862 | 7 | 12 | 1 | 64 | 70 |
| 2863 | 25 | 2 | 12 | 64 | 35 |
| 2864 | 1 | 78 | 54 | 43 | 19 |
| 2865 | 57 | 35 | 69 | 78 | 45 |
| 2866 | 120 | 60 | 41 | 71 | 112 |
| 2867 | 53 | 55 | 56 | 112 | 44 |
| 2868 | 56 | 112 | 65 | 58 | 91 |
| 2869 | 29 | 38 | 22 | 12 | 73 |
| 2870 | 11 | 12 | 36 | 22 | 83 |
| 2871 | 50 | 112 | 53 | 55 | 85 |
| 2872 | 49 | 54 | 19 | 25 | 90 |
| 2873 | 14 | 124 | 22 | 69 | 15 |
| 2874 | 71 | 12 | 89 | 2 | 50 |
| 2875 | 6 | 61 | 81 | 124 | 28 |
| 2876 | 22 | 45 | 75 | 34 | 1 |
| 2877 | 76 | 22 | 16 | 12 | 37 |
| 2878 | 22 | 56 | 4 | 12 | 53 |
| 2879 | 35 | 90 | 31 | 12 | 17 |
| 2880 | 38 | 62 | 133 | 5 | 124 |
| 2881 | 12 | 25 | 57 | 107 | 55 |
| 2882 | 66 | 2 | 120 | 57 | 73 |
| 2883 | 45 | 23 | 112 | 73 | 12 |
| 2884 | 5 | 91 | 12 | 39 | 1 |
| 2885 | 31 | 18 | 40 | 86 | 107 |
| 2886 | 55 | 59 | 130 | 6 | 83 |
| 2887 | 27 | 77 | 50 | 87 | 35 |
| 2888 | 28 | 35 | 16 | 34 | 41 |
| 2889 | 55 | 12 | 20 | 39 | 88 |
| 2890 | 12 | 47 | 38 | 57 | 45 |
| 2891 | 1 | 12 | 103 | 21 | 90 |
| 2892 | 3 | 41 | 12 | 90 | 65 |
| 2893 | 37 | 35 | 56 | 83 | 50 |
| 2894 | 61 | 77 | 64 | 83 | 32 |
| 2895 | 56 | 33 | 22 | 10 | 112 |
| 2896 | 49 | 12 | 60 | 10 | 6 |
| 2897 | 112 | 115 | 8 | 32 | 87 |
| 2898 | 85 | 83 | 71 | 32 | 10 |
| 2899 | 49 | 64 | 36 | 41 | 58 |
| 2900 | 35 | 1 | 55 | 12 | 70 |
| 2901 | 32 | 45 | 23 | 58 | 60 |
| 2902 | 12 | 77 | 121 | 107 | 13 |
| 2903 | 38 | 5 | 118 | 64 | 18 |
| 2904 | 130 | 12 | 85 | 35 | 133 |
| 2905 | 39 | 25 | 12 | 31 | 55 |
| 2906 | 75 | 107 | 40 | 45 | 112 |
| 2907 | 55 | 38 | 34 | 127 | 7 |
| 2908 | 11 | 62 | 31 | 38 | 45 |
| 2909 | 22 | 107 | 109 | 45 | 54 |
| 2910 | 69 | 65 | 77 | 16 | 45 |
| 2911 | 2 | 21 | 44 | 121 | 55 |
| 2912 | 90 | 9 | 124 | 36 | 87 |
| 2913 | 66 | 21 | 90 | 1 | 55 |
| 2914 | 89 | 76 | 3 | 70 | 25 |
| 2915 | 12 | 83 | 90 | 118 | 49 |
| 2916 | 19 | 8 | 75 | 12 | 58 |
| 2917 | 12 | 83 | 88 | 41 | 39 |
| 2918 | 103 | 1 | 6 | 12 | 41 |
| 2919 | 112 | 49 | 18 | 23 | 28 |
| 2920 | 16 | 57 | 77 | 2 | 47 |
| 2921 | 71 | 5 | 19 | 124 | 45 |
| 2922 | 12 | 76 | 73 | 53 | 40 |
| 2923 | 39 | 118 | 46 | 22 | 112 |
| 2924 | 57 | 35 | 44 | 65 | 21 |
| 2925 | 112 | 24 | 46 | 19 | 39 |
| 2926 | 71 | 88 | 39 | 112 | 45 |
| 2927 | 66 | 35 | 26 | 45 | 109 |
| 2928 | 21 | 90 | 82 | 32 | 112 |
| 2929 | 6 | 77 | 44 | 124 | 16 |
| 2930 | 112 | 55 | 44 | 74 | 57 |
| 2931 | 58 | 68 | 81 | 16 | 83 |
| 2932 | 112 | 120 | 39 | 37 | 8 |
| 2933 | 35 | 29 | 45 | 67 | 74 |
| 2934 | 39 | 2 | 12 | 36 | 54 |
| 2935 | 42 | 12 | 86 | 19 | 87 |
| 2936 | 39 | 127 | 66 | 57 | 35 |
| 2937 | 55 | 25 | 52 | 121 | 6 |
| 2938 | 53 | 112 | 73 | 11 | 16 |
| 2939 | 20 | 12 | 59 | 67 | 10 |
| 2940 | 78 | 19 | 2 | 89 | 71 |
| 2941 | 81 | 46 | 45 | 12 | 55 |
| 2942 | 127 | 34 | 12 | 87 | 8 |
| 2943 | 12 | 36 | 54 | 3 | 10 |
| 2944 | 81 | 54 | 112 | 8 | 60 |
| 2945 | 43 | 66 | 87 | 55 | 121 |
| 2946 | 12 | 89 | 1 | 63 | 43 |
| 2947 | 55 | 21 | 32 | 130 | 78 |
| 2948 | 3 | 21 | 112 | 50 | 11 |
| 2949 | 32 | 31 | 47 | 55 | 37 |
| 2950 | 56 | 46 | 91 | 3 | 112 |
| 2951 | 41 | 49 | 71 | 12 | 20 |
| 2952 | 47 | 12 | 18 | 71 | 55 |
| 2953 | 81 | 12 | 1 | 21 | 5 |
| 2954 | 17 | 49 | 15 | 70 | 64 |
| 2955 | 112 | 133 | 81 | 53 | 45 |
| 2956 | 24 | 12 | 10 | 49 | 9 |
| 2957 | 127 | 38 | 1 | 12 | 118 |
| 2958 | 90 | 24 | 84 | 103 | 130 |
| 2959 | 45 | 50 | 22 | 73 | 21 |
| 2960 | 49 | 59 | 40 | 10 | 12 |
| 2961 | 39 | 18 | 5 | 42 | 64 |
| 2962 | 38 | 12 | 118 | 70 | 69 |
| 2963 | 12 | 86 | 90 | 76 | 39 |
| 2964 | 127 | 5 | 81 | 121 | 55 |
| 2965 | 7 | 67 | 12 | 44 | 115 |
| 2966 | 58 | 53 | 61 | 62 | 39 |
| 2967 | 45 | 89 | 66 | 64 | 69 |
| 2968 | 12 | 52 | 83 | 88 | 103 |
| 2969 | 25 | 66 | 64 | 61 | 28 |
| 2970 | 91 | 127 | 112 | 78 | 88 |
| 2971 | 21 | 36 | 12 | 63 | 1 |
| 2972 | 64 | 55 | 45 | 29 | 43 |
| 2973 | 80 | 25 | 3 | 9 | 81 |
| 2974 | 91 | 12 | 9 | 55 | 45 |
| 2975 | 5 | 35 | 50 | 15 | 75 |
| 2976 | 44 | 6 | 32 | 124 | 23 |
| 2977 | 21 | 124 | 13 | 45 | 90 |
| 2978 | 12 | 81 | 50 | 124 | 49 |
| 2979 | 67 | 124 | 12 | 2 | 65 |
| 2980 | 133 | 31 | 12 | 35 | 83 |
| 2981 | 17 | 41 | 40 | 29 | 12 |
| 2982 | 31 | 112 | 91 | 73 | 56 |
| 2983 | 83 | 41 | 57 | 65 | 3 |
| 2984 | 78 | 130 | 14 | 30 | 112 |
| 2985 | 49 | 90 | 91 | 64 | 5 |
| 2986 | 86 | 12 | 21 | 46 | 16 |
| 2987 | 118 | 55 | 16 | 47 | 60 |
| 2988 | 82 | 115 | 7 | 12 | 60 |
| 2989 | 69 | 66 | 38 | 10 | 75 |
| 2990 | 121 | 72 | 19 | 69 | 35 |
| 2991 | 25 | 41 | 62 | 12 | 91 |
| 2992 | 11 | 12 | 121 | 38 | 133 |
| 2993 | 124 | 11 | 55 | 45 | 6 |
| 2994 | 12 | 74 | 63 | 35 | 20 |
| 2995 | 16 | 43 | 86 | 38 | 115 |
| 2996 | 29 | 1 | 52 | 87 | 12 |
| 2997 | 121 | 112 | 67 | 81 | 12 |
| 2998 | 112 | 50 | 41 | 14 | 83 |
| 2999 | 45 | 32 | 1 | 58 | 8 |
| 3000 | 12 | 2 | 47 | 63 | 1 |
| 3001 | 44 | 55 | 10 | 77 | 38 |
| 3002 | 109 | 45 | 76 | 38 | 64 |
| 3003 | 2 | 39 | 118 | 12 | 57 |
| 3004 | 16 | 112 | 18 | 32 | 55 |
| 3005 | 45 | 64 | 12 | 28 | 67 |
| 3006 | 56 | 90 | 12 | 133 | 19 |
| 3007 | 83 | 45 | 16 | 85 | 112 |
| 3008 | 78 | 61 | 124 | 49 | 28 |
| 3009 | 8 | 12 | 6 | 31 | 23 |
| 3010 | 31 | 1 | 24 | 12 | 49 |
| 3011 | 91 | 121 | 82 | 55 | 3 |
| 3012 | 21 | 12 | 49 | 107 | 41 |
| 3013 | 46 | 12 | 42 | 21 | 1 |
| 3014 | 35 | 20 | 86 | 12 | 85 |
| 3015 | 12 | 107 | 46 | 73 | 90 |
| 3016 | 35 | 83 | 45 | 36 | 120 |
| 3017 | 77 | 72 | 12 | 10 | 121 |
| 3018 | 20 | 12 | 76 | 1 | 16 |
| 3019 | 12 | 1 | 53 | 35 | 19 |
| 3020 | 55 | 69 | 12 | 60 | 33 |
| 3021 | 12 | 55 | 33 | 59 | 10 |
| 3022 | 32 | 13 | 3 | 124 | 82 |
| 3023 | 124 | 25 | 87 | 89 | 2 |
| 3024 | 12 | 23 | 91 | 56 | 47 |
| 3025 | 73 | 121 | 82 | 12 | 25 |
| 3026 | 12 | 19 | 15 | 36 | 26 |
| 3027 | 73 | 64 | 88 | 44 | 91 |
| 3028 | 1 | 83 | 12 | 5 | 77 |
| 3029 | 38 | 19 | 32 | 18 | 35 |
| 3030 | 10 | 5 | 112 | 68 | 103 |
| 3031 | 50 | 62 | 64 | 36 | 83 |
| 3032 | 83 | 127 | 121 | 130 | 55 |
| 3033 | 124 | 43 | 24 | 25 | 67 |
| 3034 | 47 | 89 | 77 | 32 | 64 |
| 3035 | 66 | 84 | 124 | 35 | 5 |
| 3036 | 3 | 24 | 26 | 76 | 25 |
| 3037 | 83 | 12 | 89 | 53 | 60 |
| 3038 | 12 | 75 | 66 | 83 | 15 |
| 3039 | 10 | 124 | 25 | 15 | 88 |
| 3040 | 41 | 12 | 60 | 29 | 57 |
| 3041 | 7 | 52 | 60 | 12 | 112 |
| 3042 | 7 | 91 | 107 | 66 | 112 |
| 3043 | 50 | 127 | 65 | 77 | 12 |
| 3044 | 33 | 1 | 36 | 3 | 12 |
| 3045 | 55 | 112 | 72 | 27 | 58 |
| 3046 | 2 | 124 | 25 | 20 | 74 |
| 3047 | 13 | 55 | 6 | 103 | 12 |
| 3048 | 28 | 83 | 12 | 73 | 71 |
| 3049 | 55 | 38 | 8 | 1 | 127 |
| 3050 | 6 | 47 | 133 | 32 | 57 |
| 3051 | 3 | 35 | 112 | 26 | 58 |
| 3052 | 56 | 47 | 68 | 12 | 64 |
| 3053 | 124 | 83 | 49 | 130 | 77 |
| 3054 | 3 | 76 | 36 | 25 | 24 |
| 3055 | 62 | 12 | 7 | 83 | 3 |
| 3056 | 6 | 61 | 37 | 32 | 124 |
| 3057 | 90 | 80 | 12 | 31 | 107 |
| 3058 | 35 | 55 | 121 | 25 | 49 |
| 3059 | 37 | 55 | 43 | 91 | 85 |
| 3060 | 39 | 52 | 12 | 21 | 57 |
| 3061 | 12 | 25 | 81 | 84 | 76 |
| 3062 | 12 | 35 | 65 | 34 | 49 |
| 3063 | 22 | 10 | 120 | 49 | 12 |
| 3064 | 22 | 115 | 69 | 64 | 58 |
| 3065 | 35 | 76 | 12 | 59 | 16 |
| 3066 | 5 | 50 | 76 | 124 | 83 |
| 3067 | 64 | 45 | 35 | 91 | 25 |
| 3068 | 60 | 12 | 47 | 84 | 56 |
| 3069 | 66 | 112 | 78 | 38 | 45 |
| 3070 | 19 | 87 | 30 | 78 | 50 |
| 3071 | 29 | 8 | 38 | 124 | 45 |
| 3072 | 127 | 82 | 112 | 78 | 29 |
| 3073 | 112 | 8 | 85 | 83 | 30 |
| 3074 | 43 | 1 | 12 | 65 | 7 |
| 3075 | 25 | 130 | 7 | 52 | 2 |
| 3076 | 2 | 22 | 124 | 53 | 15 |
| 3077 | 57 | 14 | 124 | 75 | 112 |
| 3078 | 86 | 112 | 64 | 45 | 115 |
| 3079 | 16 | 22 | 11 | 60 | 58 |
| 3080 | 60 | 53 | 10 | 32 | 83 |
| 3081 | 74 | 1 | 59 | 45 | 34 |
| 3082 | 47 | 66 | 57 | 11 | 2 |
| 3083 | 12 | 88 | 72 | 6 | 82 |
| 3084 | 45 | 4 | 130 | 53 | 83 |
| 3085 | 35 | 57 | 15 | 32 | 86 |
| 3086 | 52 | 25 | 112 | 45 | 55 |
| 3087 | 75 | 130 | 66 | 35 | 7 |
| 3088 | 76 | 17 | 25 | 4 | 124 |
| 3089 | 109 | 66 | 34 | 85 | 55 |
| 3090 | 73 | 32 | 45 | 12 | 55 |
| 3091 | 12 | 58 | 8 | 39 | 78 |
| 3092 | 20 | 112 | 89 | 22 | 1 |
| 3093 | 33 | 58 | 3 | 31 | 83 |
| 3094 | 12 | 43 | 58 | 44 | 121 |
| 3095 | 22 | 63 | 3 | 50 | 12 |
| 3096 | 31 | 38 | 12 | 91 | 40 |
| 3097 | 45 | 67 | 39 | 124 | 11 |
| 3098 | 78 | 90 | 64 | 12 | 41 |
| 3099 | 12 | 14 | 7 | 112 | 34 |
| 3100 | 14 | 12 | 19 | 56 | 77 |
| 3101 | 124 | 25 | 16 | 133 | 9 |
| 3102 | 24 | 19 | 85 | 83 | 43 |
| 3103 | 65 | 25 | 12 | 76 | 85 |
| 3104 | 82 | 91 | 80 | 45 | 64 |
| 3105 | 69 | 26 | 7 | 12 | 70 |
| 3106 | 55 | 107 | 12 | 17 | 64 |
| 3107 | 130 | 83 | 22 | 84 | 27 |
| 3108 | 12 | 77 | 80 | 89 | 45 |
| 3109 | 49 | 91 | 71 | 41 | 32 |
| 3110 | 16 | 120 | 40 | 49 | 124 |
| 3111 | 8 | 3 | 85 | 32 | 22 |
| 3112 | 90 | 14 | 67 | 45 | 12 |
| 3113 | 1 | 84 | 72 | 15 | 12 |
| 3114 | 64 | 12 | 8 | 6 | 91 |
| 3115 | 66 | 2 | 130 | 57 | 85 |
| 3116 | 12 | 76 | 53 | 3 | 5 |
| 3117 | 45 | 74 | 12 | 25 | 29 |
| 3118 | 34 | 42 | 19 | 120 | 12 |
| 3119 | 56 | 41 | 12 | 25 | 13 |
| 3120 | 57 | 75 | 4 | 12 | 22 |
| 3121 | 71 | 81 | 44 | 12 | 77 |
| 3122 | 27 | 44 | 64 | 18 | 7 |
| 3123 | 12 | 91 | 23 | 69 | 41 |
| 3124 | 25 | 88 | 64 | 56 | 5 |
| 3125 | 1 | 41 | 12 | 115 | 87 |
| 3126 | 10 | 31 | 25 | 124 | 115 |
| 3127 | 103 | 45 | 115 | 43 | 124 |
| 3128 | 23 | 88 | 32 | 124 | 72 |
| 3129 | 43 | 27 | 3 | 124 | 41 |
| 3130 | 38 | 64 | 45 | 76 | 115 |
| 3131 | 5 | 14 | 24 | 38 | 15 |
| 3132 | 58 | 65 | 12 | 43 | 64 |
| 3133 | 31 | 2 | 12 | 127 | 52 |
| 3134 | 40 | 55 | 25 | 3 | 4 |
| 3135 | 35 | 77 | 121 | 1 | 86 |
| 3136 | 64 | 107 | 49 | 58 | 41 |
| 3137 | 39 | 35 | 29 | 7 | 45 |
| 3138 | 112 | 83 | 66 | 91 | 8 |
| 3139 | 82 | 83 | 121 | 66 | 78 |
| 3140 | 24 | 68 | 133 | 3 | 121 |
| 3141 | 83 | 66 | 12 | 34 | 10 |
| 3142 | 124 | 59 | 16 | 12 | 112 |
| 3143 | 12 | 55 | 85 | 133 | 84 |
| 3144 | 18 | 12 | 66 | 42 | 21 |
| 3145 | 28 | 10 | 18 | 49 | 12 |
| 3146 | 91 | 78 | 112 | 71 | 21 |
| 3147 | 88 | 62 | 2 | 66 | 40 |
| 3148 | 36 | 88 | 45 | 64 | 24 |
| 3149 | 39 | 77 | 12 | 121 | 107 |
| 3150 | 76 | 56 | 24 | 12 | 60 |
| 3151 | 71 | 25 | 115 | 24 | 3 |
| 3152 | 35 | 86 | 45 | 70 | 39 |
| 3153 | 87 | 90 | 49 | 66 | 30 |
| 3154 | 64 | 45 | 37 | 35 | 31 |
| 3155 | 66 | 112 | 4 | 19 | 55 |
| 3156 | 39 | 88 | 69 | 15 | 3 |
| 3157 | 12 | 85 | 7 | 69 | 74 |
| 3158 | 63 | 69 | 109 | 78 | 32 |
| 3159 | 59 | 70 | 55 | 12 | 25 |
| 3160 | 12 | 84 | 80 | 14 | 35 |
| 3161 | 31 | 27 | 112 | 45 | 57 |
| 3162 | 27 | 55 | 91 | 3 | 12 |
| 3163 | 74 | 67 | 12 | 84 | 46 |
| 3164 | 55 | 67 | 121 | 64 | 12 |
| 3165 | 2 | 44 | 23 | 57 | 9 |
| 3166 | 85 | 133 | 69 | 66 | 50 |
| 3167 | 80 | 1 | 38 | 2 | 12 |
| 3168 | 45 | 40 | 70 | 107 | 35 |
| 3169 | 44 | 2 | 68 | 39 | 49 |
| 3170 | 12 | 38 | 41 | 35 | 57 |
| 3171 | 120 | 31 | 16 | 38 | 35 |
| 3172 | 53 | 34 | 1 | 70 | 12 |
| 3173 | 124 | 34 | 45 | 91 | 24 |
| 3174 | 24 | 91 | 64 | 5 | 42 |
| 3175 | 3 | 66 | 73 | 2 | 57 |
| 3176 | 50 | 39 | 76 | 57 | 22 |
| 3177 | 25 | 1 | 83 | 12 | 76 |
| 3178 | 12 | 10 | 37 | 44 | 76 |
| 3179 | 23 | 44 | 112 | 57 | 59 |
| 3180 | 16 | 12 | 26 | 68 | 29 |
| 3181 | 124 | 25 | 91 | 60 | 63 |
| 3182 | 55 | 127 | 25 | 112 | 45 |
| 3183 | 12 | 24 | 56 | 73 | 61 |
| 3184 | 55 | 44 | 14 | 12 | 127 |
| 3185 | 77 | 66 | 23 | 22 | 58 |
| 3186 | 19 | 124 | 35 | 121 | 112 |
| 3187 | 37 | 74 | 53 | 12 | 32 |
| 3188 | 10 | 17 | 12 | 18 | 72 |
| 3189 | 71 | 57 | 83 | 6 | 47 |
| 3190 | 32 | 8 | 3 | 90 | 21 |
| 3191 | 35 | 121 | 103 | 2 | 55 |
| 3192 | 63 | 127 | 107 | 2 | 12 |
| 3193 | 12 | 83 | 3 | 130 | 73 |
| 3194 | 36 | 38 | 46 | 61 | 12 |
| 3195 | 83 | 56 | 8 | 1 | 36 |
| 3196 | 56 | 46 | 29 | 38 | 12 |
| 3197 | 72 | 6 | 55 | 38 | 71 |
| 3198 | 26 | 64 | 15 | 49 | 84 |
| 3199 | 72 | 10 | 7 | 47 | 38 |
| 3200 | 8 | 115 | 84 | 89 | 12 |
| 3201 | 78 | 30 | 112 | 44 | 91 |
| 3202 | 29 | 39 | 121 | 89 | 112 |
| 3203 | 38 | 3 | 70 | 124 | 89 |
| 3204 | 47 | 6 | 90 | 83 | 53 |
| 3205 | 18 | 5 | 124 | 76 | 35 |
| 3206 | 68 | 18 | 59 | 32 | 24 |
| 3207 | 62 | 22 | 41 | 112 | 36 |
| 3208 | 12 | 21 | 19 | 58 | 46 |
| 3209 | 77 | 121 | 120 | 35 | 12 |
| 3210 | 7 | 12 | 29 | 1 | 25 |
| 3211 | 40 | 62 | 12 | 41 | 5 |
| 3212 | 30 | 20 | 1 | 12 | 112 |
| 3213 | 115 | 64 | 28 | 58 | 60 |
| 3214 | 87 | 49 | 20 | 18 | 39 |
| 3215 | 35 | 45 | 50 | 36 | 34 |
| 3216 | 24 | 25 | 12 | 1 | 29 |
| 3217 | 3 | 39 | 73 | 87 | 112 |
| 3218 | 21 | 109 | 35 | 124 | 32 |
| 3219 | 28 | 12 | 67 | 89 | 1 |
| 3220 | 85 | 40 | 37 | 12 | 22 |
| 3221 | 81 | 1 | 12 | 53 | 70 |
| 3222 | 12 | 35 | 55 | 16 | 120 |
| 3223 | 64 | 121 | 19 | 83 | 8 |
| 3224 | 64 | 8 | 5 | 112 | 45 |
| 3225 | 75 | 7 | 66 | 38 | 35 |
| 3226 | 25 | 38 | 1 | 115 | 3 |
| 3227 | 45 | 124 | 87 | 25 | 86 |
| 3228 | 21 | 118 | 1 | 12 | 64 |
| 3229 | 31 | 2 | 12 | 35 | 70 |
| 3230 | 55 | 12 | 38 | 47 | 58 |
| 3231 | 12 | 8 | 44 | 54 | 21 |
| 3232 | 12 | 19 | 34 | 86 | 89 |
| 3233 | 20 | 24 | 19 | 25 | 12 |
| 3234 | 31 | 10 | 29 | 112 | 37 |
| 3235 | 75 | 53 | 16 | 74 | 35 |
| 3236 | 121 | 56 | 12 | 34 | 58 |
| 3237 | 49 | 12 | 1 | 27 | 19 |
| 3238 | 12 | 57 | 35 | 65 | 103 |
| 3239 | 13 | 83 | 35 | 130 | 12 |
| 3240 | 77 | 50 | 45 | 35 | 27 |
| 3241 | 38 | 56 | 12 | 4 | 3 |
| 3242 | 46 | 121 | 34 | 55 | 12 |
| 3243 | 66 | 124 | 81 | 133 | 32 |
| 3244 | 130 | 56 | 3 | 1 | 83 |
| 3245 | 1 | 63 | 41 | 12 | 24 |
| 3246 | 2 | 35 | 57 | 26 | 121 |
| 3247 | 60 | 77 | 1 | 12 | 115 |
| 3248 | 12 | 103 | 121 | 69 | 77 |
| 3249 | 8 | 3 | 78 | 11 | 25 |
| 3250 | 24 | 64 | 16 | 25 | 8 |
| 3251 | 133 | 77 | 61 | 112 | 71 |
| 3252 | 3 | 64 | 69 | 55 | 65 |
| 3253 | 127 | 45 | 5 | 72 | 38 |
| 3254 | 50 | 64 | 5 | 30 | 12 |
| 3255 | 30 | 49 | 46 | 112 | 78 |
| 3256 | 124 | 112 | 130 | 31 | 32 |
| 3257 | 80 | 50 | 2 | 21 | 39 |
| 3258 | 87 | 36 | 49 | 15 | 90 |
| 3259 | 12 | 127 | 41 | 64 | 60 |
| 3260 | 58 | 55 | 54 | 12 | 91 |
| 3261 | 64 | 49 | 8 | 75 | 15 |
| 3262 | 4 | 58 | 32 | 56 | 55 |
| 3263 | 6 | 12 | 29 | 20 | 65 |
| 3264 | 39 | 23 | 43 | 45 | 89 |
| 3265 | 5 | 9 | 34 | 12 | 22 |
| 3266 | 107 | 75 | 45 | 112 | 81 |
| 3267 | 90 | 8 | 31 | 2 | 38 |
| 3268 | 12 | 72 | 1 | 55 | 61 |
| 3269 | 27 | 1 | 64 | 49 | 58 |
| 3270 | 2 | 60 | 124 | 112 | 32 |
| 3271 | 12 | 15 | 90 | 35 | 124 |
| 3272 | 65 | 130 | 78 | 127 | 43 |
| 3273 | 127 | 38 | 45 | 22 | 85 |
| 3274 | 12 | 64 | 88 | 7 | 121 |
| 3275 | 88 | 12 | 3 | 2 | 50 |
| 3276 | 11 | 45 | 38 | 35 | 42 |
| 3277 | 6 | 41 | 49 | 124 | 133 |
| 3278 | 12 | 37 | 71 | 133 | 25 |
| 3279 | 12 | 57 | 78 | 5 | 38 |
| 3280 | 64 | 61 | 16 | 53 | 112 |
| 3281 | 121 | 112 | 60 | 90 | 35 |
| 3282 | 49 | 112 | 87 | 42 | 45 |
| 3283 | 12 | 118 | 34 | 83 | 41 |
| 3284 | 45 | 75 | 38 | 49 | 90 |
| 3285 | 86 | 21 | 16 | 112 | 56 |
| 3286 | 40 | 12 | 57 | 3 | 66 |
| 3287 | 16 | 71 | 3 | 44 | 112 |
| 3288 | 107 | 75 | 56 | 12 | 66 |
| 3289 | 37 | 35 | 45 | 23 | 66 |
| 3290 | 41 | 82 | 56 | 19 | 12 |
| 3291 | 1 | 39 | 50 | 127 | 12 |
| 3292 | 90 | 133 | 12 | 67 | 1 |
| 3293 | 41 | 12 | 130 | 52 | 9 |
| 3294 | 3 | 58 | 112 | 47 | 89 |
| 3295 | 42 | 61 | 12 | 17 | 39 |
| 3296 | 1 | 4 | 12 | 61 | 64 |
| 3297 | 49 | 91 | 3 | 58 | 23 |
| 3298 | 56 | 64 | 36 | 62 | 83 |
| 3299 | 77 | 29 | 12 | 55 | 20 |
| 3300 | 67 | 64 | 59 | 5 | 25 |
| 3301 | 42 | 22 | 91 | 124 | 4 |
| 3302 | 57 | 127 | 35 | 46 | 22 |
| 3303 | 67 | 35 | 76 | 15 | 12 |
| 3304 | 121 | 6 | 28 | 35 | 72 |
| 3305 | 46 | 45 | 76 | 25 | 55 |
| 3306 | 19 | 83 | 8 | 90 | 112 |
| 3307 | 23 | 42 | 83 | 87 | 118 |
| 3308 | 112 | 45 | 80 | 26 | 124 |
| 3309 | 57 | 59 | 35 | 45 | 40 |
| 3310 | 103 | 15 | 44 | 35 | 57 |
| 3311 | 112 | 89 | 35 | 9 | 38 |
| 3312 | 89 | 5 | 54 | 124 | 16 |
| 3313 | 121 | 8 | 46 | 112 | 22 |
| 3314 | 12 | 107 | 64 | 2 | 66 |
| 3315 | 42 | 12 | 2 | 53 | 60 |
| 3316 | 56 | 60 | 16 | 35 | 6 |
| 3317 | 7 | 45 | 60 | 56 | 124 |
| 3318 | 88 | 127 | 25 | 55 | 65 |
| 3319 | 30 | 127 | 12 | 54 | 2 |
| 3320 | 41 | 12 | 30 | 62 | 84 |
| 3321 | 89 | 88 | 19 | 2 | 28 |
| 3322 | 14 | 27 | 24 | 58 | 112 |
| 3323 | 58 | 3 | 19 | 89 | 26 |
| 3324 | 10 | 12 | 57 | 120 | 40 |
| 3325 | 37 | 38 | 118 | 12 | 109 |
| 3326 | 46 | 12 | 87 | 71 | 6 |
| 3327 | 112 | 14 | 8 | 21 | 76 |
| 3328 | 25 | 33 | 9 | 12 | 41 |
| 3329 | 32 | 37 | 22 | 84 | 5 |
| 3330 | 112 | 50 | 11 | 35 | 83 |
| 3331 | 23 | 62 | 91 | 90 | 12 |
| 3332 | 130 | 17 | 112 | 72 | 3 |
| 3333 | 27 | 78 | 19 | 20 | 112 |
| 3334 | 34 | 12 | 1 | 49 | 30 |
| 3335 | 35 | 103 | 60 | 89 | 50 |
| 3336 | 35 | 62 | 74 | 70 | 45 |
| 3337 | 57 | 13 | 26 | 4 | 112 |
| 3338 | 57 | 60 | 66 | 4 | 50 |
| 3339 | 12 | 1 | 109 | 73 | 38 |
| 3340 | 22 | 15 | 45 | 124 | 28 |
| 3341 | 39 | 12 | 45 | 65 | 13 |
| 3342 | 12 | 24 | 21 | 18 | 26 |
| 3343 | 25 | 12 | 54 | 69 | 39 |
| 3344 | 52 | 1 | 90 | 47 | 12 |
| 3345 | 83 | 16 | 66 | 7 | 46 |
| 3346 | 59 | 62 | 41 | 12 | 78 |
| 3347 | 83 | 22 | 30 | 130 | 67 |
| 3348 | 39 | 124 | 32 | 90 | 28 |
| 3349 | 28 | 37 | 45 | 115 | 124 |
| 3350 | 42 | 76 | 38 | 91 | 12 |
| 3351 | 70 | 35 | 77 | 56 | 121 |
| 3352 | 58 | 118 | 3 | 55 | 57 |
| 3353 | 30 | 71 | 85 | 12 | 55 |
| 3354 | 5 | 90 | 33 | 133 | 66 |
| 3355 | 80 | 34 | 30 | 12 | 56 |
| 3356 | 57 | 22 | 11 | 75 | 12 |
| 3357 | 12 | 14 | 76 | 1 | 9 |
| 3358 | 23 | 83 | 62 | 12 | 127 |
| 3359 | 70 | 34 | 60 | 85 | 124 |
| 3360 | 32 | 124 | 43 | 70 | 40 |
| 3361 | 68 | 47 | 3 | 24 | 57 |
| 3362 | 54 | 88 | 44 | 89 | 121 |
| 3363 | 12 | 39 | 29 | 32 | 28 |
| 3364 | 83 | 124 | 81 | 39 | 32 |
| 3365 | 45 | 16 | 130 | 55 | 60 |
| 3366 | 4 | 15 | 12 | 49 | 84 |
| 3367 | 66 | 103 | 23 | 57 | 127 |
| 3368 | 57 | 15 | 44 | 37 | 35 |
| 3369 | 78 | 83 | 45 | 18 | 15 |
| 3370 | 22 | 12 | 57 | 52 | 64 |
| 3371 | 84 | 67 | 65 | 12 | 73 |
| 3372 | 83 | 35 | 118 | 73 | 121 |
| 3373 | 81 | 112 | 45 | 42 | 29 |
| 3374 | 112 | 124 | 27 | 39 | 88 |
| 3375 | 112 | 56 | 45 | 73 | 58 |
| 3376 | 2 | 12 | 56 | 46 | 76 |
| 3377 | 55 | 62 | 35 | 12 | 86 |
| 3378 | 103 | 89 | 45 | 124 | 63 |
| 3379 | 34 | 3 | 17 | 12 | 6 |
| 3380 | 90 | 74 | 12 | 22 | 45 |
| 3381 | 60 | 15 | 38 | 68 | 124 |
| 3382 | 85 | 127 | 38 | 3 | 133 |
| 3383 | 121 | 22 | 32 | 112 | 42 |
| 3384 | 16 | 57 | 83 | 63 | 43 |
| 3385 | 5 | 76 | 54 | 12 | 37 |
| 3386 | 28 | 32 | 60 | 12 | 10 |
| 3387 | 124 | 67 | 49 | 91 | 47 |
| 3388 | 91 | 22 | 124 | 88 | 47 |
| 3389 | 78 | 31 | 12 | 41 | 53 |
| 3390 | 60 | 52 | 73 | 124 | 49 |
| 3391 | 87 | 53 | 103 | 49 | 78 |
| 3392 | 15 | 37 | 45 | 83 | 63 |
| 3393 | 35 | 56 | 45 | 50 | 36 |
| 3394 | 55 | 121 | 57 | 52 | 43 |
| 3395 | 41 | 88 | 12 | 19 | 6 |
| 3396 | 12 | 58 | 1 | 72 | 60 |
| 3397 | 70 | 35 | 77 | 50 | 29 |
| 3398 | 55 | 50 | 26 | 29 | 12 |
| 3399 | 12 | 64 | 50 | 34 | 70 |
| 3400 | 121 | 37 | 31 | 32 | 124 |
| 3401 | 127 | 35 | 40 | 84 | 12 |
| 3402 | 50 | 55 | 112 | 127 | 84 |
| 3403 | 89 | 115 | 12 | 47 | 55 |
| 3404 | 28 | 64 | 40 | 12 | 8 |
| 3405 | 118 | 107 | 22 | 16 | 124 |
| 3406 | 45 | 12 | 26 | 7 | 38 |
| 3407 | 71 | 12 | 28 | 43 | 55 |
| 3408 | 37 | 72 | 12 | 3 | 7 |
| 3409 | 83 | 109 | 47 | 57 | 3 |
| 3410 | 103 | 49 | 6 | 124 | 133 |
| 3411 | 34 | 12 | 2 | 53 | 57 |
| 3412 | 67 | 45 | 60 | 40 | 69 |
| 3413 | 50 | 23 | 130 | 34 | 27 |
| 3414 | 85 | 1 | 12 | 16 | 88 |
| 3415 | 40 | 4 | 45 | 112 | 76 |
| 3416 | 89 | 61 | 17 | 39 | 66 |
| 3417 | 89 | 32 | 112 | 90 | 91 |
| 3418 | 64 | 25 | 112 | 103 | 90 |
| 3419 | 69 | 72 | 7 | 12 | 11 |
| 3420 | 89 | 107 | 43 | 19 | 90 |
| 3421 | 32 | 64 | 89 | 49 | 38 |
| 3422 | 12 | 121 | 66 | 22 | 67 |
| 3423 | 12 | 11 | 87 | 91 | 49 |
| 3424 | 86 | 34 | 12 | 55 | 103 |
| 3425 | 130 | 31 | 45 | 66 | 1 |
| 3426 | 5 | 124 | 37 | 64 | 41 |
| 3427 | 127 | 55 | 13 | 39 | 12 |
| 3428 | 16 | 78 | 124 | 91 | 127 |
| 3429 | 73 | 24 | 25 | 3 | 17 |
| 3430 | 91 | 12 | 56 | 5 | 35 |
| 3431 | 5 | 81 | 63 | 6 | 127 |
| 3432 | 64 | 12 | 61 | 34 | 30 |
| 3433 | 38 | 76 | 45 | 57 | 118 |
| 3434 | 91 | 86 | 90 | 112 | 20 |
| 3435 | 19 | 65 | 37 | 12 | 77 |
| 3436 | 81 | 32 | 88 | 64 | 12 |
| 3437 | 103 | 124 | 5 | 35 | 44 |
| 3438 | 74 | 56 | 30 | 6 | 12 |
| 3439 | 112 | 90 | 76 | 57 | 45 |
| 3440 | 112 | 66 | 130 | 35 | 45 |
| 3441 | 86 | 21 | 19 | 46 | 12 |
| 3442 | 107 | 36 | 124 | 133 | 5 |
| 3443 | 12 | 7 | 45 | 65 | 23 |
| 3444 | 21 | 2 | 112 | 9 | 57 |
| 3445 | 5 | 10 | 28 | 43 | 12 |
| 3446 | 87 | 37 | 49 | 12 | 53 |
| 3447 | 74 | 130 | 107 | 55 | 12 |
| 3448 | 11 | 90 | 86 | 21 | 32 |
| 3449 | 56 | 115 | 58 | 12 | 127 |
| 3450 | 58 | 107 | 5 | 54 | 22 |
| 3451 | 67 | 53 | 2 | 66 | 83 |
| 3452 | 50 | 49 | 47 | 37 | 2 |
| 3453 | 50 | 21 | 78 | 40 | 45 |
| 3454 | 25 | 50 | 54 | 20 | 55 |
| 3455 | 78 | 107 | 10 | 25 | 3 |
| 3456 | 23 | 121 | 35 | 8 | 57 |
| 3457 | 65 | 12 | 25 | 86 | 41 |
| 3458 | 35 | 58 | 80 | 18 | 12 |
| 3459 | 55 | 91 | 60 | 115 | 112 |
| 3460 | 55 | 35 | 50 | 12 | 29 |
| 3461 | 34 | 60 | 124 | 5 | 6 |
| 3462 | 12 | 4 | 65 | 29 | 76 |
| 3463 | 25 | 78 | 16 | 127 | 11 |
| 3464 | 12 | 10 | 55 | 33 | 19 |
| 3465 | 63 | 35 | 39 | 12 | 16 |
| 3466 | 127 | 66 | 124 | 55 | 19 |
| 3467 | 71 | 112 | 78 | 43 | 25 |
| 3468 | 41 | 81 | 112 | 27 | 90 |
| 3469 | 34 | 78 | 9 | 83 | 127 |
| 3470 | 118 | 12 | 23 | 57 | 35 |
| 3471 | 83 | 109 | 66 | 118 | 58 |
| 3472 | 107 | 62 | 22 | 45 | 12 |
| 3473 | 60 | 45 | 124 | 23 | 18 |
| 3474 | 121 | 77 | 60 | 91 | 112 |
| 3475 | 90 | 77 | 12 | 32 | 73 |
| 3476 | 3 | 74 | 32 | 124 | 6 |
| 3477 | 53 | 89 | 52 | 58 | 35 |
| 3478 | 112 | 73 | 90 | 85 | 20 |
| 3479 | 84 | 127 | 78 | 83 | 32 |
| 3480 | 89 | 124 | 49 | 61 | 85 |
| 3481 | 44 | 124 | 60 | 55 | 69 |
| 3482 | 25 | 61 | 124 | 11 | 3 |
| 3483 | 45 | 17 | 66 | 2 | 29 |
| 3484 | 18 | 39 | 61 | 124 | 38 |
| 3485 | 21 | 56 | 12 | 45 | 25 |
| 3486 | 12 | 107 | 24 | 3 | 57 |
| 3487 | 84 | 22 | 124 | 43 | 83 |
| 3488 | 66 | 12 | 7 | 57 | 23 |
| 3489 | 24 | 64 | 12 | 118 | 56 |
| 3490 | 64 | 45 | 47 | 127 | 83 |
| 3491 | 19 | 38 | 23 | 18 | 39 |
| 3492 | 53 | 2 | 65 | 58 | 103 |
| 3493 | 5 | 86 | 35 | 121 | 64 |
| 3494 | 89 | 39 | 44 | 121 | 88 |
| 3495 | 14 | 23 | 12 | 34 | 58 |
| 3496 | 57 | 11 | 89 | 71 | 112 |
| 3497 | 65 | 12 | 55 | 78 | 85 |
| 3498 | 73 | 19 | 1 | 87 | 49 |
| 3499 | 25 | 37 | 91 | 76 | 12 |
| 3500 | 83 | 34 | 133 | 127 | 12 |
| 3501 | 121 | 67 | 56 | 35 | 75 |
| 3502 | 55 | 112 | 90 | 32 | 87 |
| 3503 | 58 | 67 | 53 | 66 | 32 |
| 3504 | 127 | 120 | 12 | 38 | 7 |
| 3505 | 133 | 5 | 86 | 112 | 38 |
| 3506 | 46 | 55 | 20 | 30 | 12 |
| 3507 | 120 | 83 | 88 | 85 | 52 |
| 3508 | 39 | 124 | 118 | 45 | 34 |
| 3509 | 12 | 29 | 64 | 32 | 130 |
| 3510 | 57 | 15 | 3 | 2 | 64 |
| 3511 | 1 | 80 | 38 | 15 | 124 |
| 3512 | 112 | 27 | 23 | 103 | 24 |
| 3513 | 77 | 3 | 87 | 12 | 56 |
| 3514 | 69 | 41 | 22 | 83 | 66 |
| 3515 | 64 | 112 | 53 | 6 | 91 |
| 3516 | 124 | 19 | 28 | 70 | 32 |
| 3517 | 12 | 49 | 91 | 55 | 11 |
| 3518 | 63 | 64 | 89 | 38 | 3 |
| 3519 | 39 | 12 | 25 | 24 | 50 |
| 3520 | 4 | 66 | 2 | 23 | 16 |
| 3521 | 91 | 56 | 112 | 57 | 20 |
| 3522 | 63 | 12 | 17 | 32 | 6 |
| 3523 | 1 | 41 | 133 | 12 | 35 |
| 3524 | 30 | 91 | 57 | 127 | 112 |
| 3525 | 38 | 5 | 112 | 3 | 41 |
| 3526 | 11 | 60 | 62 | 72 | 124 |
| 3527 | 35 | 26 | 45 | 12 | 133 |
| 3528 | 30 | 56 | 124 | 25 | 49 |
| 3529 | 3 | 16 | 24 | 25 | 33 |
| 3530 | 130 | 10 | 38 | 23 | 3 |
| 3531 | 46 | 31 | 32 | 24 | 11 |
| 3532 | 1 | 30 | 13 | 120 | 12 |
| 3533 | 47 | 1 | 70 | 52 | 12 |
| 3534 | 69 | 30 | 55 | 19 | 121 |
| 3535 | 112 | 47 | 22 | 56 | 12 |
| 3536 | 12 | 88 | 45 | 60 | 16 |
| 3537 | 109 | 45 | 112 | 65 | 39 |
| 3538 | 103 | 78 | 87 | 58 | 86 |
| 3539 | 44 | 40 | 124 | 50 | 35 |
| 3540 | 45 | 38 | 25 | 11 | 4 |
| 3541 | 26 | 60 | 23 | 12 | 41 |
| 3542 | 54 | 74 | 12 | 15 | 3 |
| 3543 | 62 | 12 | 64 | 57 | 18 |
| 3544 | 54 | 70 | 9 | 124 | 32 |
| 3545 | 22 | 130 | 56 | 31 | 38 |
| 3546 | 103 | 7 | 83 | 36 | 115 |
| 3547 | 66 | 10 | 38 | 45 | 103 |
| 3548 | 35 | 52 | 24 | 45 | 16 |
| 3549 | 107 | 30 | 38 | 64 | 12 |
| 3550 | 12 | 86 | 55 | 59 | 61 |
| 3551 | 56 | 29 | 14 | 25 | 112 |
| 3552 | 36 | 44 | 58 | 118 | 55 |
| 3553 | 32 | 34 | 64 | 124 | 50 |
| 3554 | 71 | 67 | 112 | 18 | 121 |
| 3555 | 2 | 124 | 44 | 38 | 62 |
| 3556 | 35 | 11 | 12 | 45 | 57 |
| 3557 | 60 | 55 | 112 | 71 | 90 |
| 3558 | 80 | 21 | 83 | 41 | 12 |
| 3559 | 12 | 55 | 35 | 65 | 45 |
| 3560 | 42 | 15 | 112 | 40 | 103 |
| 3561 | 35 | 121 | 70 | 24 | 71 |
| 3562 | 124 | 61 | 64 | 21 | 76 |
| 3563 | 12 | 49 | 4 | 91 | 57 |
| 3564 | 67 | 12 | 112 | 22 | 41 |
| 3565 | 12 | 76 | 74 | 30 | 1 |
| 3566 | 15 | 82 | 55 | 35 | 121 |
| 3567 | 35 | 26 | 84 | 21 | 72 |
| 3568 | 73 | 55 | 85 | 24 | 12 |
| 3569 | 49 | 25 | 7 | 34 | 12 |
| 3570 | 112 | 64 | 55 | 11 | 83 |
| 3571 | 12 | 52 | 8 | 36 | 58 |
| 3572 | 25 | 124 | 15 | 103 | 8 |
| 3573 | 23 | 78 | 12 | 35 | 57 |
| 3574 | 16 | 12 | 5 | 39 | 34 |
| 3575 | 32 | 4 | 33 | 83 | 28 |
| 3576 | 19 | 83 | 89 | 118 | 57 |
| 3577 | 49 | 6 | 20 | 32 | 124 |
| 3578 | 1 | 60 | 18 | 12 | 54 |
| 3579 | 57 | 32 | 25 | 17 | 12 |
| 3580 | 35 | 83 | 56 | 76 | 124 |
| 3581 | 121 | 124 | 45 | 115 | 16 |
| 3582 | 31 | 47 | 25 | 38 | 10 |
| 3583 | 77 | 121 | 40 | 12 | 64 |
| 3584 | 35 | 53 | 58 | 57 | 15 |
| 3585 | 56 | 109 | 60 | 53 | 112 |
| 3586 | 83 | 8 | 78 | 43 | 112 |
| 3587 | 8 | 21 | 12 | 2 | 53 |
| 3588 | 74 | 83 | 35 | 45 | 112 |
| 3589 | 25 | 3 | 73 | 35 | 24 |
| 3590 | 52 | 16 | 12 | 25 | 109 |
| 3591 | 49 | 12 | 87 | 120 | 80 |
| 3592 | 112 | 41 | 89 | 78 | 12 |
| 3593 | 46 | 118 | 73 | 25 | 55 |
| 3594 | 26 | 12 | 75 | 34 | 45 |
| 3595 | 42 | 90 | 31 | 28 | 112 |
| 3596 | 59 | 127 | 2 | 112 | 57 |
| 3597 | 12 | 68 | 2 | 39 | 4 |
| 3598 | 32 | 20 | 88 | 109 | 121 |
| 3599 | 23 | 68 | 45 | 34 | 12 |
| 3600 | 55 | 57 | 44 | 66 | 25 |
| 3601 | 3 | 59 | 35 | 37 | 38 |
| 3602 | 89 | 58 | 84 | 112 | 28 |
| 3603 | 65 | 107 | 12 | 84 | 78 |
| 3604 | 3 | 15 | 12 | 54 | 124 |
| 3605 | 124 | 46 | 25 | 130 | 88 |
| 3606 | 130 | 124 | 77 | 45 | 5 |
| 3607 | 63 | 12 | 26 | 19 | 28 |
| 3608 | 43 | 55 | 130 | 91 | 63 |
| 3609 | 67 | 25 | 109 | 3 | 17 |
| 3610 | 23 | 12 | 2 | 73 | 45 |
| 3611 | 34 | 11 | 68 | 12 | 45 |
| 3612 | 90 | 73 | 45 | 17 | 12 |
| 3613 | 6 | 64 | 65 | 12 | 38 |
| 3614 | 18 | 112 | 72 | 71 | 70 |
| 3615 | 12 | 55 | 90 | 71 | 73 |
| 3616 | 35 | 12 | 63 | 50 | 40 |
| 3617 | 58 | 35 | 81 | 6 | 16 |
| 3618 | 26 | 12 | 28 | 1 | 21 |
| 3619 | 56 | 84 | 12 | 115 | 37 |
| 3620 | 89 | 69 | 16 | 81 | 23 |
| 3621 | 77 | 15 | 22 | 124 | 86 |
| 3622 | 41 | 8 | 68 | 12 | 55 |
| 3623 | 40 | 31 | 42 | 32 | 12 |
| 3624 | 42 | 130 | 58 | 38 | 22 |
| 3625 | 44 | 78 | 127 | 12 | 88 |
| 3626 | 16 | 21 | 66 | 1 | 55 |
| 3627 | 15 | 54 | 12 | 2 | 55 |
| 3628 | 43 | 49 | 2 | 25 | 124 |
| 3629 | 37 | 42 | 19 | 5 | 2 |
| 3630 | 12 | 5 | 76 | 124 | 54 |
| 3631 | 15 | 60 | 25 | 112 | 40 |
| 3632 | 112 | 4 | 71 | 69 | 49 |
| 3633 | 87 | 50 | 130 | 86 | 55 |
| 3634 | 30 | 90 | 124 | 45 | 34 |
| 3635 | 39 | 25 | 37 | 46 | 5 |
| 3636 | 41 | 124 | 12 | 10 | 55 |
| 3637 | 107 | 3 | 1 | 33 | 38 |
| 3638 | 62 | 32 | 90 | 39 | 87 |
| 3639 | 109 | 8 | 25 | 35 | 24 |
| 3640 | 12 | 103 | 78 | 27 | 45 |
| 3641 | 103 | 133 | 124 | 74 | 49 |
| 3642 | 60 | 14 | 45 | 57 | 35 |
| 3643 | 121 | 16 | 35 | 83 | 107 |
| 3644 | 44 | 12 | 49 | 64 | 66 |
| 3645 | 124 | 63 | 16 | 74 | 49 |
| 3646 | 31 | 40 | 35 | 45 | 22 |
| 3647 | 31 | 12 | 63 | 33 | 55 |
| 3648 | 12 | 2 | 39 | 50 | 77 |
| 3649 | 12 | 30 | 47 | 58 | 32 |
| 3650 | 83 | 4 | 47 | 124 | 60 |
| 3651 | 12 | 5 | 7 | 30 | 1 |
| 3652 | 10 | 27 | 50 | 112 | 103 |
| 3653 | 60 | 12 | 41 | 86 | 13 |
| 3654 | 56 | 76 | 84 | 124 | 49 |
| 3655 | 71 | 16 | 3 | 35 | 5 |
| 3656 | 76 | 124 | 44 | 5 | 26 |
| 3657 | 29 | 56 | 103 | 78 | 112 |
| 3658 | 78 | 32 | 40 | 54 | 12 |
| 3659 | 49 | 77 | 55 | 12 | 112 |
| 3660 | 118 | 11 | 12 | 35 | 45 |
| 3661 | 1 | 45 | 124 | 43 | 83 |
| 3662 | 88 | 33 | 12 | 56 | 127 |
| 3663 | 12 | 133 | 44 | 88 | 27 |
| 3664 | 112 | 66 | 31 | 72 | 45 |
| 3665 | 43 | 78 | 27 | 68 | 12 |
| 3666 | 61 | 118 | 12 | 56 | 75 |
| 3667 | 88 | 70 | 12 | 130 | 55 |
| 3668 | 88 | 120 | 25 | 124 | 40 |
| 3669 | 13 | 19 | 41 | 73 | 12 |
| 3670 | 58 | 6 | 66 | 49 | 42 |
| 3671 | 85 | 64 | 90 | 12 | 107 |
| 3672 | 124 | 4 | 28 | 12 | 112 |
| 3673 | 23 | 76 | 12 | 83 | 15 |
| 3674 | 83 | 12 | 121 | 115 | 22 |
| 3675 | 32 | 60 | 34 | 124 | 80 |
| 3676 | 37 | 28 | 12 | 78 | 107 |
| 3677 | 19 | 32 | 11 | 112 | 55 |
| 3678 | 71 | 74 | 64 | 52 | 49 |
| 3679 | 38 | 16 | 71 | 103 | 133 |
| 3680 | 54 | 12 | 34 | 2 | 49 |
| 3681 | 19 | 12 | 50 | 130 | 42 |
| 3682 | 4 | 124 | 21 | 16 | 49 |
| 3683 | 39 | 22 | 3 | 91 | 61 |
| 3684 | 45 | 115 | 54 | 58 | 12 |
| 3685 | 112 | 57 | 41 | 27 | 40 |
| 3686 | 66 | 76 | 29 | 12 | 25 |
| 3687 | 78 | 52 | 121 | 83 | 103 |
| 3688 | 39 | 64 | 65 | 112 | 91 |
| 3689 | 13 | 62 | 124 | 43 | 60 |
| 3690 | 3 | 91 | 58 | 55 | 89 |
| 3691 | 57 | 62 | 127 | 19 | 22 |
| 3692 | 42 | 120 | 49 | 83 | 52 |
| 3693 | 52 | 7 | 30 | 40 | 12 |
| 3694 | 60 | 112 | 84 | 42 | 5 |
| 3695 | 24 | 19 | 6 | 66 | 25 |
| 3696 | 61 | 32 | 87 | 112 | 124 |
| 3697 | 25 | 130 | 81 | 22 | 109 |
| 3698 | 23 | 21 | 35 | 57 | 121 |
| 3699 | 29 | 81 | 55 | 12 | 33 |
| 3700 | 45 | 17 | 54 | 40 | 112 |
| 3701 | 55 | 5 | 87 | 46 | 58 |
| 3702 | 55 | 58 | 127 | 25 | 61 |
| 3703 | 124 | 24 | 1 | 41 | 5 |
| 3704 | 109 | 1 | 3 | 25 | 38 |
| 3705 | 39 | 8 | 121 | 35 | 55 |
| 3706 | 65 | 83 | 91 | 64 | 32 |
| 3707 | 12 | 1 | 68 | 44 | 55 |
| 3708 | 89 | 17 | 66 | 43 | 31 |
| 3709 | 87 | 112 | 90 | 83 | 39 |
| 3710 | 12 | 35 | 55 | 58 | 3 |
| 3711 | 78 | 19 | 72 | 33 | 12 |
| 3712 | 73 | 3 | 25 | 61 | 28 |
| 3713 | 12 | 19 | 38 | 118 | 127 |
| 3714 | 12 | 40 | 76 | 13 | 88 |
| 3715 | 45 | 32 | 88 | 112 | 83 |
| 3716 | 23 | 57 | 31 | 32 | 38 |
| 3717 | 35 | 15 | 77 | 124 | 60 |
| 3718 | 39 | 83 | 55 | 38 | 15 |
| 3719 | 78 | 112 | 71 | 27 | 44 |
| 3720 | 38 | 112 | 66 | 55 | 14 |
| 3721 | 69 | 52 | 64 | 24 | 16 |
| 3722 | 34 | 83 | 12 | 2 | 13 |
| 3723 | 55 | 12 | 7 | 121 | 41 |
| 3724 | 84 | 62 | 12 | 76 | 55 |
| 3725 | 7 | 63 | 12 | 65 | 3 |
| 3726 | 43 | 12 | 3 | 2 | 87 |
| 3727 | 112 | 30 | 45 | 89 | 55 |
| 3728 | 8 | 25 | 21 | 60 | 12 |
| 3729 | 33 | 112 | 50 | 42 | 57 |
| 3730 | 41 | 77 | 67 | 81 | 12 |
| 3731 | 3 | 15 | 35 | 58 | 77 |
| 3732 | 124 | 65 | 45 | 4 | 5 |
| 3733 | 74 | 22 | 58 | 34 | 16 |
| 3734 | 50 | 133 | 63 | 22 | 130 |
| 3735 | 30 | 55 | 77 | 45 | 124 |
| 3736 | 124 | 121 | 41 | 42 | 5 |
| 3737 | 39 | 12 | 10 | 25 | 43 |
| 3738 | 66 | 124 | 34 | 56 | 12 |
| 3739 | 35 | 68 | 41 | 32 | 12 |
| 3740 | 61 | 16 | 25 | 72 | 112 |
| 3741 | 121 | 12 | 65 | 57 | 60 |
| 3742 | 41 | 12 | 90 | 68 | 69 |
| 3743 | 4 | 60 | 76 | 127 | 12 |
| 3744 | 112 | 81 | 90 | 25 | 27 |
| 3745 | 16 | 2 | 12 | 23 | 28 |
| 3746 | 12 | 32 | 57 | 124 | 71 |
| 3747 | 3 | 7 | 25 | 26 | 29 |
| 3748 | 58 | 5 | 49 | 124 | 127 |
| 3749 | 21 | 19 | 27 | 10 | 74 |
| 3750 | 39 | 115 | 67 | 58 | 84 |
| 3751 | 5 | 77 | 61 | 45 | 12 |
| 3752 | 25 | 24 | 47 | 54 | 60 |
| 3753 | 37 | 5 | 52 | 63 | 124 |
| 3754 | 75 | 12 | 23 | 41 | 19 |
| 3755 | 124 | 61 | 52 | 39 | 49 |
| 3756 | 21 | 15 | 82 | 90 | 124 |
| 3757 | 62 | 35 | 12 | 55 | 26 |
| 3758 | 85 | 28 | 55 | 127 | 12 |
| 3759 | 12 | 44 | 19 | 30 | 55 |
| 3760 | 3 | 1 | 38 | 30 | 72 |
| 3761 | 88 | 50 | 133 | 112 | 22 |
| 3762 | 16 | 24 | 12 | 40 | 43 |
| 3763 | 65 | 83 | 12 | 80 | 35 |
| 3764 | 53 | 2 | 121 | 55 | 83 |
| 3765 | 9 | 16 | 78 | 5 | 127 |
| 3766 | 86 | 49 | 53 | 10 | 12 |
| 3767 | 60 | 12 | 81 | 84 | 41 |
| 3768 | 38 | 31 | 22 | 4 | 12 |
| 3769 | 28 | 12 | 41 | 19 | 70 |
| 3770 | 82 | 65 | 12 | 41 | 78 |
| 3771 | 82 | 76 | 12 | 6 | 50 |
| 3772 | 1 | 88 | 115 | 35 | 12 |
| 3773 | 19 | 83 | 12 | 53 | 121 |
| 3774 | 26 | 40 | 38 | 3 | 12 |
| 3775 | 45 | 7 | 112 | 39 | 22 |
| 3776 | 38 | 18 | 71 | 25 | 1 |
| 3777 | 67 | 34 | 24 | 12 | 39 |
| 3778 | 12 | 54 | 39 | 38 | 61 |
| 3779 | 38 | 55 | 107 | 115 | 45 |
| 3780 | 53 | 35 | 57 | 50 | 66 |
| 3781 | 1 | 72 | 12 | 107 | 85 |
| 3782 | 45 | 124 | 32 | 54 | 6 |
| 3783 | 120 | 47 | 57 | 52 | 25 |
| 3784 | 13 | 35 | 11 | 83 | 16 |
| 3785 | 17 | 103 | 41 | 45 | 12 |
| 3786 | 13 | 25 | 3 | 5 | 7 |
| 3787 | 60 | 59 | 87 | 124 | 121 |
| 3788 | 26 | 41 | 43 | 12 | 18 |
| 3789 | 1 | 16 | 12 | 10 | 20 |
| 3790 | 52 | 44 | 121 | 60 | 12 |
| 3791 | 12 | 37 | 49 | 81 | 10 |
| 3792 | 47 | 24 | 82 | 66 | 3 |
| 3793 | 23 | 41 | 22 | 66 | 69 |
| 3794 | 45 | 124 | 112 | 21 | 41 |
| 3795 | 6 | 47 | 34 | 12 | 71 |
| 3796 | 23 | 121 | 20 | 61 | 12 |
| 3797 | 81 | 83 | 88 | 87 | 12 |
| 3798 | 36 | 64 | 76 | 12 | 58 |
| 3799 | 81 | 72 | 83 | 50 | 112 |
| 3800 | 21 | 57 | 52 | 1 | 45 |
| 3801 | 35 | 127 | 17 | 55 | 8 |
| 3802 | 26 | 24 | 55 | 91 | 12 |
| 3803 | 39 | 13 | 16 | 64 | 61 |
| 3804 | 58 | 19 | 13 | 8 | 12 |
| 3805 | 85 | 124 | 12 | 127 | 1 |
| 3806 | 57 | 35 | 50 | 107 | 28 |
| 3807 | 22 | 3 | 37 | 58 | 16 |
| 3808 | 115 | 107 | 90 | 124 | 16 |
| 3809 | 15 | 14 | 25 | 56 | 35 |
| 3810 | 22 | 35 | 39 | 15 | 18 |
| 3811 | 83 | 76 | 103 | 85 | 1 |
| 3812 | 34 | 12 | 59 | 49 | 71 |
| 3813 | 7 | 1 | 15 | 12 | 75 |
| 3814 | 53 | 69 | 8 | 24 | 112 |
| 3815 | 34 | 35 | 25 | 5 | 3 |
| 3816 | 87 | 12 | 1 | 70 | 103 |
| 3817 | 42 | 2 | 12 | 38 | 22 |
| 3818 | 6 | 83 | 28 | 12 | 61 |
| 3819 | 34 | 12 | 41 | 74 | 23 |
| 3820 | 35 | 69 | 67 | 90 | 16 |
| 3821 | 45 | 12 | 60 | 19 | 24 |
| 3822 | 60 | 32 | 124 | 3 | 68 |
| 3823 | 10 | 130 | 25 | 40 | 12 |
| 3824 | 107 | 36 | 90 | 35 | 49 |
| 3825 | 6 | 12 | 55 | 14 | 27 |
| 3826 | 109 | 22 | 124 | 9 | 91 |
| 3827 | 81 | 71 | 112 | 28 | 11 |
| 3828 | 34 | 22 | 59 | 13 | 12 |
| 3829 | 77 | 88 | 27 | 124 | 66 |
| 3830 | 55 | 6 | 66 | 130 | 58 |
| 3831 | 46 | 52 | 12 | 34 | 55 |
| 3832 | 60 | 44 | 52 | 39 | 57 |
| 3833 | 27 | 35 | 67 | 66 | 65 |
| 3834 | 24 | 64 | 127 | 25 | 124 |
| 3835 | 5 | 133 | 19 | 62 | 124 |
| 3836 | 73 | 12 | 1 | 3 | 127 |
| 3837 | 15 | 12 | 74 | 35 | 50 |
| 3838 | 107 | 11 | 55 | 4 | 112 |
| 3839 | 52 | 49 | 91 | 89 | 124 |
| 3840 | 72 | 52 | 83 | 41 | 12 |
| 3841 | 107 | 26 | 40 | 55 | 12 |
| 3842 | 49 | 12 | 81 | 55 | 45 |
| 3843 | 90 | 124 | 44 | 25 | 5 |
| 3844 | 15 | 18 | 38 | 41 | 64 |
| 3845 | 55 | 69 | 41 | 81 | 12 |
| 3846 | 12 | 36 | 23 | 41 | 103 |
| 3847 | 21 | 9 | 12 | 75 | 2 |
| 3848 | 18 | 25 | 49 | 60 | 3 |
| 3849 | 55 | 50 | 107 | 12 | 84 |
| 3850 | 56 | 61 | 12 | 70 | 72 |
| 3851 | 38 | 52 | 62 | 59 | 78 |
| 3852 | 8 | 45 | 23 | 34 | 124 |
| 3853 | 3 | 25 | 76 | 74 | 10 |
| 3854 | 124 | 39 | 30 | 16 | 49 |
| 3855 | 38 | 45 | 82 | 11 | 67 |
| 3856 | 121 | 16 | 12 | 18 | 35 |
| 3857 | 112 | 55 | 58 | 12 | 47 |
| 3858 | 118 | 61 | 121 | 55 | 3 |
| 3859 | 69 | 121 | 84 | 107 | 55 |
| 3860 | 44 | 91 | 64 | 88 | 21 |
| 3861 | 121 | 63 | 2 | 22 | 124 |
| 3862 | 41 | 85 | 87 | 49 | 83 |
| 3863 | 127 | 76 | 3 | 15 | 25 |
| 3864 | 121 | 12 | 115 | 34 | 19 |
| 3865 | 76 | 57 | 25 | 91 | 12 |
| 3866 | 30 | 55 | 34 | 127 | 107 |
| 3867 | 45 | 8 | 25 | 24 | 22 |
| 3868 | 12 | 115 | 67 | 41 | 53 |
| 3869 | 32 | 1 | 78 | 57 | 109 |
| 3870 | 35 | 17 | 56 | 47 | 12 |
| 3871 | 64 | 89 | 54 | 91 | 66 |
| 3872 | 88 | 66 | 63 | 57 | 39 |
| 3873 | 107 | 121 | 81 | 58 | 72 |
| 3874 | 34 | 124 | 12 | 87 | 22 |
| 3875 | 32 | 124 | 45 | 41 | 70 |
| 3876 | 12 | 124 | 59 | 67 | 91 |
| 3877 | 36 | 109 | 112 | 121 | 23 |
| 3878 | 32 | 53 | 38 | 61 | 1 |
| 3879 | 5 | 130 | 10 | 121 | 18 |
| 3880 | 55 | 124 | 45 | 24 | 12 |
| 3881 | 112 | 88 | 13 | 42 | 17 |
| 3882 | 124 | 91 | 130 | 64 | 5 |
| 3883 | 12 | 77 | 84 | 62 | 9 |
| 3884 | 22 | 15 | 75 | 72 | 124 |
| 3885 | 12 | 38 | 115 | 64 | 16 |
| 3886 | 90 | 60 | 54 | 112 | 14 |
| 3887 | 2 | 130 | 53 | 12 | 84 |
| 3888 | 83 | 50 | 112 | 38 | 33 |
| 3889 | 14 | 103 | 4 | 83 | 43 |
| 3890 | 12 | 91 | 124 | 49 | 69 |
| 3891 | 80 | 55 | 12 | 84 | 82 |
| 3892 | 12 | 45 | 68 | 118 | 3 |
| 3893 | 41 | 24 | 3 | 35 | 34 |
| 3894 | 25 | 12 | 41 | 4 | 91 |
| 3895 | 58 | 82 | 85 | 3 | 34 |
| 3896 | 47 | 12 | 2 | 39 | 7 |
| 3897 | 45 | 55 | 52 | 34 | 69 |
| 3898 | 12 | 67 | 53 | 61 | 40 |
| 3899 | 24 | 47 | 31 | 19 | 25 |
| 3900 | 41 | 112 | 12 | 87 | 25 |
| 3901 | 24 | 12 | 73 | 45 | 56 |
| 3902 | 12 | 133 | 3 | 2 | 34 |
| 3903 | 86 | 124 | 5 | 91 | 41 |
| 3904 | 35 | 127 | 17 | 55 | 91 |
| 3905 | 112 | 65 | 78 | 15 | 87 |
| 3906 | 49 | 10 | 21 | 9 | 12 |
| 3907 | 58 | 49 | 35 | 133 | 121 |
| 3908 | 30 | 124 | 42 | 87 | 121 |
| 3909 | 12 | 45 | 60 | 39 | 66 |
| 3910 | 22 | 72 | 121 | 14 | 35 |
| 3911 | 19 | 17 | 67 | 61 | 12 |
| 3912 | 22 | 31 | 80 | 38 | 50 |
| 3913 | 32 | 124 | 34 | 12 | 76 |
| 3914 | 30 | 5 | 22 | 124 | 89 |
| 3915 | 34 | 45 | 60 | 124 | 24 |
| 3916 | 10 | 83 | 3 | 121 | 68 |
| 3917 | 5 | 40 | 127 | 78 | 91 |
| 3918 | 68 | 39 | 124 | 45 | 24 |
| 3919 | 54 | 75 | 31 | 35 | 32 |
| 3920 | 38 | 34 | 12 | 5 | 78 |
| 3921 | 54 | 29 | 55 | 12 | 57 |
| 3922 | 55 | 8 | 12 | 73 | 27 |
| 3923 | 46 | 112 | 5 | 55 | 78 |
| 3924 | 10 | 83 | 121 | 52 | 24 |
| 3925 | 12 | 107 | 69 | 17 | 57 |
| 3926 | 12 | 7 | 65 | 35 | 67 |
| 3927 | 31 | 78 | 12 | 109 | 67 |
| 3928 | 49 | 124 | 60 | 85 | 55 |
| 3929 | 28 | 4 | 41 | 107 | 12 |
| 3930 | 121 | 54 | 50 | 2 | 12 |
| 3931 | 45 | 124 | 29 | 115 | 53 |
| 3932 | 55 | 33 | 12 | 59 | 38 |
| 3933 | 12 | 66 | 133 | 25 | 46 |
| 3934 | 60 | 112 | 45 | 29 | 49 |
| 3935 | 32 | 83 | 124 | 81 | 45 |
| 3936 | 61 | 68 | 64 | 24 | 112 |
| 3937 | 76 | 33 | 29 | 12 | 24 |
| 3938 | 7 | 11 | 63 | 3 | 12 |
| 3939 | 1 | 21 | 77 | 58 | 16 |
| 3940 | 12 | 25 | 33 | 55 | 26 |
| 3941 | 17 | 89 | 112 | 55 | 44 |
| 3942 | 25 | 1 | 3 | 38 | 87 |
| 3943 | 12 | 40 | 121 | 52 | 77 |
| 3944 | 38 | 34 | 32 | 7 | 1 |
| 3945 | 91 | 69 | 58 | 81 | 45 |
| 3946 | 124 | 25 | 18 | 22 | 24 |
| 3947 | 83 | 16 | 57 | 2 | 127 |
| 3948 | 59 | 78 | 12 | 41 | 36 |
| 3949 | 12 | 24 | 45 | 64 | 35 |
| 3950 | 120 | 10 | 3 | 38 | 13 |
| 3951 | 12 | 3 | 37 | 70 | 15 |
| 3952 | 112 | 63 | 80 | 45 | 91 |
| 3953 | 54 | 1 | 121 | 38 | 90 |
| 3954 | 112 | 75 | 22 | 29 | 45 |
| 3955 | 38 | 71 | 42 | 1 | 45 |
| 3956 | 41 | 2 | 103 | 12 | 88 |
| 3957 | 86 | 5 | 112 | 133 | 45 |
| 3958 | 112 | 60 | 16 | 124 | 54 |
| 3959 | 73 | 22 | 78 | 61 | 130 |
| 3960 | 107 | 67 | 45 | 34 | 12 |
| 3961 | 81 | 112 | 45 | 89 | 88 |
| 3962 | 61 | 43 | 31 | 28 | 124 |

TABLE 4

| 1st Signature | 2nd Signature | 3rd Signature |
|---|---|---|
| of 8 | of 8 | of 8 |
| (Seq. Numbers) | (Seq. Numbers) | (Seq. Numbers) |
| 3 | 197 | 6 |
| 36 | 55 | 156 |
| 112 | 4 | 137 |
| 34 | 33 | 123 |
| 2 | 145 | 58 |
| 1 | 112 | 44 |
| 12 | 173 | 19 |
| 35 | 12 | 100 |

TABLE 5

| 1st Signature | 2nd Signature | 3rd Signature |
|---|---|---|
| of 30 | of 30 | of 30 |
| (Seq. Numbers) | (Seq. Numbers) | (Seq. Numbers) |
| 112 | 111 | 113 |
| 2 | 32 | 112 |
| 3 | 132 | 25 |
| 1 | 149 | 26 |
| 12 | 114 | 152 |
| 34 | 56 | 57 |
| 35 | 41 | 40 |
| 36 | 54 | 133 |
| 5 | 46 | 127 |
| 7 | 86 | 31 |
| 115 | 113 | 119 |
| 37 | 83 | 134 |
| 14 | 69 | 161 |
| 118 | 76 | 182 |
| 121 | 5 | 138 |
| 8 | 175 | 141 |
| 15 | 165 | 162 |
| 10 | 99 | 124 |
| 127 | 197 | 143 |
| 39 | 16 | 35 |
| 17 | 55 | 74 |
| 9 | 45 | 160 |
| 18 | 202 | 66 |
| 124 | 103 | 101 |
| 38 | 60 | 96 |
| 4 | 44 | 62 |
| 40 | 78 | 78 |
| 19 | 117 | 169 |
| 20 | 31 | 137 |
| 130 | 176 | 197 |

TABLE 6

| 1st Signature of 60 | 2nd Signature of 60 | 3rd Signature of 60 |
|---|---|---|
| (Seq. Numbers) | (Seq. Numbers) | (Seq. Numbers) |
| 6 | 104 | 172 |
| 43 | 65 | 121 |
| 27 | 30 | 35 |
| 16 | 53 | 72 |
| 115 | 173 | 159 |
| 24 | 189 | 190 |
| 17 | 16 | 162 |
| 19 | 92 | 86 |
| 133 | 82 | 77 |
| 14 | 7 | 147 |
| 12 | 22 | 157 |
| 18 | 193 | 182 |
| 30 | 164 | 188 |
| 9 | 33 | 155 |
| 121 | 160 | 63 |
| 8 | 188 | 146 |
| 21 | 48 | 151 |
| 107 | 98 | 7 |
| 58 | 192 | 137 |
| 41 | 43 | 15 |
| 46 | 13 | 88 |
| 57 | 156 | 148 |
| 40 | 41 | 105 |
| 35 | 133 | 83 |
| 11 | 57 | 142 |
| 45 | 70 | 169 |
| 7 | 117 | 174 |
| 31 | 180 | 25 |
| 34 | 185 | 114 |
| 20 | 158 | 24 |
| 38 | 83 | 32 |
| 5 | 62 | 14 |
| 32 | 165 | 166 |
| 47 | 195 | 92 |
| 33 | 149 | 180 |
| 50 | 11 | 2 |
| 124 | 126 | 13 |
| 26 | 59 | 191 |
| 22 | 116 | 51 |
| 36 | 184 | 81 |
| 4 | 94 | 104 |
| 127 | 27 | 179 |
| 49 | 42 | 176 |
| 3 | 128 | 173 |
| 39 | 71 | 189 |
| 130 | 190 | 19 |
| 44 | 31 | 50 |
| 13 | 114 | 194 |
| 25 | 36 | 101 |
| 28 | 3 | 115 |
| 10 | 5 | 130 |
| 29 | 196 | 133 |
| 23 | 140 | 73 |
| 1 | 49 | 94 |
| 42 | 159 | 79 |
| 37 | 191 | 178 |
| 2 | 86 | 91 |
| 118 | 139 | 202 |
| 15 | 171 | 37 |
| 112 | 138 | 10 |

TABLE 7

| 1st Signature of 102 | 2nd Signature of 102 | 3rd Signature of 102 |
|---|---|---|
| (Seq. Numbers) | (Seq. Numbers) | (Seq. Numbers) |
| 91 | 2 | 141 |
| 67 | 110 | 45 |
| 6 | 181 | 62 |
| 84 | 113 | 95 |
| 9 | 174 | 69 |
| 8 | 13 | 147 |
| 19 | 83 | 192 |
| 10 | 91 | 134 |
| 130 | 168 | 10 |
| 71 | 103 | 119 |
| 89 | 185 | 53 |
| 59 | 128 | 12 |
| 124 | 49 | 124 |
| 16 | 41 | 197 |
| 112 | 28 | 153 |
| 52 | 26 | 186 |
| 93 | 167 | 170 |
| 72 | 202 | 83 |
| 26 | 120 | 8 |
| 22 | 124 | 157 |
| 24 | 191 | 122 |
| 34 | 121 | 150 |
| 86 | 19 | 162 |
| 14 | 11 | 5 |
| 1 | 84 | 187 |
| 3 | 99 | 130 |
| 76 | 104 | 84 |
| 15 | 27 | 195 |
| 37 | 151 | 129 |
| 120 | 6 | 120 |
| 2 | 161 | 47 |
| 133 | 187 | 36 |
| 83 | 12 | 201 |
| 12 | 17 | 123 |
| 53 | 42 | 23 |
| 78 | 170 | 149 |
| 77 | 111 | 118 |
| 69 | 117 | 140 |
| 60 | 60 | 156 |
| 74 | 25 | 161 |
| 36 | 190 | 185 |
| 68 | 149 | 160 |
| 88 | 86 | 98 |
| 17 | 178 | 58 |
| 127 | 93 | 59 |
| 61 | 141 | 103 |
| 121 | 85 | 51 |
| 65 | 1 | 142 |
| 81 | 195 | 22 |
| 64 | 129 | 171 |
| 80 | 101 | 11 |
| 50 | 108 | 70 |
| 46 | 48 | 64 |
| 107 | 112 | 176 |
| 87 | 142 | 6 |
| 56 | 173 | 16 |
| 25 | 47 | 108 |
| 42 | 189 | 55 |
| 54 | 43 | 1 |
| 90 | 132 | 152 |
| 57 | 53 | 30 |
| 62 | 55 | 7 |
| 5 | 127 | 77 |
| 55 | 39 | 190 |
| 4 | 87 | 86 |
| 13 | 123 | 183 |
| 21 | 166 | 14 |
| 18 | 3 | 35 |
| 43 | 81 | 42 |
| 66 | 94 | 199 |
| 44 | 56 | 146 |
| 32 | 165 | 105 |
| 70 | 62 | 34 |
| 20 | 50 | 114 |
| 47 | 97 | 87 |
| 33 | 89 | 33 |
| 115 | 21 | 31 |
| 94 | 34 | 76 |
| 23 | 145 | 27 |
| 29 | 131 | 17 |
| 35 | 61 | 169 |
| 75 | 182 | 110 |
| 28 | 51 | 154 |
| 85 | 5 | 166 |
| 118 | 177 | 163 |
| 30 | 152 | 198 |
| 82 | 159 | 112 |
| 49 | 63 | 68 |
| 31 | 158 | 91 |
| 73 | 76 | 132 |
| 63 | 70 | 167 |
| 58 | 52 | 131 |
| 7 | 126 | 2 |
| 40 | 138 | 80 |
| 103 | 95 | 60 |
| 27 | 66 | 44 |
| 45 | 196 | 94 |
| 109 | 200 | 180 |
| 41 | 40 | 65 |
| 11 | 144 | 196 |
| 38 | 24 | 89 |
| 39 | 44 | 102 |

TABLE 8

| 1st Signature of 202 | 2nd Signature of 202 | 3rd Signature of 202 |
|---|---|---|
| (Seq. Numbers) | (Seq. Numbers) | (Seq. Numbers) |
| 24 | 1461 | 1575 |
| 123 | 1589 | 1348 |
| 21 | 1995 | 931 |
| 142 | 1983 | 1184 |
| 17 | 612 | 1549 |
| 183 | 1710 | 1263 |
| 47 | 1024 | 733 |
| 178 | 1544 | 786 |
| 144 | 956 | 1677 |
| 109 | 1740 | 102 |
| 105 | 1718 | 892 |
| 69 | 1979 | 79 |
| 67 | 911 | 1592 |
| 181 | 1560 | 1147 |
| 172 | 90 | 184 |
| 79 | 1454 | 1116 |
| 100 | 568 | 1420 |
| 191 | 1365 | 668 |
| 162 | 1008 | 828 |
| 52 | 1190 | 158 |
| 35 | 102 | 250 |
| 51 | 1854 | 1073 |
| 63 | 1494 | 286 |
| 72 | 1947 | 1563 |
| 188 | 1364 | 30 |
| 133 | 1105 | 1727 |
| 66 | 1649 | 964 |
| 97 | 1480 | 1912 |
| 110 | 1103 | 662 |
| 68 | 762 | 207 |
| 150 | 1741 | 1123 |
| 159 | 594 | 238 |
| 99 | 355 | 367 |
| 116 | 1303 | 1502 |
| 46 | 889 | 1086 |
| 16 | 896 | 183 |
| 161 | 926 | 579 |
| 195 | 1711 | 1271 |
| 160 | 601 | 476 |
| 74 | 763 | 1619 |
| 149 | 261 | 1975 |
| 27 | 268 | 382 |
| 134 | 1825 | 1726 |
| 2 | 591 | 85 |
| 30 | 606 | 1882 |
| 194 | 868 | 1832 |
| 42 | 1756 | 918 |
| 201 | 501 | 835 |
| 196 | 643 | 817 |
| 71 | 1588 | 1337 |
| 34 | 1679 | 39 |
| 124 | 1607 | 1626 |
| 190 | 905 | 1095 |
| 192 | 788 | 210 |
| 38 | 1647 | 792 |
| 169 | 1210 | 1860 |
| 125 | 1930 | 1245 |
| 80 | 1788 | 80 |
| 136 | 1646 | 1946 |
| 128 | 1416 | 1107 |
| 141 | 1793 | 590 |
| 78 | 1893 | 1611 |
| 146 | 1107 | 1468 |
| 95 | 1195 | 1200 |
| 6 | 1582 | 44 |
| 77 | 1859 | 1276 |
| 115 | 1830 | 242 |
| 113 | 1644 | 909 |
| 174 | 646 | 1043 |
| 166 | 1315 | 793 |
| 103 | 523 | 1360 |
| 19 | 132 | 1308 |
| 39 | 184 | 734 |
| 130 | 724 | 1579 |
| 60 | 412 | 840 |
| 120 | 216 | 112 |
| 119 | 1703 | 1552 |
| 137 | 1769 | 1637 |
| 148 | 988 | 217 |
| 32 | 689 | 1945 |
| 131 | 117 | 47 |
| 25 | 893 | 1664 |
| 167 | 1071 | 72 |
| 85 | 1036 | 762 |
| 49 | 42 | 1079 |
| 57 | 1060 | 1092 |
| 59 | 1778 | 1831 |
| 197 | 570 | 569 |
| 186 | 234 | 1040 |
| 86 | 1517 | 738 |
| 156 | 506 | 1513 |
| 53 | 1988 | 1560 |
| 29 | 460 | 1849 |
| 126 | 623 | 202 |
| 129 | 687 | 879 |
| 84 | 1720 | 1411 |
| 94 | 1477 | 168 |
| 36 | 1563 | 259 |
| 83 | 126 | 921 |
| 23 | 1482 | 956 |
| 121 | 196 | 832 |
| 14 | 1502 | 1721 |
| 40 | 1602 | 199 |
| 81 | 1163 | 852 |
| 101 | 669 | 84 |
| 104 | 1580 | 1925 |
| 151 | 1613 | 826 |
| 147 | 1409 | 1476 |
| 112 | 1167 | 784 |
| 175 | 1561 | 887 |
| 189 | 94 | 612 |
| 43 | 843 | 302 |
| 4 | 595 | 1750 |
| 199 | 810 | 723 |
| 45 | 986 | 69 |
| 90 | 711 | 837 |
| 179 | 1191 | 1427 |
| 158 | 894 | 1480 |
| 139 | 288 | 1032 |
| 11 | 848 | 288 |
| 143 | 1501 | 707 |
| 184 | 1907 | 1701 |
| 5 | 1093 | 100 |
| 62 | 921 | 293 |
| 82 | 1336 | 1400 |
| 198 | 1276 | 929 |
| 56 | 1302 | 1817 |
| 135 | 1432 | 1084 |
| 153 | 645 | 1569 |
| 171 | 198 | 1172 |
| 140 | 163 | 1538 |
| 13 | 1182 | 1544 |
| 10 | 1267 | 536 |
| 102 | 1987 | 1685 |
| 48 | 1201 | 692 |
| 164 | 1635 | 1973 |
| 187 | 891 | 1440 |
| 89 | 492 | 509 |
| 44 | 1343 | 1663 |
| 138 | 1656 | 208 |
| 154 | 1154 | 1029 |
| 91 | 383 | 463 |
| 152 | 1225 | 1988 |
| 180 | 1801 | 287 |
| 176 | 1305 | 22 |
| 12 | 546 | 1757 |
| 132 | 80 | 561 |
| 88 | 1617 | 605 |
| 20 | 1578 | 1852 |
| 127 | 819 | 812 |
| 76 | 1850 | 1906 |
| 31 | 1570 | 27 |
| 3 | 337 | 362 |
| 1 | 1844 | 1673 |
| 122 | 433 | 1806 |
| 55 | 1241 | 1161 |
| 107 | 866 | 1871 |
| 114 | 811 | 1928 |
| 28 | 279 | 1436 |
| 170 | 1142 | 1671 |
| 168 | 1790 | 474 |
| 108 | 1664 | 1753 |
| 61 | 1966 | 1740 |
| 111 | 1980 | 1371 |
| 145 | 691 | 1361 |
| 200 | 1796 | 1848 |
| 64 | 299 | 1296 |
| 75 | 1506 | 500 |
| 70 | 671 | 1469 |
| 73 | 1942 | 1805 |
| 92 | 1137 | 1114 |
| 7 | 1475 | 308 |
| 93 | 1220 | 270 |
| 177 | 264 | 1085 |
| 33 | 267 | 1459 |
| 117 | 500 | 306 |
| 118 | 1471 | 1193 |
| 9 | 1232 | 101 |
| 41 | 620 | 960 |
| 155 | 660 | 126 |
| 15 | 914 | 345 |
| 173 | 1109 | 693 |
| 98 | 664 | 1605 |
| 165 | 1228 | 923 |
| 185 | 448 | 459 |
| 8 | 1672 | 969 |
| 18 | 152 | 1118 |
| 202 | 69 | 839 |
| 106 | 217 | 161 |
| 37 | 62 | 572 |
| 96 | 190 | 896 |
| 26 | 865 | 1418 |
| 182 | 1700 | 1499 |
| 65 | 944 | 1311 |
| 193 | 1880 | 518 |
| 54 | 884 | 106 |
| 163 | 1393 | 73 |
| 22 | 491 | 1652 |
| 87 | 1384 | 1937 |
| 58 | 1006 | 702 |
| 157 | 654 | 256 |
| 50 | 857 | 493 |

TABLE 9

| 1st Signature of | 2nd Signature of | 3rd Signature of |
|---|---|---|
| 502 (Seq. Numbers) | 502 (Seq. Numbers) | 502 (Seq. Numbers) |
| 345 | 129 | 849 |
| 100 | 1571 | 894 |
| 433 | 869 | 1001 |
| 209 | 158 | 422 |
| 242 | 781 | 876 |
| 443 | 451 | 1755 |
| 389 | 1195 | 1267 |
| 86 | 44 | 1589 |
| 240 | 1656 | 1570 |
| 201 | 693 | 75 |
| 214 | 741 | 1332 |
| 7 | 454 | 380 |
| 200 | 1043 | 93 |
| 97 | 1815 | 381 |
| 133 | 1871 | 329 |
| 132 | 1892 | 35 |
| 207 | 1151 | 1411 |
| 318 | 615 | 1866 |
| 429 | 1351 | 1885 |
| 283 | 1 | 1266 |
| 194 | 215 | 853 |
| 449 | 1181 | 1800 |
| 333 | 35 | 738 |
| 256 | 628 | 975 |
| 384 | 252 | 1367 |
| 468 | 504 | 708 |
| 3 | 1986 | 391 |
| 404 | 1028 | 229 |
| 231 | 713 | 1382 |
| 267 | 1121 | 20 |
| 153 | 481 | 1994 |
| 167 | 241 | 1058 |
| 62 | 1854 | 435 |
| 325 | 1613 | 616 |
| 397 | 1984 | 1546 |
| 154 | 304 | 776 |
| 4 | 1977 | 1379 |
| 348 | 603 | 759 |
| 402 | 1622 | 274 |
| 280 | 1224 | 1306 |
| 478 | 1576 | 49 |
| 386 | 976 | 958 |
| 305 | 1343 | 396 |
| 269 | 1992 | 1249 |
| 176 | 634 | 681 |
| 420 | 538 | 1978 |
| 395 | 249 | 1453 |
| 156 | 1414 | 830 |
| 112 | 1943 | 558 |
| 220 | 550 | 230 |
| 56 | 775 | 1943 |
| 391 | 1924 | 1401 |
| 494 | 1577 | 1108 |
| 174 | 765 | 413 |
| 29 | 1268 | 579 |
| 42 | 1985 | 207 |
| 158 | 545 | 798 |
| 434 | 470 | 1234 |
| 481 | 703 | 1431 |
| 409 | 824 | 899 |
| 57 | 355 | 1949 |
| 173 | 747 | 192 |
| 441 | 1817 | 1920 |
| 405 | 96 | 338 |
| 55 | 768 | 237 |
| 455 | 460 | 1636 |
| 265 | 1748 | 383 |
| 259 | 188 | 660 |
| 309 | 166 | 1451 |
| 189 | 350 | 999 |
| 359 | 1732 | 1780 |
| 342 | 1799 | 1220 |
| 351 | 1216 | 1606 |
| 224 | 1551 | 461 |
| 222 | 508 | 1122 |
| 290 | 1822 | 731 |
| 285 | 1775 | 1604 |
| 211 | 1545 | 225 |
| 341 | 1671 | 1758 |
| 123 | 1573 | 801 |
| 302 | 1659 | 944 |
| 358 | 1274 | 1870 |
| 336 | 1187 | 1812 |
| 202 | 238 | 453 |
| 473 | 1723 | 247 |
| 263 | 344 | 1211 |
| 470 | 1421 | 122 |
| 294 | 744 | 1543 |
| 170 | 771 | 511 |
| 91 | 1176 | 741 |
| 250 | 1135 | 1205 |
| 428 | 1567 | 789 |
| 185 | 1044 | 240 |
| 136 | 525 | 1349 |
| 366 | 160 | 488 |
| 59 | 258 | 1841 |
| 464 | 1017 | 394 |
| 374 | 873 | 78 |
| 311 | 1278 | 277 |
| 88 | 1607 | 61 |
| 163 | 1260 | 249 |
| 251 | 829 | 1687 |
| 377 | 928 | 479 |
| 84 | 207 | 178 |
| 94 | 621 | 831 |
| 281 | 1426 | 935 |
| 439 | 660 | 1525 |
| 205 | 1488 | 281 |
| 186 | 920 | 536 |
| 368 | 1532 | 1959 |
| 119 | 1674 | 86 |
| 344 | 1534 | 341 |
| 360 | 917 | 922 |
| 394 | 1578 | 1457 |
| 101 | 1635 | 1097 |
| 36 | 810 | 983 |
| 81 | 1409 | 79 |
| 74 | 1502 | 1679 |
| 288 | 1120 | 1684 |
| 254 | 1425 | 1685 |
| 146 | 1077 | 907 |
| 381 | 850 | 724 |
| 438 | 1749 | 575 |
| 253 | 1504 | 1163 |
| 166 | 1680 | 733 |
| 295 | 1016 | 845 |
| 140 | 1717 | 756 |
| 248 | 1331 | 1415 |
| 491 | 1400 | 1868 |
| 53 | 731 | 1988 |
| 20 | 193 | 1437 |
| 22 | 953 | 148 |
| 485 | 1386 | 1405 |
| 229 | 244 | 1849 |
| 490 | 1993 | 1140 |
| 327 | 854 | 966 |
| 212 | 1023 | 87 |
| 261 | 176 | 1124 |
| 273 | 1930 | 515 |
| 104 | 1439 | 950 |
| 371 | 1471 | 661 |
| 108 | 1649 | 1195 |
| 489 | 1171 | 1427 |
| 191 | 466 | 847 |
| 435 | 70 | 547 |
| 238 | 1310 | 1420 |
| 83 | 743 | 58 |
| 10 | 880 | 549 |
| 90 | 1404 | 248 |
| 145 | 9 | 1689 |
| 217 | 1099 | 825 |
| 24 | 1559 | 29 |
| 471 | 777 | 460 |
| 39 | 1599 | 1319 |
| 315 | 1832 | 1272 |
| 103 | 1728 | 44 |
| 249 | 1615 | 92 |
| 116 | 1416 | 1753 |
| 399 | 716 | 1068 |
| 180 | 269 | 1560 |
| 16 | 1474 | 726 |
| 356 | 1926 | 1389 |
| 298 | 1071 | 608 |
| 246 | 56 | 1024 |
| 219 | 361 | 1773 |
| 301 | 1436 | 1031 |
| 390 | 760 | 1506 |
| 14 | 1284 | 560 |
| 114 | 1484 | 1595 |
| 21 | 957 | 1692 |
| 422 | 364 | 1498 |
| 241 | 718 | 1975 |
| 245 | 203 | 890 |
| 44 | 1536 | 388 |
| 462 | 1095 | 370 |
| 486 | 1307 | 1542 |
| 286 | 1348 | 81 |
| 225 | 359 | 531 |
| 138 | 1910 | 201 |
| 488 | 715 | 1783 |
| 213 | 1376 | 971 |
| 437 | 730 | 1051 |
| 314 | 1709 | 1069 |
| 480 | 308 | 241 |
| 376 | 1540 | 1123 |
| 106 | 1827 | 1651 |
| 467 | 951 | 15 |
| 339 | 991 | 1731 |
| 46 | 342 | 1702 |
| 192 | 673 | 299 |
| 98 | 1581 | 1534 |
| 31 | 73 | 43 |
| 457 | 1129 | 1527 |
| 472 | 820 | 711 |
| 218 | 366 | 301 |
| 47 | 418 | 994 |
| 255 | 955 | 1831 |
| 357 | 1952 | 63 |
| 5 | 680 | 1283 |
| 493 | 1761 | 1341 |
| 331 | 1882 | 1 |
| 372 | 1185 | 1732 |
| 150 | 202 | 1372 |
| 49 | 859 | 200 |
| 496 | 275 | 188 |
| 316 | 1535 | 1608 |
| 183 | 31 | 494 |
| 444 | 1236 | 904 |
| 135 | 111 | 1399 |
| 160 | 417 | 737 |
| 40 | 1383 | 1250 |
| 459 | 1572 | 1933 |
| 260 | 1569 | 897 |
| 23 | 1242 | 407 |
| 8 | 1694 | 1611 |
| 466 | 1719 | 1273 |
| 304 | 1440 | 810 |
| 38 | 609 | 640 |
| 451 | 1711 | 395 |
| 416 | 949 | 1940 |
| 234 | 1565 | 1520 |
| 323 | 1905 | 374 |
| 482 | 245 | 1568 |
| 120 | 1087 | 34 |
| 447 | 1902 | 1299 |
| 13 | 48 | 399 |
| 232 | 29 | 1587 |
| 247 | 457 | 1854 |
| 296 | 1768 | 1893 |
| 143 | 857 | 1865 |
| 19 | 595 | 1366 |
| 495 | 878 | 1629 |
| 292 | 1373 | 1216 |
| 442 | 294 | 194 |
| 190 | 1625 | 1072 |
| 155 | 1152 | 9 |
| 383 | 142 | 678 |
| 271 | 1948 | 1918 |
| 175 | 734 | 33 |
| 181 | 1864 | 1955 |
| 287 | 580 | 1322 |
| 326 | 92 | 1533 |
| 162 | 288 | 508 |
| 64 | 664 | 1377 |
| 354 | 1459 | 739 |
| 385 | 1406 | 821 |
| 236 | 707 | 204 |
| 425 | 240 | 1226 |
| 362 | 996 | 1485 |
| 102 | 788 | 1561 |
| 35 | 1040 | 1709 |
| 96 | 598 | 183 |
| 310 | 316 | 1114 |
| 148 | 483 | 1603 |
| 198 | 266 | 1043 |
| 199 | 1681 | 1938 |
| 61 | 1750 | 1899 |
| 450 | 178 | 719 |
| 177 | 601 | 195 |
| 141 | 1995 | 993 |
| 453 | 1198 | 506 |
| 364 | 1402 | 1798 |
| 378 | 169 | 1913 |
| 363 | 1647 | 1084 |
| 289 | 1514 | 790 |
| 408 | 1486 | 1529 |
| 303 | 254 | 641 |
| 353 | 1533 | 1384 |
| 87 | 1403 | 111 |
| 230 | 1912 | 1421 |
| 452 | 441 | 609 |
| 367 | 1063 | 826 |
| 77 | 247 | 1301 |
| 475 | 1228 | 705 |
| 37 | 1467 | 251 |
| 204 | 815 | 873 |
| 244 | 295 | 206 |
| 206 | 1204 | 1200 |
| 27 | 736 | 1750 |
| 393 | 1470 | 412 |
| 178 | 565 | 365 |
| 275 | 1223 | 1809 |
| 195 | 1205 | 371 |
| 317 | 1787 | 1653 |
| 398 | 436 | 1760 |
| 461 | 494 | 1009 |
| 122 | 174 | 920 |
| 28 | 905 | 234 |
| 272 | 1876 | 765 |
| 321 | 1287 | 1614 |
| 308 | 433 | 900 |
| 300 | 1006 | 764 |
| 95 | 737 | 1363 |
| 375 | 1112 | 1152 |
| 50 | 925 | 175 |
| 456 | 529 | 131 |
| 9 | 732 | 755 |
| 330 | 15 | 680 |
| 346 | 704 | 1333 |
| 396 | 157 | 990 |
| 369 | 447 | 121 |
| 117 | 1013 | 1047 |
| 350 | 864 | 658 |
| 15 | 870 | 1221 |
| 312 | 1315 | 243 |
| 165 | 105 | 427 |
| 157 | 1010 | 1622 |
| 431 | 189 | 576 |
| 349 | 790 | 592 |
| 105 | 402 | 815 |
| 75 | 1633 | 835 |
| 184 | 584 | 805 |
| 412 | 1873 | 5 |
| 89 | 121 | 924 |
| 299 | 1726 | 1386 |
| 152 | 1690 | 1768 |
| 32 | 1756 | 308 |
| 329 | 1143 | 688 |
| 338 | 992 | 501 |
| 60 | 1250 | 1777 |
| 18 | 1293 | 172 |
| 401 | 1672 | 1116 |
| 276 | 1883 | 1867 |
| 474 | 733 | 1821 |
| 76 | 474 | 1710 |
| 418 | 1357 | 1521 |
| 115 | 1816 | 843 |
| 469 | 984 | 1243 |
| 52 | 186 | 813 |
| 379 | 973 | 179 |
| 151 | 235 | 141 |
| 274 | 1134 | 721 |
| 2 | 735 | 101 |
| 463 | 990 | 1716 |
| 458 | 1084 | 1408 |
| 208 | 383 | 614 |
| 11 | 1190 | 735 |
| 79 | 1721 | 349 |
| 387 | 1029 | 1837 |
| 128 | 1391 | 1153 |
| 137 | 1098 | 1696 |
| 297 | 1014 | 1953 |
| 25 | 757 | 164 |
| 72 | 332 | 357 |
| 111 | 1012 | 1413 |
| 484 | 587 | 38 |
| 266 | 1452 | 62 |
| 110 | 977 | 513 |
| 403 | 499 | 1659 |
| 168 | 216 | 1675 |
| 71 | 213 | 153 |
| 80 | 659 | 212 |
| 216 | 758 | 1450 |
| 121 | 257 | 1874 |
| 479 | 623 | 1713 |
| 347 | 1485 | 1061 |
| 125 | 1554 | 1476 |
| 268 | 576 | 1721 |
| 93 | 1030 | 1605 |
| 164 | 1598 | 1736 |
| 66 | 1061 | 529 |
| 291 | 1784 | 90 |
| 502 | 1221 | 1168 |
| 270 | 59 | 1142 |
| 124 | 1267 | 1537 |
| 293 | 1627 | 620 |
| 448 | 1167 | 354 |
| 30 | 1157 | 1785 |
| 179 | 1007 | 811 |
| 233 | 591 | 156 |
| 239 | 1410 | 1202 |
| 58 | 701 | 1580 |
| 427 | 1463 | 134 |
| 63 | 171 | 593 |
| 171 | 594 | 858 |
| 69 | 1442 | 37 |
| 262 | 389 | 1610 |
| 258 | 1950 | 1470 |
| 221 | 1309 | 1315 |
| 352 | 756 | 335 |
| 306 | 589 | 519 |
| 324 | 813 | 1392 |
| 139 | 568 | 1088 |
| 277 | 1270 | 408 |
| 48 | 1318 | 766 |
| 335 | 431 | 1164 |
| 284 | 1585 | 287 |
| 498 | 1430 | 54 |
| 392 | 838 | 934 |
| 370 | 1299 | 278 |
| 445 | 1371 | 986 |
| 361 | 513 | 441 |
| 432 | 872 | 1021 |
| 373 | 1294 | 1435 |
| 460 | 1149 | 123 |
| 82 | 162 | 60 |
| 107 | 785 | 152 |
| 334 | 1566 | 25 |
| 169 | 1037 | 1371 |
| 131 | 1263 | 1901 |
| 417 | 943 | 1335 |
| 426 | 1334 | 1942 |
| 113 | 1745 | 1027 |
| 188 | 1747 | 1906 |
| 487 | 1473 | 267 |
| 264 | 1097 | 1010 |
| 407 | 986 | 1158 |
| 446 | 1714 | 1083 |
| 67 | 1225 | 1182 |
| 1 | 888 | 76 |
| 365 | 1895 | 1230 |
| 17 | 1464 | 1667 |
| 380 | 1762 | 1463 |
| 85 | 323 | 216 |
| 127 | 1407 | 105 |
| 410 | 548 | 621 |
| 355 | 579 | 2001 |
| 109 | 195 | 1658 |
| 307 | 1328 | 313 |
| 282 | 1713 | 571 |
| 423 | 571 | 1248 |
| 33 | 1096 | 439 |
| 34 | 1378 | 914 |
| 413 | 627 | 1403 |
| 501 | 1262 | 1744 |
| 196 | 1973 | 927 |
| 465 | 739 | 1344 |
| 126 | 641 | 563 |
| 45 | 327 | 1412 |
| 322 | 453 | 1240 |
| 252 | 834 | 420 |
| 332 | 1468 | 629 |
| 454 | 670 | 442 |
| 235 | 518 | 213 |
| 278 | 309 | 1192 |
| 129 | 750 | 389 |
| 237 | 287 | 421 |
| 243 | 4 | 1254 |
| 436 | 1354 | 1235 |
| 411 | 1668 | 1241 |
| 134 | 1249 | 350 |
| 26 | 1940 | 970 |
| 415 | 1265 | 1535 |
| 421 | 1434 | 1699 |
| 78 | 893 | 1825 |
| 430 | 963 | 1828 |
| 92 | 684 | 977 |
| 210 | 1499 | 1416 |
| 424 | 378 | 1223 |
| 144 | 558 | 695 |
| 203 | 463 | 470 |
| 497 | 6 | 1447 |
| 400 | 766 | 310 |
| 228 | 619 | 1584 |
| 414 | 1918 | 312 |
| 382 | 632 | 880 |
| 130 | 980 | 502 |
| 257 | 742 | 864 |
| 388 | 432 | 1556 |
| 99 | 1483 | 342 |
| 215 | 546 | 1669 |
| 223 | 472 | 1966 |
| 343 | 421 | 174 |
| 6 | 230 | 487 |
| 51 | 438 | 1628 |
| 492 | 1132 | 648 |
| 500 | 1478 | 203 |
| 406 | 1291 | 1730 |
| 159 | 1907 | 1432 |
| 65 | 844 | 1956 |
| 328 | 1720 | 1930 |
| 319 | 1629 | 816 |
| 187 | 1501 | 1704 |
| 43 | 196 | 696 |
| 226 | 1011 | 823 |
| 118 | 1285 | 117 |
| 477 | 573 | 97 |
| 476 | 1300 | 431 |
| 142 | 1900 | 363 |
| 193 | 416 | 1574 |
| 172 | 1753 | 967 |
| 279 | 268 | 1137 |
| 197 | 1715 | 1862 |
| 340 | 1321 | 1718 |
| 73 | 133 | 544 |
| 149 | 840 | 1576 |
| 70 | 1826 | 1701 |
| 227 | 1489 | 67 |
| 419 | 1140 | 1062 |
| 147 | 1105 | 753 |
| 483 | 267 | 484 |
| 161 | 919 | 1139 |
| 182 | 1158 | 1186 |
| 68 | 170 | 541 |
| 499 | 581 | 1119 |
| 337 | 1757 | 1513 |
| 440 | 1481 | 1657 |
| 54 | 1651 | 1516 |
| 320 | 1050 | 1511 |
| 313 | 969 | 670 |
| 41 | 1173 | 1022 |
| 12 | 1465 | 140 |

TABLE 10

| 1st Signature of | 2nd Signature of | 3rd Signature of |
|---|---|---|
| 1002 (Seq. Numbers) | 1002 (Seq. Numbers) | 1002 (Seq. Numbers) |
| 378 | 2002 | 82 |
| 339 | 1375 | 1617 |
| 550 | 41 | 1424 |
| 211 | 30 | 509 |
| 186 | 784 | 674 |
| 163 | 1342 | 939 |
| 947 | 639 | 398 |
| 908 | 1887 | 797 |
| 58 | 1601 | 383 |
| 918 | 462 | 228 |
| 600 | 647 | 1107 |
| 771 | 1326 | 1564 |
| 853 | 343 | 930 |
| 203 | 1217 | 1266 |
| 887 | 476 | 954 |
| 329 | 1608 | 192 |
| 171 | 403 | 1010 |
| 714 | 1043 | 914 |
| 219 | 452 | 679 |
| 247 | 1833 | 1993 |
| 415 | 1278 | 304 |
| 510 | 882 | 1740 |
| 204 | 546 | 199 |
| 274 | 1259 | 1514 |
| 982 | 1322 | 1732 |
| 519 | 193 | 250 |
| 38 | 547 | 388 |
| 270 | 315 | 659 |
| 948 | 1028 | 980 |
| 566 | 1545 | 119 |
| 703 | 1984 | 1226 |
| 814 | 1873 | 728 |
| 953 | 302 | 597 |
| 761 | 43 | 140 |
| 745 | 1407 | 214 |
| 645 | 448 | 1726 |
| 7 | 1401 | 1287 |
| 197 | 933 | 1333 |
| 324 | 169 | 1546 |
| 605 | 492 | 694 |
| 2 | 176 | 469 |
| 650 | 1821 | 473 |
| 355 | 314 | 282 |
| 546 | 1307 | 1159 |
| 792 | 1674 | 71 |
| 677 | 1837 | 1277 |
| 672 | 1804 | 1891 |
| 540 | 685 | 1151 |
| 914 | 654 | 94 |
| 144 | 115 | 1737 |
| 958 | 1184 | 2000 |
| 725 | 1335 | 1889 |
| 813 | 6 | 668 |
| 308 | 1838 | 1724 |
| 327 | 509 | 1461 |
| 85 | 524 | 1954 |
| 636 | 1719 | 1000 |
| 213 | 846 | 822 |
| 978 | 561 | 128 |
| 973 | 1077 | 946 |
| 437 | 1775 | 1426 |
| 721 | 900 | 1023 |
| 659 | 1182 | 1836 |
| 222 | 71 | 1050 |
| 388 | 357 | 1675 |
| 949 | 436 | 1108 |
| 938 | 1660 | 1711 |
| 996 | 473 | 1967 |
| 466 | 1899 | 1295 |
| 915 | 481 | 224 |
| 142 | 1347 | 1753 |
| 712 | 1677 | 1904 |
| 248 | 719 | 796 |
| 90 | 562 | 1545 |
| 773 | 101 | 1695 |
| 842 | 989 | 1123 |
| 215 | 93 | 1196 |
| 414 | 155 | 849 |
| 903 | 648 | 1898 |
| 1002 | 2001 | 284 |
| 183 | 1770 | 1565 |
| 220 | 69 | 600 |
| 260 | 1723 | 1748 |
| 283 | 1145 | 582 |
| 839 | 56 | 895 |
| 601 | 1826 | 184 |
| 762 | 1558 | 1197 |
| 674 | 1078 | 357 |
| 528 | 1998 | 967 |
| 106 | 145 | 924 |
| 970 | 1109 | 778 |
| 525 | 1084 | 108 |
| 43 | 1475 | 380 |
| 912 | 1140 | 1798 |
| 532 | 51 | 1977 |
| 507 | 229 | 1821 |
| 104 | 151 | 1750 |
| 226 | 1598 | 78 |
| 644 | 995 | 1171 |
| 635 | 504 | 1053 |
| 517 | 1253 | 1587 |
| 473 | 1692 | 130 |
| 739 | 1822 | 1953 |
| 37 | 1370 | 230 |
| 322 | 485 | 775 |
| 425 | 928 | 837 |
| 45 | 1406 | 1589 |
| 782 | 1904 | 627 |
| 441 | 567 | 360 |
| 609 | 1305 | 735 |
| 374 | 531 | 1727 |
| 811 | 1292 | 593 |
| 656 | 458 | 548 |
| 64 | 925 | 1155 |
| 514 | 1069 | 1789 |
| 756 | 1035 | 1033 |
| 427 | 24 | 1894 |
| 255 | 1643 | 306 |
| 71 | 921 | 1097 |
| 679 | 203 | 932 |
| 237 | 1787 | 39 |
| 268 | 1374 | 792 |
| 602 | 807 | 1677 |
| 751 | 1112 | 897 |
| 124 | 1565 | 998 |
| 402 | 106 | 1304 |
| 874 | 1495 | 1290 |
| 191 | 415 | 750 |
| 864 | 764 | 55 |
| 927 | 1867 | 1989 |
| 976 | 1945 | 1561 |
| 22 | 328 | 1818 |
| 818 | 1213 | 151 |
| 738 | 1358 | 1188 |
| 909 | 1204 | 1691 |
| 208 | 548 | 1930 |
| 606 | 665 | 197 |
| 666 | 1289 | 1590 |
| 178 | 600 | 1345 |
| 740 | 1181 | 691 |
| 964 | 377 | 349 |
| 795 | 1154 | 417 |
| 486 | 306 | 1621 |
| 570 | 459 | 583 |
| 419 | 559 | 337 |
| 495 | 1798 | 1218 |
| 767 | 1701 | 331 |
| 832 | 1076 | 1190 |
| 733 | 118 | 387 |
| 92 | 1300 | 97 |
| 159 | 1615 | 923 |
| 522 | 820 | 1427 |
| 769 | 1953 | 243 |
| 453 | 1235 | 1688 |
| 597 | 1484 | 1781 |
| 265 | 1539 | 1510 |
| 776 | 255 | 662 |
| 135 | 1371 | 1416 |
| 176 | 55 | 1955 |
| 14 | 397 | 142 |
| 229 | 280 | 560 |
| 1 | 899 | 628 |
| 292 | 67 | 58 |
| 168 | 122 | 1602 |
| 120 | 1625 | 851 |
| 393 | 1714 | 688 |
| 831 | 1976 | 767 |
| 936 | 1271 | 1328 |
| 667 | 438 | 989 |
| 279 | 70 | 1853 |
| 430 | 164 | 1300 |
| 925 | 1386 | 1040 |
| 182 | 1214 | 1672 |
| 500 | 694 | 650 |
| 806 | 494 | 669 |
| 834 | 793 | 395 |
| 100 | 536 | 1915 |
| 190 | 296 | 579 |
| 93 | 868 | 1574 |
| 591 | 634 | 472 |
| 594 | 962 | 441 |
| 711 | 1823 | 1509 |
| 194 | 422 | 1386 |
| 944 | 1885 | 1743 |
| 790 | 966 | 1436 |
| 76 | 1679 | 16 |
| 520 | 1635 | 1692 |
| 364 | 1597 | 1940 |
| 287 | 1917 | 882 |
| 515 | 1814 | 445 |
| 21 | 373 | 233 |
| 698 | 874 | 48 |
| 429 | 1902 | 1974 |
| 560 | 400 | 311 |
| 166 | 1262 | 1648 |
| 306 | 1790 | 1348 |
| 57 | 1132 | 752 |
| 793 | 344 | 1083 |
| 152 | 294 | 277 |
| 258 | 794 | 690 |
| 325 | 1915 | 1833 |
| 760 | 894 | 1425 |
| 398 | 195 | 745 |
| 228 | 1094 | 913 |
| 121 | 1421 | 479 |
| 803 | 698 | 193 |
| 295 | 837 | 530 |
| 880 | 371 | 290 |
| 675 | 1163 | 1696 |
| 275 | 1383 | 1933 |
| 281 | 911 | 1034 |
| 991 | 263 | 682 |
| 763 | 1820 | 410 |
| 862 | 1632 | 1804 |
| 385 | 701 | 661 |
| 206 | 1356 | 466 |
| 164 | 1352 | 1297 |
| 406 | 1379 | 916 |
| 985 | 828 | 1469 |
| 243 | 1504 | 1307 |
| 952 | 672 | 5 |
| 309 | 1399 | 1938 |
| 913 | 1824 | 436 |
| 49 | 1501 | 1641 |
| 227 | 360 | 929 |
| 774 | 678 | 1404 |
| 202 | 1508 | 960 |
| 77 | 393 | 313 |
| 634 | 1961 | 525 |
| 934 | 1607 | 656 |
| 348 | 223 | 1187 |
| 80 | 148 | 1299 |
| 678 | 1252 | 1874 |
| 116 | 332 | 1165 |
| 618 | 630 | 1720 |
| 661 | 511 | 402 |
| 96 | 1433 | 903 |
| 273 | 409 | 1073 |
| 6 | 1594 | 566 |
| 181 | 539 | 1934 |
| 410 | 1313 | 595 |
| 60 | 708 | 129 |
| 727 | 387 | 1338 |
| 431 | 1470 | 1490 |
| 971 | 893 | 47 |
| 125 | 1420 | 1728 |
| 67 | 500 | 1865 |
| 562 | 396 | 956 |
| 443 | 880 | 1795 |
| 558 | 1377 | 1523 |
| 321 | 745 | 972 |
| 588 | 623 | 973 |
| 257 | 1533 | 1244 |
| 39 | 477 | 495 |
| 223 | 525 | 26 |
| 264 | 1042 | 533 |
| 488 | 465 | 725 |
| 828 | 799 | 496 |
| 333 | 1785 | 1647 |
| 161 | 112 | 73 |
| 433 | 1332 | 1438 |
| 940 | 383 | 1022 |
| 877 | 361 | 202 |
| 622 | 1265 | 295 |
| 79 | 1522 | 729 |
| 585 | 612 | 44 |
| 552 | 938 | 1949 |
| 616 | 1793 | 378 |
| 103 | 1479 | 205 |
| 556 | 310 | 1528 |
| 107 | 952 | 361 |
| 632 | 604 | 1207 |
| 612 | 113 | 1959 |
| 436 | 348 | 1479 |
| 420 | 796 | 1540 |
| 822 | 1712 | 443 |
| 81 | 1460 | 144 |
| 250 | 1697 | 1508 |
| 825 | 1359 | 365 |
| 866 | 1731 | 896 |
| 648 | 130 | 159 |
| 966 | 1100 | 127 |
| 928 | 526 | 489 |
| 289 | 889 | 673 |
| 480 | 1655 | 1532 |
| 965 | 445 | 952 |
| 266 | 279 | 427 |
| 59 | 1578 | 63 |
| 826 | 1201 | 471 |
| 31 | 725 | 1429 |
| 852 | 1331 | 1314 |
| 236 | 1600 | 415 |
| 54 | 906 | 252 |
| 434 | 32 | 734 |
| 312 | 33 | 1409 |
| 502 | 1563 | 1591 |
| 705 | 1748 | 1618 |
| 444 | 804 | 1106 |
| 379 | 1978 | 526 |
| 910 | 82 | 1550 |
| 848 | 1453 | 185 |
| 815 | 1264 | 1325 |
| 286 | 782 | 1423 |
| 493 | 1412 | 1256 |
| 11 | 1728 | 148 |
| 86 | 620 | 781 |
| 748 | 1572 | 1115 |
| 968 | 88 | 588 |
| 467 | 1564 | 1826 |
| 331 | 59 | 104 |
| 8 | 187 | 66 |
| 478 | 866 | 1855 |
| 747 | 389 | 1881 |
| 242 | 1862 | 274 |
| 359 | 1198 | 853 |
| 975 | 1764 | 181 |
| 254 | 1137 | 330 |
| 581 | 572 | 766 |
| 506 | 489 | 564 |
| 620 | 338 | 1656 |
| 389 | 394 | 672 |
| 542 | 1321 | 338 |
| 857 | 1834 | 332 |
| 209 | 369 | 219 |
| 162 | 888 | 1843 |
| 627 | 975 | 29 |
| 271 | 135 | 1221 |
| 245 | 964 | 523 |
| 157 | 1029 | 1329 |
| 184 | 1619 | 943 |
| 485 | 877 | 1365 |
| 995 | 1788 | 917 |
| 127 | 1351 | 840 |
| 589 | 1715 | 919 |
| 384 | 867 | 1214 |
| 110 | 1553 | 1645 |
| 840 | 1711 | 501 |
| 360 | 853 | 1312 |
| 411 | 1294 | 461 |
| 131 | 687 | 1380 |
| 349 | 395 | 397 |
| 673 | 738 | 1480 |
| 343 | 307 | 1194 |
| 435 | 919 | 1575 |
| 225 | 1580 | 283 |
| 497 | 1932 | 556 |
| 214 | 849 | 118 |
| 302 | 1444 | 1707 |
| 920 | 686 | 362 |
| 35 | 1654 | 1876 |
| 695 | 95 | 354 |
| 922 | 1567 | 1497 |
| 753 | 446 | 970 |
| 288 | 823 | 1506 |
| 352 | 1023 | 968 |
| 456 | 1981 | 1286 |
| 165 | 1413 | 1105 |
| 684 | 824 | 149 |
| 595 | 811 | 21 |
| 284 | 4 | 887 |
| 892 | 1672 | 372 |
| 543 | 892 | 385 |
| 851 | 133 | 544 |
| 750 | 352 | 577 |
| 665 | 1963 | 1001 |
| 838 | 366 | 1542 |
| 13 | 1098 | 648 |
| 496 | 1777 | 2001 |
| 571 | 1269 | 941 |
| 372 | 954 | 198 |
| 963 | 215 | 171 |
| 10 | 1756 | 99 |
| 926 | 1287 | 162 |
| 689 | 721 | 877 |
| 524 | 1346 | 1702 |
| 263 | 1085 | 833 |
| 630 | 1212 | 1840 |
| 426 | 773 | 1148 |
| 837 | 1732 | 1572 |
| 896 | 1236 | 17 |
| 114 | 1334 | 795 |
| 859 | 1463 | 900 |
| 870 | 5 | 893 |
| 78 | 1092 | 1220 |
| 554 | 1933 | 937 |
| 780 | 251 | 779 |
| 583 | 270 | 720 |
| 167 | 156 | 121 |
| 307 | 1054 | 630 |
| 465 | 355 | 370 |
| 574 | 1592 | 448 |
| 143 | 205 | 957 |
| 875 | 331 | 1184 |
| 545 | 1144 | 1819 |
| 692 | 1530 | 345 |
| 697 | 35 | 1135 |
| 318 | 180 | 1260 |
| 490 | 1559 | 356 |
| 403 | 873 | 865 |
| 676 | 319 | 457 |
| 719 | 1627 | 145 |
| 98 | 1288 | 1553 |
| 494 | 1686 | 1094 |
| 111 | 1928 | 90 |
| 133 | 1101 | 1906 |
| 969 | 859 | 1015 |
| 715 | 1562 | 1803 |
| 649 | 1626 | 740 |
| 136 | 1646 | 1969 |
| 580 | 1445 | 1141 |
| 239 | 1734 | 547 |
| 796 | 998 | 1623 |
| 989 | 1857 | 1246 |
| 530 | 913 | 641 |
| 319 | 1669 | 1638 |
| 777 | 321 | 1388 |
| 529 | 659 | 1330 |
| 807 | 965 | 736 |
| 791 | 1064 | 988 |
| 879 | 1665 | 1437 |
| 855 | 1314 | 848 |
| 809 | 358 | 1085 |
| 151 | 792 | 1578 |
| 42 | 1195 | 1659 |
| 575 | 681 | 107 |
| 399 | 523 | 1907 |
| 417 | 1336 | 1249 |
| 53 | 1911 | 1712 |
| 249 | 768 | 772 |
| 930 | 1943 | 1441 |
| 614 | 724 | 275 |
| 210 | 1107 | 1962 |
| 919 | 1369 | 1708 |
| 841 | 977 | 545 |
| 69 | 1878 | 223 |
| 17 | 691 | 217 |
| 886 | 1228 | 64 |
| 446 | 490 | 1592 |
| 148 | 237 | 1697 |
| 578 | 1662 | 237 |
| 858 | 277 | 1917 |
| 230 | 1276 | 363 |
| 531 | 27 | 1243 |
| 946 | 1231 | 1913 |
| 742 | 412 | 670 |
| 304 | 1973 | 1046 |
| 799 | 311 | 567 |
| 20 | 649 | 267 |
| 724 | 555 | 1175 |
| 199 | 1457 | 1400 |
| 993 | 789 | 1211 |
| 332 | 912 | 990 |
| 117 | 197 | 1544 |
| 613 | 1290 | 85 |
| 491 | 1667 | 1475 |
| 883 | 1955 | 708 |
| 564 | 1124 | 305 |
| 391 | 1997 | 955 |
| 65 | 1162 | 62 |
| 967 | 776 | 884 |
| 354 | 1343 | 536 |
| 536 | 1178 | 715 |
| 75 | 628 | 951 |
| 599 | 729 | 1576 |
| 156 | 386 | 707 |
| 9 | 841 | 1027 |
| 234 | 1817 | 722 |
| 200 | 924 | 420 |
| 87 | 1982 | 1718 |
| 5 | 202 | 42 |
| 772 | 290 | 589 |
| 459 | 1247 | 425 |
| 576 | 1197 | 635 |
| 731 | 917 | 1124 |
| 516 | 1458 | 1272 |
| 169 | 1836 | 1118 |
| 315 | 857 | 158 |
| 29 | 930 | 1390 |
| 658 | 102 | 1653 |
| 671 | 863 | 125 |
| 521 | 64 | 636 |
| 267 | 1591 | 157 |
| 272 | 728 | 1555 |
| 448 | 1774 | 1285 |
| 440 | 453 | 602 |
| 668 | 1900 | 269 |
| 300 | 1631 | 1057 |
| 41 | 248 | 1127 |
| 984 | 207 | 409 |
| 567 | 1066 | 174 |
| 596 | 876 | 1235 |
| 557 | 1975 | 894 |
| 768 | 303 | 1066 |
| 452 | 1695 | 1600 |
| 765 | 1950 | 1224 |
| 113 | 1737 | 762 |
| 691 | 1586 | 98 |
| 987 | 1516 | 1273 |
| 70 | 1769 | 289 |
| 290 | 1747 | 95 |
| 4 | 149 | 1116 |
| 291 | 1624 | 534 |
| 330 | 63 | 1346 |
| 610 | 1353 | 113 |
| 541 | 1818 | 1283 |
| 624 | 1884 | 1952 |
| 462 | 1708 | 1261 |
| 647 | 1617 | 552 |
| 192 | 1749 | 384 |
| 555 | 829 | 459 |
| 188 | 1634 | 475 |
| 335 | 419 | 215 |
| 863 | 758 | 265 |
| 810 | 761 | 1136 |
| 513 | 577 | 1385 |
| 33 | 865 | 347 |
| 180 | 1879 | 1296 |
| 868 | 478 | 297 |
| 338 | 1456 | 65 |
| 823 | 1863 | 539 |
| 629 | 1365 | 847 |
| 438 | 1053 | 1642 |
| 244 | 153 | 262 |
| 395 | 1905 | 1182 |
| 345 | 413 | 601 |
| 873 | 675 | 1036 |
| 945 | 1685 | 93 |
| 150 | 1001 | 1580 |
| 368 | 1004 | 1432 |
| 123 | 493 | 323 |
| 830 | 125 | 1811 |
| 97 | 225 | 1004 |
| 468 | 1468 | 1449 |
| 46 | 767 | 1410 |
| 669 | 181 | 1309 |
| 455 | 934 | 542 |
| 261 | 705 | 1888 |
| 845 | 1800 | 706 |
| 296 | 1510 | 1699 |
| 439 | 432 | 135 |
| 559 | 406 | 1529 |
| 383 | 516 | 755 |
| 484 | 408 | 1217 |
| 639 | 177 | 888 |
| 386 | 1841 | 1791 |
| 457 | 1118 | 994 |
| 775 | 479 | 431 |
| 512 | 266 | 9 |
| 424 | 1174 | 1357 |
| 682 | 1612 | 1759 |
| 481 | 908 | 153 |
| 593 | 979 | 657 |
| 572 | 221 | 1222 |
| 276 | 427 | 774 |
| 569 | 827 | 273 |
| 533 | 580 | 152 |
| 537 | 1428 | 540 |
| 681 | 1009 | 1963 |
| 416 | 617 | 211 |
| 30 | 677 | 1513 |
| 373 | 1752 | 180 |
| 146 | 605 | 512 |
| 686 | 285 | 1771 |
| 158 | 1462 | 1682 |
| 298 | 996 | 820 |
| 187 | 1810 | 1387 |
| 108 | 443 | 603 |
| 387 | 505 | 568 |
| 153 | 375 | 412 |
| 323 | 480 | 1985 |
| 445 | 208 | 934 |
| 221 | 1638 | 351 |
| 350 | 1717 | 166 |
| 652 | 1688 | 806 |
| 256 | 949 | 1103 |
| 553 | 885 | 1501 |
| 84 | 1500 | 710 |
| 409 | 1440 | 787 |
| 25 | 340 | 364 |
| 932 | 1544 | 1806 |
| 615 | 154 | 1533 |
| 990 | 1312 | 1668 |
| 902 | 74 | 841 |
| 891 | 36 | 1269 |
| 83 | 1761 | 1006 |
| 26 | 598 | 1421 |
| 68 | 1429 | 1684 |
| 277 | 1075 | 1319 |
| 663 | 1700 | 1895 |
| 895 | 1149 | 1762 |
| 582 | 1492 | 1637 |
| 878 | 1869 | 590 |
| 535 | 891 | 931 |
| 363 | 816 | 1794 |
| 688 | 161 | 962 |
| 109 | 1573 | 1646 |
| 407 | 186 | 188 |
| 856 | 1767 | 1447 |
| 625 | 1455 | 1204 |
| 320 | 1797 | 1381 |
| 641 | 544 | 253 |
| 849 | 1156 | 50 |
| 132 | 92 | 1414 |
| 843 | 670 | 1780 |
| 102 | 643 | 1078 |
| 844 | 878 | 1445 |
| 88 | 1093 | 1215 |
| 216 | 192 | 1937 |
| 631 | 1796 | 1160 |
| 716 | 1318 | 254 |
| 351 | 182 | 1091 |
| 313 | 1855 | 862 |
| 492 | 864 | 416 |
| 860 | 1363 | 1735 |
| 876 | 1239 | 1991 |
| 643 | 1049 | 975 |
| 755 | 1618 | 665 |
| 336 | 1362 | 377 |
| 449 | 1186 | 1512 |
| 172 | 196 | 292 |
| 905 | 1438 | 819 |
| 568 | 1390 | 1722 |
| 824 | 345 | 1363 |
| 489 | 75 | 240 |
| 128 | 1273 | 1377 |
| 972 | 1266 | 1264 |
| 454 | 1482 | 477 |
| 898 | 1653 | 1454 |
| 687 | 19 | 643 |
| 82 | 760 | 435 |
| 921 | 1405 | 1237 |
| 889 | 257 | 447 |
| 722 | 1291 | 261 |
| 66 | 652 | 1203 |
| 539 | 262 | 1615 |
| 980 | 308 | 878 |
| 699 | 1461 | 904 |
| 139 | 936 | 136 |
| 475 | 999 | 329 |
| 358 | 227 | 4 |
| 660 | 1010 | 210 |
| 702 | 658 | 550 |
| 246 | 774 | 768 |
| 218 | 631 | 817 |
| 196 | 1940 | 803 |
| 12 | 1244 | 259 |
| 981 | 449 | 1582 |
| 894 | 1416 | 45 |
| 846 | 579 | 106 |
| 835 | 1045 | 222 |
| 224 | 1645 | 1850 |
| 51 | 1 | 1792 |
| 821 | 198 | 1398 |
| 901 | 1280 | 1690 |
| 586 | 1639 | 498 |
| 637 | 606 | 41 |
| 95 | 1209 | 645 |
| 670 | 1258 | 828 |
| 977 | 1929 | 521 |
| 356 | 755 | 1901 |
| 728 | 581 | 986 |
| 105 | 1903 | 814 |
| 954 | 1759 | 3 |
| 413 | 1729 | 993 |
| 867 | 1842 | 137 |
| 334 | 1699 | 1292 |
| 713 | 1535 | 1980 |
| 301 | 1304 | 1786 |
| 498 | 1250 | 517 |
| 217 | 1447 | 1556 |
| 917 | 49 | 1405 |
| 939 | 150 | 1336 |
| 3 | 1531 | 1531 |
| 504 | 835 | 867 |
| 36 | 1080 | 494 |
| 979 | 941 | 1746 |
| 252 | 680 | 206 |
| 683 | 914 | 1117 |
| 303 | 1636 | 886 |
| 734 | 1760 | 201 |
| 563 | 25 | 922 |
| 394 | 1735 | 101 |
| 757 | 316 | 1869 |
| 988 | 1443 | 1504 |
| 138 | 1260 | 999 |
| 735 | 116 | 693 |
| 998 | 1115 | 1880 |
| 511 | 1931 | 1076 |
| 603 | 1261 | 374 |
| 884 | 272 | 1039 |
| 897 | 1298 | 303 |
| 269 | 76 | 791 |
| 850 | 944 | 1291 |
| 347 | 584 | 451 |
| 294 | 1893 | 638 |
| 986 | 1909 | 34 |
| 170 | 1757 | 1793 |
| 779 | 557 | 1548 |
| 951 | 671 | 437 |
| 482 | 1476 | 992 |
| 412 | 506 | 74 |
| 798 | 234 | 947 |
| 736 | 713 | 1025 |
| 590 | 1417 | 1063 |
| 130 | 664 | 683 |
| 933 | 1801 | 248 |
| 646 | 97 | 801 |
| 259 | 1710 | 1823 |
| 743 | 214 | 299 |
| 626 | 1898 | 625 |
| 547 | 956 | 1787 |
| 474 | 1949 | 1657 |
| 62 | 1361 | 46 |
| 941 | 968 | 1687 |
| 956 | 1534 | 557 |
| 129 | 1114 | 1624 |
| 381 | 1393 | 333 |
| 91 | 1736 | 1941 |
| 737 | 558 | 1505 |
| 526 | 185 | 264 |
| 361 | 354 | 67 |
| 189 | 970 | 68 |
| 174 | 1512 | 1471 |
| 534 | 144 | 1845 |
| 447 | 1395 | 1110 |
| 847 | 1337 | 541 |
| 992 | 947 | 1956 |
| 366 | 541 | 639 |
| 471 | 1224 | 1741 |
| 565 | 1581 | 965 |
| 28 | 460 | 155 |
| 508 | 173 | 1606 |
| 400 | 1341 | 502 |
| 160 | 1576 | 1391 |
| 623 | 1380 | 1910 |
| 50 | 775 | 751 |
| 137 | 1067 | 1943 |
| 145 | 346 | 309 |
| 869 | 131 | 1352 |
| 865 | 353 | 325 |
| 923 | 1119 | 1585 |
| 693 | 1554 | 1229 |
| 549 | 950 | 394 |
| 974 | 1892 | 987 |
| 317 | 1676 | 418 |
| 15 | 727 | 1767 |
| 961 | 769 | 319 |
| 305 | 254 | 1893 |
| 573 | 1183 | 1199 |
| 598 | 1604 | 423 |
| 680 | 714 | 6 |
| 872 | 1121 | 272 |
| 149 | 955 | 843 |
| 544 | 110 | 610 |
| 657 | 507 | 1838 |
| 370 | 1754 | 1240 |
| 551 | 1002 | 704 |
| 696 | 883 | 1995 |
| 73 | 551 | 35 |
| 278 | 731 | 876 |
| 786 | 1056 | 1389 |
| 442 | 1849 | 1021 |
| 871 | 644 | 1361 |
| 819 | 1895 | 1442 |
| 472 | 1742 | 1844 |
| 487 | 1603 | 1566 |
| 854 | 470 | 1868 |
| 509 | 1536 | 1378 |
| 396 | 1616 | 870 |
| 423 | 184 | 30 |
| 48 | 1255 | 1444 |
| 664 | 808 | 1945 |
| 342 | 1026 | 966 |
| 662 | 1083 | 592 |
| 405 | 1039 | 1612 |
| 376 | 514 | 642 |
| 141 | 1819 | 1364 |
| 962 | 1323 | 909 |
| 800 | 1339 | 599 |
| 72 | 1556 | 434 |
| 746 | 1038 | 430 |
| 633 | 1070 | 1308 |
| 119 | 1193 | 169 |
| 730 | 549 | 875 |
| 685 | 1425 | 1900 |
| 707 | 762 | 1562 |
| 741 | 1133 | 737 |
| 198 | 839 | 455 |
| 282 | 1779 | 1704 |
| 527 | 242 | 25 |
| 326 | 809 | 1899 |
| 428 | 700 | 1701 |
| 432 | 183 | 422 |
| 195 | 1668 | 348 |
| 392 | 718 | 1908 |
| 788 | 44 | 1827 |
| 766 | 1308 | 111 |
| 950 | 487 | 1976 |
| 638 | 847 | 1609 |
| 937 | 1442 | 1797 |
| 523 | 822 | 1077 |
| 503 | 1766 | 488 |
| 955 | 23 | 1088 |
| 829 | 1015 | 257 |
| 253 | 1357 | 80 |
| 101 | 1876 | 1431 |
| 179 | 633 | 1181 |
| 479 | 318 | 836 |
| 380 | 843 | 1883 |
| 285 | 971 | 1567 |
| 357 | 211 | 1661 |
| 906 | 26 | 238 |
| 34 | 126 | 821 |
| 404 | 895 | 598 |
| 959 | 1117 | 43 |
| 365 | 674 | 1121 |
| 983 | 1974 | 1065 |
| 1000 | 1311 | 1817 |
| 538 | 1360 | 1586 |
| 957 | 146 | 1493 |
| 584 | 1938 | 1042 |
| 147 | 334 | 14 |
| 943 | 1720 | 1766 |
| 781 | 751 | 1030 |
| 642 | 942 | 1158 |
| 611 | 1210 | 1630 |
| 140 | 779 | 1597 |
| 401 | 610 | 450 |
| 314 | 1073 | 1864 |
| 24 | 247 | 339 |
| 461 | 1493 | 563 |
| 16 | 410 | 1628 |
| 262 | 1703 | 1683 |
| 397 | 679 | 212 |
| 628 | 1473 | 1495 |
| 770 | 274 | 1773 |
| 752 | 1716 | 1970 |
| 754 | 1325 | 56 |
| 464 | 1514 | 173 |
| 744 | 599 | 504 |
| 654 | 1727 | 686 |
| 778 | 1403 | 1161 |
| 476 | 474 | 343 |
| 328 | 626 | 977 |
| 297 | 96 | 1847 |
| 924 | 1584 | 684 |
| 280 | 233 | 1957 |
| 794 | 1330 | 1700 |
| 233 | 1079 | 763 |
| 450 | 78 | 633 |
| 19 | 1705 | 519 |
| 23 | 978 | 77 |
| 52 | 1557 | 1834 |
| 690 | 1642 | 1344 |
| 418 | 1590 | 770 |
| 816 | 1664 | 1120 |
| 592 | 961 | 1925 |
| 55 | 1431 | 1734 |
| 177 | 1391 | 1321 |
| 118 | 1611 | 920 |
| 881 | 573 | 730 |
| 367 | 137 | 1126 |
| 759 | 141 | 186 |
| 421 | 1020 | 1964 |
| 56 | 1983 | 312 |
| 175 | 616 | 411 |
| 577 | 1096 | 1459 |
| 89 | 1159 | 1535 |
| 18 | 330 | 244 |
| 463 | 940 | 1912 |
| 708 | 267 | 1056 |
| 505 | 845 | 1472 |
| 960 | 1483 | 52 |
| 749 | 1589 | 799 |
| 122 | 798 | 1951 |
| 704 | 556 | 1104 |
| 240 | 1424 | 251 |
| 999 | 1551 | 1086 |
| 382 | 42 | 788 |
| 340 | 1835 | 546 |
| 997 | 1805 | 813 |
| 251 | 1454 | 114 |
| 371 | 281 | 608 |
| 604 | 1803 | 1401 |
| 346 | 625 | 401 |
| 717 | 163 | 874 |
| 723 | 1169 | 1721 |
| 808 | 1024 | 1327 |
| 154 | 2000 | 1054 |
| 1001 | 519 | 22 |
| 44 | 472 | 974 |
| 235 | 109 | 1162 |
| 483 | 418 | 81 |
| 477 | 948 | 964 |
| 74 | 232 | 1652 |
| 706 | 127 | 1960 |
| 931 | 1606 | 1289 |
| 377 | 1143 | 382 |
| 619 | 1408 | 1163 |
| 890 | 431 | 358 |
| 47 | 1650 | 732 |
| 390 | 1540 | 191 |
| 408 | 392 | 1779 |
| 783 | 372 | 293 |
| 907 | 213 | 1706 |
| 833 | 10 | 1183 |
| 804 | 399 | 873 |
| 732 | 66 | 1213 |
| 353 | 655 | 623 |
| 801 | 365 | 32 |
| 694 | 716 | 2002 |
| 561 | 236 | 110 |
| 344 | 1656 | 1349 |
| 785 | 805 | 318 |
| 827 | 983 | 190 |
| 470 | 1052 | 1408 |
| 126 | 709 | 1599 |
| 789 | 1518 | 555 |
| 817 | 1815 | 1415 |
| 587 | 766 | 1172 |
| 700 | 645 | 1340 |
| 916 | 576 | 717 |
| 155 | 108 | 953 |
| 929 | 439 | 1608 |
| 608 | 324 | 1059 |
| 758 | 283 | 574 |
| 316 | 1194 | 178 |
| 802 | 1400 | 1149 |
| 201 | 870 | 1068 |
| 764 | 990 | 195 |
| 820 | 83 | 1926 |
| 548 | 723 | 1559 |
| 32 | 1913 | 1383 |
| 518 | 1613 | 1031 |
| 640 | 1364 | 676 |
| 193 | 1366 | 474 |
| 579 | 683 | 890 |
| 451 | 1449 | 1017 |
| 293 | 1772 | 1832 |
| 112 | 704 | 655 |
| 99 | 428 | 1896 |
| 499 | 1068 | 187 |
| 134 | 907 | 1371 |
| 207 | 1060 | 1044 |
| 935 | 1397 | 1549 |
| 607 | 1238 | 748 |
| 61 | 1205 | 2 |
| 311 | 1532 | 1496 |
| 310 | 1340 | 1282 |
| 718 | 754 | 245 |
| 173 | 1410 | 1443 |
| 787 | 168 | 516 |
| 893 | 1372 | 1164 |
| 617 | 1062 | 1878 |
| 861 | 1965 | 1914 |
| 375 | 991 | 7 |
| 655 | 553 | 1783 |
| 27 | 568 | 1463 |
| 469 | 1122 | 1262 |
| 341 | 1799 | 1052 |
| 232 | 1241 | 805 |
| 362 | 592 | 270 |
| 212 | 1789 | 1568 |
| 729 | 200 | 288 |
| 812 | 1277 | 1830 |
| 653 | 903 | 756 |
| 621 | 134 | 285 |
| 710 | 651 | 538 |
| 942 | 336 | 702 |
| 720 | 1771 | 1043 |
| 115 | 1478 | 714 |
| 185 | 1283 | 392 |
| 836 | 1167 | 369 |
| 458 | 1865 | 961 |
| 726 | 123 | 1519 |
| 904 | 871 | 126 |
| 709 | 533 | 1411 |
| 994 | 512 | 1092 |
| 701 | 364 | 89 |
| 205 | 1741 | 727 |
| 885 | 1552 | 460 |
| 460 | 1924 | 1547 |
| 784 | 529 | 808 |
| 797 | 862 | 835 |
| 63 | 1427 | 247 |
| 422 | 1219 | 386 |
| 888 | 1471 | 1534 |
| 337 | 1110 | 1928 |
| 40 | 1086 | 1579 |
| 231 | 1467 | 1457 |
| 94 | 1249 | 1248 |
| 241 | 503 | 1997 |
| 911 | 1082 | 1339 |
| 299 | 1847 | 396 |
| 882 | 235 | 500 |
| 501 | 1780 | 891 |
| 900 | 1509 | 543 |
| 651 | 378 | 1450 |
| 238 | 1889 | 572 |
| 899 | 268 | 861 |
| 369 | 1071 | 1016 |
| 805 | 103 | 505 |

TABLE 11

| 1^{st} Example for | | 2^{nd} Example for | | 3^{rd} Example for | |
|---|---|---|---|---|---|
| Exchange of 50 | | Exchange of 50 | | Exchange of 50 | |
| within 202 | | within 202 | | within 202 | |
| Dropped | Added | Dropped | Added | Dropped | Added |
| 64 | 451 | 43 | 1253 | 131 | 847 |
| 155 | 322 | 113 | 515 | 167 | 1396 |
| 162 | 483 | 151 | 815 | 53 | 390 |
| 72 | 449 | 160 | 508 | 55 | 1538 |
| 127 | 388 | 185 | 1256 | 179 | 1530 |
| 103 | 268 | 198 | 898 | 145 | 595 |
| 102 | 465 | 111 | 1943 | 82 | 451 |
| 63 | 236 | 67 | 1030 | 119 | 891 |
| 118 | 243 | 98 | 777 | 121 | 844 |
| 68 | 536 | 106 | 229 | 133 | 1348 |
| 44 | 426 | 164 | 927 | 60 | 1745 |
| 161 | 395 | 133 | 602 | 134 | 1631 |
| 38 | 479 | 8 | 1643 | 180 | 975 |
| 157 | 450 | 85 | 1910 | 42 | 585 |
| 36 | 218 | 5 | 1790 | 160 | 1571 |
| 120 | 260 | 145 | 1019 | 6 | 1215 |
| 109 | 226 | 93 | 1888 | 102 | 406 |
| 37 | 491 | 174 | 1580 | 72 | 642 |
| 184 | 529 | 131 | 1220 | 104 | 596 |
| 154 | 252 | 41 | 441 | 158 | 1878 |
| 169 | 308 | 152 | 1870 | 185 | 1456 |
| 96 | 482 | 20 | 1467 | 77 | 1453 |
| 115 | 458 | 197 | 1254 | 116 | 1414 |
| 144 | 473 | 42 | 314 | 20 | 1683 |
| 2 | 434 | 94 | 1686 | 5 | 771 |
| 188 | 312 | 171 | 1610 | 63 | 1306 |
| 65 | 486 | 116 | 216 | 1 | 217 |
| 124 | 315 | 189 | 1430 | 128 | 470 |
| 39 | 367 | 161 | 1514 | 152 | 1209 |
| 94 | 270 | 19 | 423 | 124 | 1253 |
| 107 | 242 | 6 | 305 | 39 | 1990 |
| 34 | 454 | 137 | 1017 | 79 | 1950 |
| 47 | 344 | 122 | 1101 | 135 | 1230 |
| 187 | 323 | 135 | 323 | 30 | 837 |
| 173 | 351 | 156 | 470 | 75 | 715 |
| 62 | 433 | 167 | 2002 | 61 | 709 |
| 166 | 221 | 53 | 753 | 149 | 1068 |
| 136 | 513 | 16 | 1029 | 202 | 952 |
| 133 | 338 | 100 | 1283 | 138 | 1603 |
| 45 | 505 | 65 | 479 | 7 | 1602 |
| 158 | 385 | 78 | 1491 | 110 | 582 |
| 121 | 494 | 143 | 1617 | 36 | 1499 |
| 31 | 386 | 186 | 1111 | 96 | 1285 |
| 130 | 225 | 199 | 1378 | 197 | 506 |
| 106 | 481 | 74 | 1909 | 9 | 1424 |
| 95 | 348 | 29 | 298 | 188 | 301 |
| 112 | 431 | 108 | 959 | 190 | 923 |
| 137 | 309 | 107 | 1688 | 166 | 657 |
| 43 | 461 | 2 | 347 | 144 | 1604 |
| 172 | 262 | 101 | 469 | 43 | 1852 |

TABLE 12

| 1^{st} Example for | | 2^{nd} Example for | | 3^{rd} Example for | |
|---|---|---|---|---|---|
| Exchange of 50 | | Exchange of 50 | | Exchange of 50 | |
| within 1002 | | within 1002 | | within 1002 | |
| Dropped | Added | Dropped | Added | Dropped | Added |
| 106 | 1070 | 33 | 1219 | 9 | 1711 |
| 45 | 1030 | 130 | 1932 | 16 | 1042 |
| 65 | 1050 | 50 | 1142 | 46 | 1722 |
| 124 | 1018 | 26 | 1528 | 121 | 1211 |
| 118 | 1155 | 3 | 1160 | 45 | 1985 |
| 169 | 1202 | 6 | 1847 | 7 | 1424 |
| 161 | 1049 | 17 | 1990 | 8 | 1007 |
| 144 | 1099 | 8 | 1477 | 4 | 1710 |
| 107 | 1158 | 25 | 1569 | 34 | 1398 |
| 187 | 1093 | 34 | 1044 | 35 | 1725 |
| 2 | 1119 | 15 | 1768 | 10 | 1585 |
| 130 | 1143 | 13 | 1052 | 43 | 1771 |
| 172 | 1036 | 9 | 1401 | 5 | 1341 |
| 68 | 1033 | 121 | 1962 | 42 | 1153 |
| 96 | 1172 | 16 | 1591 | 47 | 1513 |
| 39 | 1005 | 27 | 1525 | 18 | 1714 |
| 136 | 1241 | 2 | 1223 | 22 | 1178 |
| 115 | 1220 | 118 | 1734 | 3 | 1124 |
| 102 | 1246 | 1 | 1147 | 28 | 1807 |
| 133 | 1032 | 124 | 1577 | 14 | 1782 |
| 62 | 1069 | 45 | 1358 | 20 | 1571 |
| 127 | 1170 | 44 | 1531 | 19 | 1971 |
| 38 | 1079 | 5 | 1445 | 27 | 1975 |
| 166 | 1132 | 46 | 1772 | 25 | 1802 |
| 36 | 1268 | 35 | 1096 | 38 | 1762 |
| 63 | 1097 | 23 | 1200 | 57 | 1273 |
| 109 | 1179 | 11 | 1034 | 107 | 1363 |
| 94 | 1197 | 115 | 1251 | 115 | 1039 |
| 120 | 1236 | 58 | 1396 | 31 | 1769 |
| 173 | 1142 | 120 | 1210 | 23 | 1253 |
| 64 | 1173 | 39 | 1536 | 58 | 1943 |
| 31 | 1058 | 22 | 1767 | 39 | 1848 |
| 112 | 1183 | 107 | 1910 | 2 | 1564 |
| 137 | 1008 | 29 | 1352 | 40 | 1844 |
| 157 | 1112 | 42 | 1789 | 44 | 1898 |
| 154 | 1178 | 10 | 1928 | 112 | 1361 |
| 37 | 1121 | 14 | 1325 | 124 | 1800 |
| 47 | 1270 | 49 | 1045 | 29 | 1135 |
| 184 | 1180 | 133 | 1833 | 37 | 1438 |
| 95 | 1249 | 20 | 1690 | 127 | 1501 |
| 103 | 1126 | 28 | 1250 | 32 | 1578 |
| 155 | 1224 | 37 | 1452 | 11 | 1750 |
| 188 | 1251 | 112 | 1460 | 33 | 1173 |
| 158 | 1113 | 38 | 1166 | 15 | 1839 |
| 72 | 1125 | 31 | 1312 | 17 | 1631 |
| 34 | 1269 | 19 | 1844 | 36 | 1008 |
| 162 | 1062 | 21 | 1821 | 12 | 1930 |
| 44 | 1203 | 43 | 1041 | 26 | 1291 |
| 43 | 1004 | 36 | 1507 | 118 | 1082 |
| 121 | 1148 | 32 | 1533 | 130 | 1526 |

TABLE 13
Seq.
Number

2
7
10
17
19
21
22
23
24
26
27
35
37
41
46
48
54
55
56
58
63
65
67
74
76
78
79
81
88
93
96
97
100
111
117
129
132
138
140
145
146
147
150
151
153
155
156
161
162
163
167
170
180
181
182
184
189
193
198
218
221
225
226
236
242
243
252
260
262
268
270
308
309
312
315
318
322
323
333
338
344
348
351
367
385
386
388
395
410
413
414
426
431
433
434
442
449
450
451
454
458
461
465
473
479
480
481
482
483
486
491
494
505
513
529
536
537
540
548
552
558
562
569
575
577
578
587
597
598
600
601
602
612
614
617
619
623
626
627
628
632
636
643
645
646
653
654
655
656
657
665
668
670
677
688
690
699
701
706
714
718
723
731
733
734
735
739
744
751
753
756
759
769
771
773
778
782
783
799
806
816
819
820
827
839
844
845
847
850
851
858
860
862
863
873
879
890
891
895
908
915
919
929
930
944
946
947
954
961
967
968
983
1001
1004
1005
1008
1010
1018
1030
1032
1033
1036
1049
1050
1055
1058
1062
1069
1070
1079
1092
1093
1097
1099
1112
1113
1119
1121
1125
1126
1132
1133
1134
1142
1143
1148
1155
1158
1170
1172
1173
1178
1179
1180
1183
1184
1186
1187
1197
1202
1203
1220
1224
1236
1241
1246
1249
1251
1268
1269
1270
1271
1275
1284
1297
1301
1303
1306
1314
1319
1320
1325
1329
1330
1331
1333
1335
1337
1349
1352
1357
1358
1359
1362
1364
1366
1367
1377
1380
1395
1403
1409
1415
1425
1427
1428
1446
1449
1452
1460
1466
1471
1477
1479
1483
1485
1488
1491
1492
1493
1512
1521
1523
1524
1527
1528
1539
1540
1547
1550
1557
1567
1568
1569
1574
1590
1602
1613
1617
1618
1620
1629
1631
1632
1635
1645
1650
1654
1655
1658
1661
1674
1680
1685
1687
1688
1692
1695
1711
1713
1721
1725
1740
1742
1744
1750
1755
1761
1762
1765
1766
1767
1780
1783
1788
1791
1803
1805
1809
1810
1814
1832
1833
1834
1851
1853
1864
1872
1876
1879
1880
1882
1887
1890
1892
1893
1901
1909
1915
1931
1940
1941
1946
1951
1953
1959
1963
2002

TABLE 14

| SEQ | | | |
|---|---|---|---|
| ID | | Gene | Primary |
| NO | Probe Set ID | Symbol | Transcript ID |
| 2003 | 201030_x_at | LDHB | NM_002300 |
| 2004 | 212300_at | TXLNA | NM_175852 |
| 2005 | 208781_x_at | SNX3 | NM_003795 |
| 2006 | 234734_s_at | TNRC6A | NM_014494 |
| 2007 | 213297_at | RMND5B | NM_022762 |
| 2008 | 226220_at | METTL9 | NM_001077180 |
| 2009 | 209127_s_at | SART3 | NM_014706 |
| 2010 | 202022_at | ALDOC | NM_005165 |
| 2011 | 200066_at | IK | NM_006083 |
| 2012 | 236065_at | — | AA782826 |
| 2013 | 217234_s_at | EZR | NM_001111077 |
| 2014 | 222427_s_at | LARS | NM_020117 |
| 2015 | 230958_s_at | — | AA040716 |
| 2016 | 209721_s_at | IFFO1 | NM_001039670 |
| 2017 | 239673_at | — | AA618177 |
| 2018 | 215543_s_at | LARGE | NM_004737 |
| 2019 | 203413_at | NELL2 | NM_001145107 |
| 2020 | 1556451_at | — | AA741105 |
| 2021 | 1555355_a_at | ETS1 | NM_001143820 |
| 2022 | 204178_s_at | RBM14 | NM_002896 |
| 2023 | 236472_at | — | AA490889 |
| 2024 | 217911_s_at | BAG3 | NM_004281 |
| 2025 | 226204_at | C22orf29 | NM_024627 |
| 2026 | 244549_at | LOC100130212 | ENST00000406220 |
| 2027 | 223219_s_at | CNOT10 | NM_015442 |
| 2028 | 204089_x_at | MAP3K4 | NM_005922 |
| 2029 | 39249_at | AQP3 | NM_004925 |
| 2030 | 212660_at | PHF15 | NM_015288 |
| 2031 | 230679_at | DCAF10 | NM_024345 |
| 2032 | 206453_s_at | NDRG2 | NM_016250 |
| 2033 | 205081_at | CRIP1 | NM_001311 |
| 2034 | 201478_s_at | DKC1 | NM_001142463 |
| 2035 | 221726_at | RPL22 | NM_000983 |
| 2036 | 211750_x_at | TUBA1C | NM_032704 |
| 2037 | 223088_x_at | ECHDC1 | NM_001002030 |
| 2038 | 217884_at | NAT10 | NM_001144030 |
| 2039 | 214447_at | ETS1 | NM_001143820 |
| 2040 | 227731_at | CNBP | NM_001127192 |
| 2041 | 218123_at | C21orf59 | NM_021254 |
| 2042 | 1558525_at | — | AK095480 |
| 2043 | 218611_at | IER5 | NM_016545 |
| 2044 | 211928_at | DYNC1H1 | NM_001376 |
| 2045 | 212115_at | HN1L | NM_144570 |
| 2046 | 228585_at | ENTPD1 | NM_001098175 |
| 2047 | 236172_at | LTB4R | NM_001143919 |
| 2048 | 229569_at | — | BC037328 |
| 2049 | 202724_s_at | FOXO1 | NM_002015 |
| 2050 | 201173_x_at | NUDC | NM_006600 |
| 2051 | 211997_x_at | H3F3B | NM_005324 |
| 2052 | 204951_at | RHOH | NM_004310 |
| 2053 | 1557910_at | HSP90AB1 | NM_007355 |
| 2054 | 203082_at | BMS1 | NM_014753 |
| 2055 | 230586_s_at | ZNF703 | NM_025069 |
| 2056 | 212036_s_at | PNN | NM_002687 |
| 2057 | 217957_at | C16orf80 | NM_013242 |
| 2058 | 202683_s_at | RNMT | NM_003799 |
| 2059 | 237340_at | SLC26A8 | NM_052961 |
| 2060 | 208758_at | ATIC | NM_004044 |
| 2061 | 209671_x_at | TRA@ | M12423 |
| 2062 | 239790_s_at | — | AI435437 |
| 2063 | 203956_at | MORC2 | NM_014941 |
| 2064 | 213006_at | CEBPD | NM_005195 |
| 2065 | 205544_s_at | CR2 | NM_001006658 |
| 2066 | 218667_at | PJA1 | NM_001032396 |
| 2067 | 220690_s_at | DHRS7B | NM_015510 |
| 2068 | 223287_s_at | FOXP1 | NM_001012505 |
| 2069 | 202521_at | CTCF | NM_006565 |
| 2070 | 1560797_s_at | — | BC042086 |
| 2071 | 204947_at | E2F1 | NM_005225 |
| 2072 | 211623_s_at | FBL | NM_001436 |
| 2073 | 239196_at | ANKRD22 | NM_144590 |
| 2074 | 223916_s_at | BCOR | NM_001123383 |
| 2075 | 228976_at | ICOSLG | NM_015259 |
| 2076 | 211949_s_at | NOLC1 | NM_004741 |
| 2077 | 201677_at | C3orf37 | NM_001006109 |
| 2078 | 201581_at | TMX4 | NM_021156 |
| 2079 | 243798_at | — | AI436580 |
| 2080 | 1554413_s_at | RUNDC2B | NM_001012391 |
| 2081 | 202723_s_at | FOXO1 | NM_002015 |
| 2082 | 208313_s_at | SF1 | NM_004630 |
| 2083 | 219737_s_at | PCDH9 | NM_020403 |
| 2084 | 202481_at | DHRS3 | NM_004753 |
| 2085 | 32069_at | N4BP1 | NM_153029 |
| 2086 | 200956_s_at | SSRP1 | NM_003146 |
| 2087 | 233086_at | C20orf106 | NM_001012971 |
| 2088 | 212592_at | IGJ | NM_144646 |
| 2089 | 216863_s_at | MORC2 | NM_014941 |
| 2090 | 202084_s_at | SEC14L1 | NM_001039573 |
| 2091 | 235568_at | C19orf59 | NM_174918 |
| 2092 | 201875_s_at | MPZL1 | NM_001146191 |
| 2093 | 202577_s_at | DDX19A | NM_018332 |
| 2094 | 230656_s_at | CIRH1A | NM_032830 |
| 2095 | 212567_s_at | MAP4 | NM_001134364 |
| 2096 | 205698_s_at | MAP2K6 | NM_002758 |
| 2097 | 200997_at | RBM4 | NM_002896 |
| 2098 | 208857_s_at | PCMT1 | NM_005389 |
| 2099 | 242714_at | — | GENSCAN00000051549 |
| 2100 | 231584_s_at | — | AA977251 |
| 2101 | 201817_at | UBE3C | NM_014671 |
| 2102 | 206206_at | CD180 | NM_005582 |
| 2103 | 224301_x_at | H2AFJ | NM_177925 |
| 2104 | 239292_at | — | AA243430 |
| 2105 | 200610_s_at | NCL | NM_005381 |
| 2106 | 219497_s_at | BCL11A | NM_018014 |
| 2107 | 213545_x_at | SNX3 | NM_003795 |
| 2108 | 204745_x_at | MT1G | NM_005950 |
| 2109 | 217157_x_at | IGK@ | XM_001715827 |
| 2110 | 200792_at | XRCC6 | NM_001469 |
| 2111 | 227516_at | SF3A1 | NM_001005409 |
| 2112 | 206472_s_at | TLE3 | NM_001105192 |
| 2113 | 203634_s_at | CPT1A | NM_001031847 |
| 2114 | 235334_at | ST6GALNAC3 | NM_001160011 |
| 2115 | 206057_x_at | SPN | NM_001030288 |
| 2116 | 200874_s_at | NOP56 | NM_006392 |
| 2117 | 222895_s_at | BCL11B | NM_022898 |
| 2118 | 212009_s_at | STIP1 | NM_006819 |
| 2119 | 210972_x_at | TRA@ | AK026255 |
| 2120 | 217152_at | — | AK024136 |
| 2121 | 200632_s_at | NDRG1 | NM_001135242 |
| 2122 | 208660_at | CS | NM_004077 |
| 2123 | 238006_at | SIN3A | NM_001145357 |
| 2124 | 226531_at | ORAI1 | NM_032790 |
| 2125 | 209188_x_at | DR1 | NM_001938 |
| 2126 | 209190_s_at | DIAPH1 | NM_001079812 |
| 2127 | 210574_s_at | NUDC | NM_006600 |
| 2128 | 210555_s_at | NFATC3 | NM_004555 |
| 2129 | 201998_at | ST6GAL1 | NM_003032 |
| 2130 | 229735_s_at | — | AA283195 |
| 2131 | 200083_at | USP22 | NM_015276 |
| 2132 | 200921_s_at | BTG1 | NM_001731 |
| 2133 | 215343_at | CCDC88C | NM_001080414 |
| 2134 | 211275_s_at | GYG1 | NM_004130 |
| 2135 | 211643_x_at | IGK@ | XM_001719095 |
| 2136 | 218143_s_at | SCAMP2 | NM_005697 |
| 2137 | 211902_x_at | TRA@ | AY360462 |
| 2138 | 219974_x_at | ECHDC1 | NM_001002030 |
| 2139 | 225793_at | LIX1L | NM_153713 |
| 2140 | 210202_s_at | BIN1 | NM_004305 |
| 2141 | 222435_s_at | UBE2J1 | NM_016021 |
| 2142 | 203089_s_at | HTRA2 | NM_013247 |
| 2143 | 201491_at | AHSA1 | NM_012111 |
| 2144 | 219110_at | GAR1 | NM_018983 |
| 2145 | 220948_s_at | ATP1A1 | NM_000701 |
| 2146 | 223993_s_at | CNIH4 | NM_014184 |
| 2147 | 215524_x_at | TRA@ | AB305657 |
| 2148 | 222447_at | METTL9 | NM_001077180 |
| 2149 | 243780_at | — | AK128410 |
| 2150 | 206461_x_at | MT1H | NM_005951 |
| 2151 | 200836_s_at | MAP4 | NM_001134364 |
| 2152 | 1555677_s_at | SMC1A | NM_006306 |
| 2153 | 200067_x_at | SNX3 | NM_003795 |
| 2154 | 203685_at | BCL2 | NM_000633 |
| 2155 | 202354_s_at | GTF2F1 | NM_002096 |
| 2156 | 212566_at | MAP4 | NM_001134364 |
| 2157 | 213302_at | PFAS | NM_012393 |
| 2158 | 217378_x_at | LOC100130100 | XM_001716310 |
| 2159 | 222481_at | FXC1 | NM_012192 |
| 2160 | 228639_at | — | AA251347 |
| 2161 | 237753_at | — | AA873230 |
| 2162 | 240698_s_at | — | AA987545 |
| 2163 | 224917_at | MIR21 | AY699265 |
| 2164 | 243_g_at | MAP4 | NM_001134364 |
| 2165 | 209604_s_at | GATA3 | NM_001002295 |
| 2166 | 213957_s_at | CEP350 | NM_014810 |
| 2167 | 225320_at | CCDC109A | NM_138357 |
| 2168 | 228926_s_at | SMARCA2 | NM_003070 |
| 2169 | 217170_at | — | ENST00000390443 |
| 2170 | 240656_at | — | AI798924 |
| 2171 | 1554343_a_at | STAP1 | NM_012108 |
| 2172 | 205530_at | ETFDH | NM_004453 |
| 2173 | 200825_s_at | HYOU1 | NM_001130991 |
| 2174 | 217437_s_at | TACC1 | NM_001122824 |
| 2175 | 208649_s_at | VCP | NM_007126 |
| 2176 | 236279_at | — | AA614270 |
| 2177 | 237515_at | TMEM56 | NM_152487 |
| 2178 | 205126_at | VRK2 | NM_001130480 |
| 2179 | 212125_at | RANGAP1 | NM_002883 |
| 2180 | 208577_at | HIST1H3C | NM_003531 |
| 2181 | 213620_s_at | ICAM2 | NM_000873 |
| 2182 | 212741_at | MAOA | NM_000240 |
| 2183 | 212375_at | EP400 | NM_015409 |
| 2184 | 212109_at | HN1L | NM_144570 |
| 2185 | 234681_s_at | CHD6 | NM_032221 |
| 2186 | 218575_at | ANAPC1 | NM_022662 |
| 2187 | 201176_s_at | ARCN1 | NM_001142281 |
| 2188 | 222694_at | MGC2752 | NR_026052 |
| 2189 | 212396_s_at | KIAA0090 | NM_015047 |
| 2190 | 234964_at | TRD@ | AK310675 |
| 2191 | 213360_s_at | POM121 | NM_001099415 |
| 2192 | 214881_s_at | UBTF | NM_001076683 |
| 2193 | 206337_at | CCR7 | NM_001838 |
| 2194 | 223304_at | SLC37A3 | NM_032295 |
| 2195 | 1567214_a_at | PNN | NM_002687 |
| 2196 | 225135_at | SIN3A | NM_001145357 |
| 2197 | 204594_s_at | SMCR7L | NM_019008 |
| 2198 | 200005_at | EIF3D | NM_003753 |
| 2199 | 226423_at | PAQR8 | NM_133367 |
| 2200 | 202032_s_at | MAN2A2 | NM_006122 |
| 2201 | 216905_s_at | ST14 | NM_021978 |
| 2202 | 225624_at | SNX29 | NM_001080530 |
| 2203 | 206569_at | IL24 | NM_006850 |
| 2204 | 218648_at | CRTC3 | NM_001042574 |
| 2205 | 217497_at | TYMP | NM_001113755 |
| 2206 | 202518_at | BCL7B | NM_001707 |
| 2207 | 226987_at | RBM15B | NM_013286 |
| 2208 | 218091_at | AGFG1 | NM_001135187 |
| 2209 | 235372_at | FCRLA | NM_032738 |
| 2210 | 225669_at | IFNAR1 | NM_000629 |
| 2211 | 204643_s_at | ENOX2 | NM_006375 |
| 2212 | 212424_at | PDCD11 | NM_014976 |
| 2213 | 244015_at | — | AA704163 |
| 2214 | 222126_at | AGFG2 | NM_006076 |
| 2215 | 210561_s_at | WSB1 | NM_015626 |
| 2216 | 236796_at | — | AA129098 |
| 2217 | 243066_at | NPL | NM_030769 |
| 2218 | 1555261_at | — | AL832319 |
| 2219 | 204683_at | ICAM2 | NM_000873 |
| 2220 | 218001_at | MRPS2 | NM_016034 |
| 2221 | 209850_s_at | CDC42EP2 | NM_006779 |
| 2222 | 219722_s_at | GDPD3 | NM_024307 |
| 2223 | 219599_at | EIF4B | NM_001417 |
| 2224 | 231296_at | — | ENST00000439273 |
| 2225 | 201614_s_at | RUVBL1 | NM_003707 |
| 2226 | 243764_at | VSIG1 | NM_182607 |
| 2227 | 242104_at | — | AA687144 |
| 2228 | 213646_x_at | TUBA1B | NM_006082 |
| 2229 | 222696_at | AXIN2 | NM_004655 |
| 2230 | 242783_at | — | GENSCAN00000040863 |
| 2231 | 207819_s_at | ABCB4 | NM_000443 |
| 2232 | 205861_at | SPIB | NM_003121 |
| 2233 | 224833_at | ETS1 | NM_001143820 |
| 2234 | 201648_at | JAK1 | NM_002227 |
| 2235 | 218754_at | NOL9 | NM_024654 |
| 2236 | 239085_at | JDP2 | NM_001135047 |
| 2237 | 225898_at | WDR54 | NM_032118 |
| 2238 | 202953_at | C1QB | NM_000491 |
| 2239 | 217235_x_at | IGL@ | AF026926 |
| 2240 | 240515_at | — | AA779991 |
| 2241 | 227307_at | TSPAN18 | NM_001031730 |
| 2242 | 215797_at | TRAV8-3 | X58769 |
| 2243 | 218865_at | MOSC1 | NM_022746 |
| 2244 | 208723_at | USP11 | NM_004651 |
| 2245 | 205445_at | PRL | NM_000948 |
| 2246 | 211300_s_at | TP53 | NM_000546 |
| 2247 | 233124_s_at | ECHDC1 | NM_001002030 |
| 2248 | 204642_at | S1PR1 | NM_001400 |
| 2249 | 219717_at | DCAF16 | NM_017741 |
| 2250 | 218619_s_at | SUV39H1 | NM_003173 |
| 2251 | 202906_s_at | NBN | NM_002485 |
| 2252 | 224311_s_at | CAB39 | NM_001130849 |
| 2253 | 221969_at | — | ENST00000358127 |
| 2254 | 229252_at | ATG9B | NM_173681 |
| 2255 | 1558662_s_at | BANK1 | NM_001083907 |
| 2256 | 208623_s_at | EZR | NM_001111077 |
| 2257 | 213087_s_at | EEF1D | NM_001130053 |
| 2258 | 242606_at | — | AA360683 |
| 2259 | 216528_at | — | AL049244 |
| 2260 | 200715_x_at | RPL13A | NM_012423 |
| 2261 | 217328_at | LOC100134017 | XM_001717113 |
| 2262 | 227075_at | ELP3 | NM_018091 |
| 2263 | 219880_at | — | AK026811 |
| 2264 | 212769_at | TLE3 | NM_001105192 |
| 2265 | 228309_at | — | AF090935 |
| 2266 | 205297_s_at | CD79B | NM_000626 |
| 2267 | 227216_at | RLTPR | NM_001013838 |
| 2268 | 1562612_at | — | AK054812 |
| 2269 | 240156_at | — | AA417099 |
| 2270 | 235096_at | LEO1 | NM_138792 |
| 2271 | 217480_x_at | LOC100287723 | XM_001713971 |
| 2272 | 213590_at | SLC16A5 | NM_004695 |
| 2273 | 206420_at | IGSF6 | NM_005849 |
| 2274 | 229348_at | UBIAD1 | NM_013319 |
| 2275 | 206126_at | CXCR5 | NM_001716 |
| 2276 | 212770_at | TLE3 | NM_001105192 |
| 2277 | 211161_s_at | COL3A1 | NM_000090 |
| 2278 | 208663_s_at | TTC3 | NM_001001894 |
| 2279 | 226055_at | ARRDC2 | NM_001025604 |
| 2280 | 235965_at | — | BX648200 |
| 2281 | 200593_s_at | HNRNPU | NM_004501 |
| 2282 | 212480_at | CYTSA | NM_001145468 |
| 2283 | 200795_at | SPARCL1 | NM_001128310 |
| 2284 | 219667_s_at | BANK1 | NM_001083907 |
| 2285 | 48117_at | CCDC101 | NM_138414 |
| 2286 | 209702_at | FTO | NM_001080432 |
| 2287 | 201217_x_at | RPL3 | NM_000967 |
| 2288 | 208842_s_at | GORASP2 | NM_015530 |
| 2289 | 1558215_s_at | UBTF | NM_001076683 |
| 2290 | 212039_x_at | RPL3 | NM_000967 |
| 2291 | 207008_at | IL8RB | NM_001557 |
| 2292 | 208687_x_at | HSPA8 | NM_006597 |
| 2293 | 217099_s_at | GEMIN4 | NM_015721 |
| 2294 | 229093_at | NOS3 | NM_000603 |
| 2295 | 200998_s_at | CKAP4 | NM_006825 |
| 2296 | 224607_s_at | SRP68 | NM_014230 |
| 2297 | 228181_at | SLC30A1 | NM_021194 |
| 2298 | 227646_at | EBF1 | NM_024007 |
| 2299 | 219108_x_at | DDX27 | NM_001007559 |
| 2300 | 212076_at | MLL | NM_005933 |
| 2301 | 214179_s_at | NFE2L1 | NM_003204 |
| 2302 | 201778_s_at | KIAA0494 | NM_014774 |
| 2303 | 222915_s_at | BANK1 | NM_001083907 |
| 2304 | 203611_at | TERF2 | NM_005652 |
| 2305 | 214643_x_at | BIN1 | NM_004305 |
| 2306 | 215176_x_at | LOC100291464 | XM_002346408 |
| 2307 | 227336_at | DTX1 | NM_004416 |
| 2308 | 210616_s_at | SEC31A | NM_001077206 |
| 2309 | 221575_at | SCLY | NM_016510 |
| 2310 | 219864_s_at | RCAN3 | NM_013441 |
| 2311 | 204388_s_at | MAOA | NM_000240 |
| 2312 | 242309_at | — | AA424143 |
| 2313 | 209995_s_at | TCL1A | NM_001098725 |
| 2314 | 223246_s_at | STRBP | NM_018387 |
| 2315 | 208581_x_at | MT1X | NM_005952 |
| 2316 | 208664_s_at | TTC3 | NM_001001894 |
| 2317 | 201115_at | POLD2 | NM_001127218 |
| 2318 | 219999_at | MAN2A2 | NM_006122 |
| 2319 | 205254_x_at | TCF7 | NM_001134851 |
| 2320 | 225006_x_at | TH1L | NM_198976 |
| 2321 | 205255_x_at | TCF7 | NM_001134851 |
| 2322 | 225110_at | OGFOD1 | NM_018233 |
| 2323 | 231697_s_at | TMEM49 | NM_030938 |
| 2324 | 225245_x_at | H2AFJ | NM_177925 |
| 2325 | 213351_s_at | TMCC1 | NM_001017395 |
| 2326 | 201746_at | TP53 | NM_000546 |
| 2327 | 223565_at | MGC29506 | NM_016459 |
| 2328 | 209994_s_at | ABCB1 | NM_000443 |
| 2329 | 217719_at | EIF3L | NM_016091 |
| 2330 | 203572_s_at | TAF6 | NM_005641 |
| 2331 | 225352_at | SEC62 | NM_003262 |
| 2332 | 1552773_at | CLEC4D | NM_080387 |
| 2333 | 209773_s_at | RRM2 | NM_001034 |
| 2334 | 209004_s_at | FBXL5 | NM_012161 |
| 2335 | 214439_x_at | BIN1 | NM_004305 |
| 2336 | 230175_s_at | — | ENST00000500586 |
| 2337 | 235154_at | TAF3 | NM_031923 |
| 2338 | 228496_s_at | CRIM1 | NM_016441 |
| 2339 | 237071_at | — | AI342132 |
| 2340 | 227093_at | USP36 | NM_025090 |
| 2341 | 204484_at | PIK3C2B | NM_002646 |
| 2342 | 201027_s_at | EIF5B | NM_015904 |
| 2343 | 225865_x_at | TH1L | NM_198976 |
| 2344 | 225370_at | PYGO2 | NM_138300 |
| 2345 | 202230_s_at | CHERP | NM_006387 |
| 2346 | 219997_s_at | COPS7B | NM_022730 |
| 2347 | 222920_s_at | KIAA0748 | NM_001098815 |
| 2348 | 226602_s_at | BCR | NM_004327 |
| 2349 | 241613_at | — | AI254302 |
| 2350 | 1563674_at | FCRL2 | NM_030764 |
| 2351 | 239377_at | EIF1AD | NM_032325 |
| 2352 | 216212_s_at | DKC1 | NM_001142463 |
| 2353 | 224281_s_at | NGRN | NM_001033088 |
| 2354 | 221234_s_at | BACH2 | NM_021813 |
| 2355 | 204197_s_at | RUNX3 | NM_001031680 |
| 2356 | 221477_s_at | SOD2 | NM_000636 |
| 2357 | 200910_at | CCT3 | NM_001008800 |
| 2358 | 226121_at | DHRS13 | NM_144683 |
| 2359 | 208858_s_at | ESYT1 | NM_015292 |
| 2360 | 222686_s_at | CPPED1 | NM_001099455 |
| 2361 | 209503_s_at | PSMC5 | NM_002805 |
| 2362 | 201719_s_at | EPB41L2 | NM_001135554 |
| 2363 | 229382_at | C1orf183 | NM_019099 |
| 2364 | 212400_at | FAM102A | NM_001035254 |
| 2365 | 200965_s_at | ABLIM1 | NM_001003407 |
| 2366 | 207094_at | IL8RA | NM_000634 |
| 2367 | 227770_at | — | AA702005 |
| 2368 | 1568852_x_at | — | BC045735 |
| 2369 | 1563209_a_at | MACROD2 | NM_001033087 |
| 2370 | 224632_at | GPATCH4 | NM_015590 |
| 2371 | 232981_s_at | SYNRG | NM_001163544 |
| 2372 | 203936_s_at | MMP9 | NM_004994 |
| 2373 | 210156_s_at | PCMT1 | NM_005389 |
| 2374 | 211313_s_at | BAZ1B | NM_032408 |
| 2375 | 214626_s_at | GANAB | NM_198334 |
| 2376 | 233312_at | ROPN1L | NM_031916 |
| 2377 | 242241_x_at | — | AW104358 |
| 2378 | 225583_at | UXS1 | NM_025076 |
| 2379 | 201503_at | G3BP1 | NM_005754 |
| 2380 | 229513_at | STRBP | NM_018387 |
| 2381 | 233261_at | EBF1 | NM_024007 |
| 2382 | 213489_at | MAPRE2 | NM_001143826 |
| 2383 | 225002_s_at | SUMF2 | NM_001042469 |
| 2384 | 220384_at | TXNDC3 | NM_016616 |
| 2385 | 208914_at | GGA2 | NM_015044 |
| 2386 | 217230_at | EZR | NM_001111077 |
| 2387 | 200655_s_at | CALM1 | NM_006888 |
| 2388 | 203500_at | GCDH | NM_000159 |
| 2389 | 228787_s_at | BCAS4 | NM_001010974 |
| 2390 | 200671_s_at | SPTBN1 | NM_003128 |
| 2391 | 224688_at | C7orf42 | NM_017994 |
| 2392 | 218569_s_at | KBTBD4 | NM_016506 |
| 2393 | 225296_at | ZNF317 | NM_020933 |
| 2394 | 216652_s_at | DR1 | NM_001938 |
| 2395 | 221741_s_at | YTHDF1 | NM_017798 |
| 2396 | 211645_x_at | — | ENST00000390254 |
| 2397 | 209092_s_at | GLOD4 | NM_016080 |
| 2398 | 217925_s_at | C6orf106 | NM_022758 |
| 2399 | 200702_s_at | DDX24 | NM_020414 |
| 2400 | 206177_s_at | ARG1 | NM_000045 |
| 2401 | 216133_at | TRD@ | ENST00000443611 |
| 2402 | 219122_s_at | THG1L | NM_017872 |
| 2403 | 213609_s_at | SEZ6L | NM_021115 |
| 2404 | 217821_s_at | WBP11 | NM_016312 |
| 2405 | 200619_at | SF3B2 | NM_006842 |
| 2406 | 218023_s_at | FAM53C | NM_001135647 |
| 2407 | 38340_at | HIP1R | NM_003959 |
| 2408 | 203747_at | AQP3 | NM_004925 |
| 2409 | 213336_at | BAZ1B | NM_032408 |
| 2410 | 231553_s_at | MICAL3 | NM_001122731 |
| 2411 | 228325_at | KIAA0146 | NM_001080394 |
| 2412 | 221790_s_at | LDLRAP1 | NM_015627 |
| 2413 | 201554_x_at | GYG1 | NM_004130 |
| 2414 | 216207_x_at | IGKC | XM_001715827 |
| 2415 | 229934_at | — | DQ680071 |
| 2416 | 211456_x_at | MT1P2 | AF333388 |
| 2417 | 204504_s_at | HIRIP3 | NM_003609 |
| 2418 | 242722_at | LMO7 | NM_005358 |
| 2419 | 1569932_at | NHSL2 | NM_001013627 |
| 2420 | 226082_s_at | SFRS15 | NM_001145444 |
| 2421 | 219073_s_at | OSBPL10 | NM_017784 |
| 2422 | 226715_at | FOXK1 | NM_001037165 |
| 2423 | 202474_s_at | HCFC1 | NM_005334 |
| 2424 | 203980_at | FABP4 | NM_001442 |
| 2425 | 234370_at | VSIG1 | NM_182607 |
| 2426 | 232035_at | HIST1H4H | NM_003543 |
| 2427 | 217938_s_at | KCMF1 | NM_020122 |
| 2428 | 201270_x_at | NUDCD3 | NM_015332 |
| 2429 | 210948_s_at | LEF1 | NM_001130713 |
| 2430 | 200022_at | RPL18 | NM_000979 |
| 2431 | 208880_s_at | PRPF6 | NM_012469 |
| 2432 | 208622_s_at | EZR | NM_001111077 |
| 2433 | 202926_at | NBAS | NM_015909 |
| 2434 | 226744_at | METT10D | NM_024086 |
| 2435 | 236465_at | RNF175 | NM_173662 |
| 2436 | 208875_s_at | PAK2 | NM_002577 |
| 2437 | 231418_at | — | AA749348 |
| 2438 | 230865_at | LIX1 | NM_153234 |
| 2439 | 203051_at | BAHD1 | NM_014952 |
| 2440 | 217036_at | LOC100293679 | XM_002345543 |
| 2441 | 230983_at | FAM129C | NM_001098524 |
| 2442 | 212303_x_at | KHSRP | NM_003685 |
| 2443 | 210688_s_at | CPT1A | NM_001031847 |
| 2444 | 1555779_a_at | CD79A | NM_001783 |
| 2445 | 226069_at | PRICKLE1 | NM_001144881 |
| 2446 | 210915_x_at | TRBC1 | AF043180 |
| 2447 | 235281_x_at | AHNAK | NM_001620 |
| 2448 | 201934_at | WDR82 | NM_025222 |
| 2449 | 200060_s_at | RNPS1 | NM_006711 |
| 2450 | 200992_at | IPO7 | NM_006391 |
| 2451 | 221822_at | CCDC101 | NM_138414 |
| 2452 | 222169_x_at | SH2D3A | NM_005490 |
| 2453 | 1552541_at | TAGAP | NM_054114 |
| 2454 | 208598_s_at | HUWE1 | NM_031407 |
| 2455 | 220370_s_at | USP36 | NM_025090 |
| 2456 | 208960_s_at | KLF6 | NM_001160124 |
| 2457 | 212069_s_at | BAT2L | NM_013318 |
| 2458 | 220078_at | USP48 | NM_001032730 |
| 2459 | 201561_s_at | CLSTN1 | NM_001009566 |
| 2460 | 201611_s_at | ICMT | NM_012405 |
| 2461 | 226163_at | ZBTB9 | NM_152735 |
| 2462 | 212257_s_at | SMARCA2 | NM_003070 |
| 2463 | 213349_at | TMCC1 | NM_001017395 |
| 2464 | 206980_s_at | FLT3LG | NM_001459 |
| 2465 | 231662_at | ARG1 | NM_000045 |
| 2466 | 212802_s_at | GAPVD1 | NM_015635 |
| 2467 | 210125_s_at | BANF1 | NM_001143985 |
| 2468 | 211073_x_at | RPL3 | NM_000967 |
| 2469 | 222450_at | PMEPA1 | NM_020182 |
| 2470 | 213145_at | FBXL14 | NM_152441 |
| 2471 | 221744_at | DCAF7 | NM_005828 |
| 2472 | 227344_at | IKZF1 | NM_006060 |
| 2473 | 200895_s_at | FKBP4 | NM_002014 |
| 2474 | 225876_at | NIPAL3 | NM_020448 |
| 2475 | 1568987_at | MGC57346 | NR_026680 |
| 2476 | 216981_x_at | SPN | NM_001030288 |
| 2477 | 1556055_at | — | U90905 |
| 2478 | 219528_s_at | BCL11B | NM_022898 |
| 2479 | 201892_s_at | IMPDH2 | NM_000884 |
| 2480 | 212827_at | IGHM | BC009851 |
| 2481 | 227420_at | TNFAIP8L1 | NM_152362 |
| 2482 | 230245_s_at | LOC283663 | NR_024433 |
| 2483 | 225487_at | TMEM18 | NM_152834 |
| 2484 | 212617_at | ZNF609 | NM_015042 |
| 2485 | 218149_s_at | ZNF395 | NM_018660 |
| 2486 | 218764_at | PRKCH | NM_006255 |
| 2487 | 215621_s_at | IGHD | AK057614 |
| 2488 | 212313_at | CHMP7 | NM_152272 |
| 2489 | 201999_s_at | DYNLT1 | NM_006519 |
| 2490 | 1560538_at | — | BC033936 |
| 2491 | 39402_at | IL1B | NM_000576 |
| 2492 | 216873_s_at | ATP8B2 | NM_001005855 |
| 2493 | 239827_at | C13orf15 | NM_014059 |
| 2494 | 205527_s_at | GEMIN4 | NM_015721 |
| 2495 | 1556737_at | LOC388387 | NR_027254 |
| 2496 | 212098_at | LOC151162 | NM_002410 |
| 2497 | 220326_s_at | FLJ10357 | NM_018071 |
| 2498 | 225875_s_at | NIPAL3 | NM_020448 |
| 2499 | 224187_x_at | HSPA8 | NM_006597 |
| 2500 | 226481_at | VPRBP | NM_014703 |
| 2501 | 212145_at | MRPS27 | NM_015084 |
| 2502 | 201164_s_at | PUM1 | NM_001020658 |
| 2503 | 211478_s_at | DPP4 | NM_001935 |
| 2504 | 220068_at | VPREB3 | NM_013378 |
| 2505 | 219301_s_at | CNTNAP2 | NM_014141 |
| 2506 | 243931_at | — | AA441806 |
| 2507 | 212376_s_at | EP400 | NM_015409 |
| 2508 | 1556394_a_at | — | AI912646 |
| 2509 | 242808_at | — | ENST00000462248 |
| 2510 | 55692_at | ELMO2 | NM_133171 |
| 2511 | 214359_s_at | HSP90AB1 | NM_007355 |
| 2512 | 218945_at | C16orf68 | NM_024109 |
| 2513 | 202117_at | ARHGAP1 | NM_004308 |
| 2514 | 206464_at | BMX | NM_001721 |
| 2515 | 202925_s_at | PLAGL2 | NM_002657 |
| 2516 | 1555751_a_at | GEMIN7 | NM_001007269 |
| 2517 | 200812_at | CCT7 | NM_001009570 |
| 2518 | 200694_s_at | DDX24 | NM_020414 |
| 2519 | 225141_at | — | CR607695 |
| 2520 | 228065_at | BCL9L | NM_182557 |
| 2521 | 201853_s_at | CDC25B | NM_004358 |
| 2522 | 226806_s_at | NFIA | NM_001134673 |
| 2523 | 214014_at | CDC42EP2 | NM_006779 |
| 2524 | 208895_s_at | DDX18 | NM_006773 |
| 2525 | 203648_at | TATDN2 | NM_014760 |
| 2526 | 212750_at | PPP1R16B | NM_015568 |
| 2527 | 205419_at | GPR183 | NM_004951 |
| 2528 | 209251_x_at | TUBA1C | NM_032704 |
| 2529 | 213772_s_at | GGA2 | NM_015044 |
| 2530 | 218564_at | RFWD3 | NM_018124 |
| 2531 | 213079_at | TSR2 | NM_058163 |
| 2532 | 200957_s_at | SSRP1 | NM_003146 |
| 2533 | 208621_s_at | EZR | NM_001111077 |
| 2534 | 209927_s_at | C1orf77 | NM_015607 |
| 2535 | 202093_s_at | PAF1 | NM_019088 |
| 2536 | 203580_s_at | SLC7A6 | NM_001076785 |
| 2537 | 226511_at | DCAF10 | NM_024345 |
| 2538 | 208445_s_at | BAZ1B | NM_032408 |
| 2539 | 211938_at | EIF4B | NM_001417 |
| 2540 | 218031_s_at | FOXN3 | NM_001085471 |
| 2541 | 41577_at | PPP1R16B | NM_015568 |
| 2542 | 221090_s_at | OGFOD1 | NM_018233 |
| 2543 | 201303_at | EIF4A3 | NM_014740 |
| 2544 | 221123_x_at | ZNF395 | NM_018660 |
| 2545 | 1556006_s_at | CSNK1A1 | NM_001025105 |
| 2546 | 200990_at | TRIM28 | NM_005762 |
| 2547 | 202524_s_at | SPOCK2 | NM_001134434 |
| 2548 | 229420_at | — | AK094885 |
| 2549 | 222439_s_at | THRAP3 | NM_005119 |
| 2550 | 208614_s_at | FLNB | NM_001164317 |
| 2551 | 221780_s_at | DDX27 | NM_017895 |
| 2552 | 209603_at | GATA3 | NM_001002295 |
| 2553 | 221712_s_at | WDR74 | NM_018093 |
| 2554 | 244313_at | CR1 | NM_000573 |
| 2555 | 217755_at | HN1 | NM_001002032 |
| 2556 | 211596_s_at | LRIG1 | NM_015541 |
| 2557 | 213891_s_at | TCF4 | NM_001083962 |
| 2558 | 211666_x_at | RPL3 | NM_000967 |
| 2559 | 211430_s_at | IGH@ | XM_001718220 |
| 2560 | 222896_at | TMEM38A | NM_024074 |
| 2561 | 1552772_at | CLEC4D | NM_080387 |
| 2562 | 202200_s_at | SRPK1 | NM_003137 |
| 2563 | 201555_at | MCM3 | NM_002388 |
| 2564 | 219419_at | C18orf22 | NM_024805 |
| 2565 | 218280_x_at | HIST2H2AA3 | NM_001040874 |
| 2566 | 244218_at | — | AI374686 |
| 2567 | 235401_s_at | FCRLA | NM_032738 |
| 2568 | 1558796_a_at | LOC728052 | XM_001717850 |
| 2569 | 221549_at | GRWD1 | NM_031485 |
| 2570 | 221733_s_at | GPATCH4 | NM_015590 |
| 2571 | 202106_at | GOLGA3 | NM_005895 |
| 2572 | 231377_at | CXorf65 | NM_001025265 |
| 2573 | 200916_at | TAGLN2 | NM_003564 |
| 2574 | 202123_s_at | ABL1 | NM_005157 |
| 2575 | 225557_at | CSRNP1 | NM_033027 |
| 2576 | 217767_at | C3 | NM_000064 |
| 2577 | 205049_s_at | CD79A | NM_001783 |
| 2578 | 208644_at | PARP1 | NM_001618 |
| 2579 | 211941_s_at | PEBP1 | NM_002567 |
| 2580 | 218511_s_at | PNPO | NM_018129 |
| 2581 | 222352_at | — | CR621785 |
| 2582 | 202589_at | TYMS | NM_001071 |
| 2583 | 233126_s_at | OLAH | NM_001039702 |
| 2584 | 224581_s_at | NUCKS1 | NM_022731 |
| 2585 | 220730_at | ZNF778 | NM_182531 |
| 2586 | 221558_s_at | LEF1 | NM_001130713 |
| 2587 | 1555826_at | EPR1 | NR_002219 |
| 2588 | 221528_s_at | ELMO2 | NM_133171 |
| 2589 | 207812_s_at | GORASP2 | NM_015530 |
| 2590 | 219451_at | MSRB2 | NM_012228 |
| 2591 | 226116_at | — | AK022602 |
| 2592 | 238071_at | LCN10 | NM_001001712 |
| 2593 | 218728_s_at | CNIH4 | NM_014184 |
| 2594 | 216262_s_at | TGIF2 | NM_021809 |
| 2595 | 39854_r_at | LOC100293124 | NM_020376 |
| 2596 | 213564_x_at | LDHB | NM_002300 |
| 2597 | 227855_at | FLJ10357 | NM_018071 |
| 2598 | 201076_at | NHP2L1 | NM_001003796 |
| 2599 | 206031_s_at | USP5 | NM_001098536 |
| 2600 | 226122_at | PLEKHG1 | NM_001029884 |
| 2601 | 214615_at | P2RY10 | NM_014499 |
| 2602 | 239203_at | C7orf53 | NM_001134468 |
| 2603 | 231830_x_at | RAB11FIP1 | NM_001002233 |
| 2604 | 229721_x_at | DERL3 | NM_001002862 |
| 2605 | 1563560_at | AHNAK | NM_001620 |
| 2606 | 219118_at | FKBP11 | NM_001143781 |
| 2607 | 230489_at | CD5 | NM_014207 |
| 2608 | 224732_at | CHTF8 | NM_001039690 |
| 2609 | 200000_s_at | PRPF8 | NM_006445 |
| 2610 | 215235_at | SPTAN1 | NM_001130438 |
| 2611 | 225918_at | GLG1 | NM_001145666 |
| 2612 | 214130_s_at | PDE4DIP | NM_001002810 |
| 2613 | 236402_at | — | AK124257 |
| 2614 | 212360_at | AMPD2 | NM_004037 |
| 2615 | 200936_at | RPL8 | NM_000973 |
| 2616 | 225562_at | RASA3 | NM_007368 |
| 2617 | 206324_s_at | DAPK2 | NM_014326 |
| 2618 | 201320_at | SMARCC2 | NM_001130420 |
| 2619 | 201361_at | TMEM109 | NM_024092 |
| 2620 | 214659_x_at | YLPM1 | NM_019589 |
| 2621 | 240326_at | — | AA226458 |
| 2622 | 220507_s_at | UPB1 | NM_016327 |
| 2623 | 39248_at | AQP3 | NM_004925 |
| 2624 | 205841_at | JAK2 | NM_004972 |
| 2625 | 219129_s_at | SAP30L | NM_001131062 |
| 2626 | 242422_at | — | AK128316 |
| 2627 | 242109_at | SYTL3 | NM_001009991 |
| 2628 | 234013_at | TRD@ | AY232281 |
| 2629 | 212348_s_at | KDM1 | NM_001009999 |
| 2630 | 211105_s_at | NFATC1 | NM_006162 |
| 2631 | 226311_at | — | BC098581 |
| 2632 | 200079_s_at | KARS | NM_001130089 |
| 2633 | 225796_at | PXK | NM_017771 |
| 2634 | 208611_s_at | SPTAN1 | NM_001130438 |
| 2635 | 201090_x_at | TUBA1B | NM_006082 |
| 2636 | 225628_s_at | MLLT6 | NM_005937 |
| 2637 | 214635_at | CLDN9 | NM_020982 |
| 2638 | 228340_at | TLE3 | NM_001105192 |
| 2639 | 213892_s_at | APRT | NM_000485 |
| 2640 | 212413_at | 38961 | NM_015129 |
| 2641 | 201075_s_at | SMARCC1 | NM_003074 |
| 2642 | 200064_at | HSP90AB1 | NM_007355 |
| 2643 | 213481_at | S100A13 | NM_001024210 |
| 2644 | 209558_s_at | HIP1R | NM_003959 |
| 2645 | 202705_at | CCNB2 | NM_004701 |
| 2646 | 241388_at | — | AK097885 |
| 2647 | 211816_x_at | FCAR | NM_002000 |
| 2648 | 231775_at | TNFRSF10A | NM_003844 |
| 2649 | 210338_s_at | HSPA8 | NM_006597 |
| 2650 | 207628_s_at | WBSCR22 | NM_017528 |
| 2651 | 57082_at | LDLRAP1 | NM_015627 |
| 2652 | 234574_at | — | AK024563 |
| 2653 | 200706_s_at | LITAF | NM_001136472 |
| 2654 | 224837_at | FOXP1 | NM_001012505 |
| 2655 | 223374_s_at | B3GALNT1 | NM_001038628 |
| 2656 | 224603_at | — | BC042949 |
| 2657 | 228659_at | — | AL832516 |
| 2658 | 218153_at | CARS2 | NM_024537 |
| 2659 | 211944_at | BAT2D1 | NM_015172 |
| 2660 | 210809_s_at | POSTN | NM_001135934 |
| 2661 | 221891_x_at | HSPA8 | NM_006597 |
| 2662 | 209670_at | TRAC | BC063385 |
| 2663 | 225130_at | ZRANB1 | NM_017580 |
| 2664 | 225353_s_at | C1QC | NM_001114101 |
| 2665 | 202092_s_at | ARL2BP | NM_012106 |
| 2666 | 219526_at | C14orf169 | NM_024644 |
| 2667 | 222186_at | ZFAND6 | NM_019006 |
| 2668 | 212144_at | UNC84B | NM_015374 |
| 2669 | 212646_at | RFTN1 | NM_015150 |
| 2670 | 222006_at | LETM1 | NM_012318 |
| 2671 | 200057_s_at | NONO | NM_001145408 |
| 2672 | 202578_s_at | DDX19A | NM_018332 |
| 2673 | 214661_s_at | NOP14 | NM_003703 |
| 2674 | 201490_s_at | PPIF | NM_005729 |
| 2675 | 205456_at | CD3E | NM_000733 |
| 2676 | 202870_s_at | CDC20 | NM_001255 |
| 2677 | 241329_s_at | — | GENSCAN00000003786 |
| 2678 | 205238_at | TRMT2B | NM_024917 |
| 2679 | 207826_s_at | ID3 | NM_002167 |
| 2680 | 243338_at | — | GENSCAN00000018368 |
| 2681 | 219892_at | TM6SF1 | NM_001144903 |
| 2682 | 214129_at | PDE4DIP | NM_001002810 |
| 2683 | 201080_at | PIP4K2B | NM_003559 |
| 2684 | 234339_s_at | GLTSCR2 | NM_015710 |
| 2685 | 221876_at | ZNF783 | NR_015357 |
| 2686 | 54037_at | HPS4 | NM_022081 |
| 2687 | 1560433_at | — | AI476295 |
| 2688 | 227198_at | AFF3 | NM_001025108 |
| 2689 | 38521_at | CD22 | NM_001771 |
| 2690 | 200045_at | ABCF1 | NM_001025091 |
| 2691 | 226981_at | MLL | NM_005933 |
| 2692 | 1560257_at | — | AI908420 |
| 2693 | 229064_s_at | RCAN3 | NM_013441 |
| 2694 | 1558186_s_at | CLLU1 | NM_001025233 |
| 2695 | 203158_s_at | GLS | NM_014905 |
| 2696 | 206485_at | CD5 | NM_014207 |
| 2697 | 221286_s_at | MGC29506 | NM_016459 |
| 2698 | 202910_s_at | CD97 | NM_001025160 |
| 2699 | 225852_at | ANKRD17 | NM_032217 |
| 2700 | 214669_x_at | IGKC | AB159729 |
| 2701 | 217422_s_at | CD22 | NM_001771 |
| 2702 | 1558185_at | CLLU1 | NM_001025233 |
| 2703 | 208152_s_at | DDX21 | NM_004728 |
| 2704 | 225145_at | NCOA5 | NM_020967 |
| 2705 | 221011_s_at | LBH | NM_030915 |
| 2706 | 212641_at | HIVEP2 | NM_006734 |
| 2707 | 220034_at | IRAK3 | NM_001142523 |
| 2708 | 204581_at | CD22 | NM_001771 |
| 2709 | 202845_s_at | RALBP1 | NM_006788 |
| 2710 | 211058_x_at | TUBA1B | NM_006082 |
| 2711 | 227173_s_at | BACH2 | NM_021813 |
| 2712 | 202523_s_at | SPOCK2 | NM_001134434 |
| 2713 | 226733_at | PFKFB2 | NM_001018053 |
| 2714 | 1557055_s_at | LOC643837 | NR_015368 |
| 2715 | 235460_at | SNX22 | NM_024798 |
| 2716 | 33850_at | MAP4 | NM_001134364 |
| 2717 | 223350_x_at | LIN7C | NM_018362 |
| 2718 | 200842_s_at | EPRS | NM_004446 |
| 2719 | 220476_s_at | C1orf183 | NM_019099 |
| 2720 | 39318_at | TCL1A | NM_001098725 |
| 2721 | 213947_s_at | NUP210 | NM_024923 |
| 2722 | 205173_x_at | CD58 | NM_001144822 |
| 2723 | 200072_s_at | HNRNPM | NM_005968 |
| 2724 | 201356_at | SF3A1 | NM_001005409 |
| 2725 | 204199_at | RALGPS1 | NM_014636 |
| 2726 | 228898_s_at | SMARCB1 | NM_001007468 |
| 2727 | 229072_at | — | AA456828 |
| 2728 | 218251_at | MID1IP1 | NM_001098790 |
| 2729 | 225134_at | SPRYD3 | NM_032840 |
| 2730 | 212185_x_at | MT2A | NM_005953 |
| 2731 | 202692_s_at | UBTF | NM_001076683 |
| 2732 | 241608_at | — | AI254302 |
| 2733 | 205926_at | IL27RA | NM_004843 |
| 2734 | 236437_at | — | AA779351 |
| 2735 | 209504_s_at | PLEKHB1 | NM_001130033 |
| 2736 | 221651_x_at | IGK@ | AJ010442 |
| 2737 | 222428_s_at | LARS | NM_020117 |
| 2738 | 203547_at | CD4 | NM_000616 |
| 2739 | 211796_s_at | TRBC1 | AF043179 |
| 2740 | 232867_at | — | AI916960 |
| 2741 | 210461_s_at | ABLIM1 | NM_001003407 |
| 2742 | 214579_at | NIPAL3 | NM_020448 |
| 2743 | 216457_s_at | SF3A1 | NM_001005409 |
| 2744 | 227400_at | NFIX | NM_002501 |
| 2745 | 201183_s_at | CHD4 | NM_001273 |
| 2746 | 208549_x_at | PTMAP7 | AF170294 |
| 2747 | 229719_s_at | DERL3 | NM_001002862 |
| 2748 | 203717_at | DPP4 | NM_001935 |
| 2749 | 206621_s_at | EIF4H | NM_022170 |
| 2750 | 232165_at | EPPK1 | NM_031308 |
| 2751 | 217760_at | TRIM44 | NM_017583 |
| 2752 | 212139_at | GCN1L1 | NM_006836 |

TABLE 15

| | |
|---|---|
| SEQ ID | SEQ ID |
| NO | NO |
| from | from |
| Table 1 | Table 14 |

Combination
Signature 1

| | |
|---|---|
| 43 | 2125 |
| 54 | 2194 |
| 61 | 2473 |
| 103 | 2480 |
| 110 | 2488 |
| 149 | 2588 |
| 206 | 2635 |
| 337 | 2638 |
| 346 | |
| 457 | |
| 481 | |
| 572 | |
| 796 | |
| 826 | |
| 860 | |
| 903 | |
| 1007 | |
| 1154 | |
| 1175 | |
| 1245 | |
| 1426 | |
| 1732 | |

Combination
Signature 2

| | |
|---|---|
| 89 | 2044 |
| 92 | 2416 |
| 149 | 2458 |
| 262 | 2473 |
| 269 | 2510 |
| 565 | 2538 |
| 617 | 2547 |
| 1311 | 2646 |

Combination
Signature 3

| | |
|---|---|
| 6 | 2010 |
| 12 | 2021 |
| 15 | 2022 |
| 19 | 2121 |
| 36 | 2139 |
| 47 | 2172 |
| 112 | 2217 |
| 118 | 2282 |
| | 2301 |
| | 2323 |
| | 2340 |
| | 2345 |
| | 2349 |
| | 2496 |
| | 2509 |
| | 2511 |
| | 2538 |
| | 2547 |
| | 2550 |
| | 2616 |
| | 2642 |
| | 2711 |
| | 2712 |
| | 2732 |

Combination
Signature 4

| | |
|---|---|
| 5 | 2008 |
| 6 | 2020 |
| 8 | 2031 |
| 9 | 2032 |
| 10 | 2039 |
| 11 | 2040 |
| 12 | 2060 |
| 13 | 2065 |
| 14 | 2072 |
| 16 | 2107 |
| 19 | 2138 |
| 21 | 2146 |
| 22 | 2152 |
| 28 | 2160 |
| 29 | 2162 |
| 32 | 2179 |
| 34 | 2187 |
| 36 | 2189 |
| 37 | 2208 |
| 38 | 2211 |
| 43 | 2213 |
| 56 | 2226 |
| 60 | 2228 |
| 71 | 2234 |
| 72 | 2235 |
| 76 | 2236 |
| 77 | 2243 |
| 78 | 2244 |
| 79 | 2251 |
| 80 | 2253 |
| 86 | 2255 |
| 87 | 2263 |
| 89 | 2277 |
| 97 | 2282 |
| 99 | 2283 |
| 100 | 2291 |
| 101 | 2296 |
| 102 | 2309 |
| 105 | 2310 |
| 110 | 2312 |
| 112 | 2316 |
| 113 | 2318 |
| 115 | 2319 |
| 120 | 2323 |
| 129 | 2326 |
| 130 | 2339 |
| 131 | 2343 |
| 132 | 2348 |
| 134 | 2351 |
| 137 | 2365 |
| 141 | 2374 |
| 144 | 2386 |
| 145 | 2390 |
| 149 | 2408 |
| 151 | 2416 |
| 158 | 2423 |
| 164 | 2430 |
| 168 | 2431 |
| 175 | 2438 |
| 178 | 2441 |
| 180 | 2448 |
| 183 | 2470 |
| 187 | 2480 |
| 191 | 2481 |
| 196 | 2483 |
| 199 | 2484 |
| 201 | 2485 |
| 211 | 2489 |
| 244 | 2494 |
| 258 | 2499 |
| 262 | 2502 |
| 271 | 2503 |
| 274 | 2515 |
| 279 | 2521 |
| 285 | 2523 |
| 292 | 2528 |
| 293 | 2529 |
| 302 | 2538 |
| 314 | 2546 |
| 315 | 2571 |
| 331 | 2578 |
| 335 | 2591 |
| 336 | 2594 |
| 341 | 2603 |
| 342 | 2618 |
| 343 | 2630 |
| 346 | 2645 |
| 351 | 2646 |
| 355 | 2648 |
| 356 | 2650 |
| 372 | 2654 |
| 375 | 2661 |
| 377 | 2663 |
| 382 | 2669 |
| 386 | 2700 |
| 398 | 2711 |
| 399 | 2712 |
| 401 | 2715 |
| 406 | 2719 |
| 411 | 2732 |
| 416 | 2733 |
| 421 | |
| 422 | |
| 438 | |
| 439 | |
| 440 | |
| 444 | |
| 453 | |
| 456 | |
| 461 | |
| 462 | |
| 465 | |
| 469 | |
| 493 | |
| 496 | |
| 497 | |
| 505 | |
| 506 | |
| 524 | |
| 526 | |
| 533 | |
| 534 | |
| 543 | |
| 544 | |
| 561 | |
| 566 | |
| 568 | |
| 569 | |
| 572 | |
| 579 | |
| 582 | |
| 599 | |
| 600 | |
| 602 | |
| 604 | |
| 613 | |
| 614 | |
| 617 | |
| 620 | |
| 624 | |
| 631 | |
| 642 | |
| 676 | |
| 677 | |
| 689 | |
| 690 | |
| 702 | |
| 707 | |
| 713 | |
| 718 | |
| 722 | |
| 730 | |
| 732 | |
| 745 | |
| 746 | |
| 760 | |
| 763 | |
| 769 | |
| 771 | |
| 783 | |
| 784 | |
| 785 | |
| 789 | |
| 799 | |
| 800 | |
| 814 | |
| 817 | |
| 824 | |
| 825 | |
| 826 | |
| 828 | |
| 851 | |
| 860 | |
| 865 | |
| 876 | |
| 877 | |
| 878 | |
| 883 | |
| 884 | |
| 890 | |
| 893 | |
| 903 | |
| 907 | |
| 910 | |
| 914 | |
| 923 | |
| 925 | |
| 951 | |
| 960 | |
| 964 | |
| 981 | |
| 987 | |
| 988 | |
| 991 | |
| 996 | |
| 1000 | |
| 1007 | |
| 1019 | |
| 1021 | |
| 1027 | |
| 1071 | |
| 1078 | |
| 1096 | |
| 1108 | |
| 1111 | |
| 1118 | |
| 1127 | |
| 1149 | |
| 1160 | |
| 1162 | |
| 1164 | |
| 1176 | |
| 1197 | |
| 1222 | |
| 1226 | |
| 1228 | |
| 1255 | |
| 1292 | |
| 1293 | |
| 1296 | |
| 1311 | |
| 1321 | |
| 1327 | |
| 1344 | |
| 1350 | |
| 1367 | |
| 1372 | |
| 1381 | |
| 1393 | |
| 1398 | |
| 1407 | |
| 1485 | |
| 1509 | |
| 1535 | |
| 1552 | |
| 1553 | |
| 1566 | |
| 1610 | |
| 1634 | |
| 1637 | |
| 1664 | |
| 1667 | |
| 1681 | |
| 1717 | |
| 1732 | |
| 1740 | |
| 1771 | |
| 1810 | |
| 1877 | |
| 1898 | |
| 1926 | |
| 1932 | |
| 1946 | |
| 1961 | |
| 1962 | |
| 2001 | |

Combination
Signature 5

| | |
|---|---|
| 3 | 2005 |
| 4 | 2047 |
| 8 | 2068 |
| 15 | 2074 |
| 19 | 2087 |
| 22 | 2101 |
| 23 | 2104 |
| 24 | 2127 |
| 30 | 2134 |
| 32 | 2138 |
| 36 | 2143 |
| 37 | 2147 |
| 38 | 2151 |
| 47 | 2155 |
| 51 | 2162 |
| 52 | 2163 |
| 56 | 2167 |
| 60 | 2190 |
| 61 | 2191 |
| 86 | 2212 |
| 87 | 2215 |
| 92 | 2218 |
| 93 | 2221 |
| 99 | 2226 |
| 100 | 2232 |
| 103 | 2238 |
| 107 | 2242 |
| 112 | 2247 |
| 118 | 2253 |
| 130 | 2266 |
| 136 | 2283 |
| 149 | 2288 |
| 154 | 2290 |
| 171 | 2293 |
| 183 | 2295 |
| 188 | 2301 |
| 199 | 2308 |
| 244 | 2309 |
| 258 | 2310 |
| 269 | 2323 |
| 285 | 2326 |
| 297 | 2334 |
| 302 | 2336 |
| 320 | 2340 |
| 331 | 2342 |
| 371 | 2345 |
| 375 | 2376 |
| 378 | 2385 |
| 397 | 2392 |
| 398 | 2415 |
| 399 | 2420 |
| 406 | 2427 |
| 412 | 2444 |
| 417 | 2453 |
| 422 | 2455 |
| 457 | 2459 |
| 461 | 2464 |
| 481 | 2467 |
| 506 | 2477 |
| 515 | 2489 |
| 518 | 2495 |
| 533 | 2499 |
| 561 | 2502 |
| 566 | 2504 |
| 569 | 2505 |
| 572 | 2513 |
| 609 | 2518 |
| 613 | 2522 |
| 617 | 2523 |
| 620 | 2542 |
| 642 | 2549 |
| 690 | 2550 |
| 702 | 2582 |
| 769 | 2586 |
| 785 | 2588 |
| 789 | 2605 |
| 799 | 2622 |
| 810 | 2634 |
| 824 | 2643 |
| 825 | 2654 |
| 826 | 2655 |
| 903 | 2657 |
| 923 | 2661 |
| 925 | 2665 |
| 932 | 2669 |
| 944 | 2672 |
| 997 | 2687 |
| 1010 | 2688 |
| 1038 | 2697 |
| 1043 | 2699 |
| 1096 | 2700 |
| 1118 | 2711 |
| 1175 | 2714 |
| 1296 | 2716 |
| 1407 | 2721 |
| 1535 | 2724 |
| 1611 | 2732 |
| 1681 | 2735 |
| 1732 | 2742 |
| 1946 | 2747 |

Combination
Signature 6

| | |
|---|---|
| 2 | 2008 |
| 3 | 2010 |
| 5 | 2013 |
| 6 | 2014 |
| 8 | 2021 |
| 12 | 2022 |
| 15 | 2032 |
| 16 | 2037 |
| 19 | 2039 |
| 30 | 2044 |
| 32 | 2045 |
| 34 | 2046 |
| 36 | 2047 |
| 37 | 2048 |
| 43 | 2049 |
| 44 | 2053 |
| 45 | 2058 |
| 47 | 2060 |
| 54 | 2061 |
| 79 | 2062 |
| 83 | 2068 |
| 86 | 2073 |
| 89 | 2074 |
| 92 | 2075 |
| 95 | 2077 |
| 100 | 2078 |
| 103 | 2081 |
| 107 | 2082 |
| 112 | 2086 |
| 118 | 2087 |
| 124 | 2088 |
| 130 | 2093 |
| 136 | 2095 |
| 149 | 2096 |
| 154 | 2097 |
| 157 | 2098 |
| 159 | 2100 |
| 171 | 2101 |
| 172 | 2104 |
| 183 | 2105 |
| 188 | 2108 |
| 196 | 2110 |
| 199 | 2111 |
| 206 | 2112 |
| 256 | 2116 |
| 258 | 2117 |
| 262 | 2119 |
| 269 | 2121 |
| 279 | 2125 |
| 297 | 2129 |
| 302 | 2130 |
| 331 | 2134 |
| 342 | 2137 |
| 356 | 2138 |
| 375 | 2139 |
| 397 | 2142 |
| 398 | 2143 |
| 406 | 2145 |
| 412 | 2150 |
| 417 | 2151 |
| 422 | 2152 |
| 448 | 2157 |
| 461 | 2160 |
| 506 | 2161 |
| 561 | 2162 |
| 566 | 2163 |
| 569 | 2165 |
| 570 | 2168 |
| 617 | 2169 |
| 624 | 2172 |
| 642 | 2184 |
| 696 | 2186 |
| 763 | 2187 |
| 769 | 2189 |
| 799 | 2191 |
| 810 | 2192 |
| 814 | 2194 |
| 824 | 2195 |
| 825 | 2196 |
| 826 | 2201 |
| 932 | 2202 |
| 944 | 2208 |
| 1010 | 2209 |
| 1096 | 2211 |
| 1106 | 2212 |
| 1118 | 2214 |
| 1311 | 2215 |
| 1426 | 2217 |
| 1535 | 2221 |
| 1611 | 2222 |
| 1681 | 2228 |
| | 2234 |
| | 2235 |
| | 2236 |
| | 2241 |
| | 2242 |
| | 2243 |
| | 2253 |
| | 2256 |
| | 2261 |
| | 2263 |
| | 2264 |
| | 2266 |
| | 2274 |
| | 2275 |
| | 2276 |
| | 2277 |
| | 2282 |
| | 2286 |
| | 2288 |
| | 2289 |
| | 2291 |
| | 2292 |
| | 2293 |
| | 2299 |
| | 2301 |
| | 2303 |
| | 2309 |
| | 2312 |
| | 2315 |
| | 2319 |
| | 2321 |
| | 2323 |
| | 2326 |
| | 2327 |
| | 2333 |
| | 2339 |
| | 2340 |
| | 2341 |
| | 2342 |
| | 2345 |
| | 2349 |
| | 2351 |
| | 2354 |
| | 2357 |
| | 2359 |
| | 2364 |
| | 2365 |
| | 2373 |
| | 2375 |
| | 2376 |
| | 2383 |
| | 2384 |
| | 2385 |
| | 2386 |
| | 2389 |
| | 2390 |
| | 2391 |
| | 2394 |
| | 2398 |
| | 2400 |
| | 2401 |
| | 2409 |
| | 2415 |
| | 2416 |
| | 2420 |
| | 2421 |
| | 2423 |
| | 2425 |
| | 2428 |
| | 2429 |
| | 2431 |
| | 2432 |
| | 2434 |
| | 2441 |
| | 2444 |
| | 2448 |
| | 2458 |
| | 2459 |
| | 2460 |
| | 2461 |
| | 2469 |
| | 2472 |
| | 2473 |
| | 2474 |
| | 2477 |
| | 2478 |
| | 2479 |
| | 2480 |
| | 2485 |
| | 2488 |
| | 2489 |
| | 2494 |
| | 2495 |
| | 2496 |
| | 2498 |
| | 2502 |
| | 2503 |
| | 2504 |
| | 2509 |
| | 2510 |
| | 2511 |
| | 2515 |
| | 2518 |
| | 2519 |
| | 2523 |
| | 2531 |
| | 2532 |
| | 2533 |
| | 2538 |
| | 2539 |
| | 2540 |
| | 2543 |
| | 2546 |
| | 2547 |
| | 2550 |
| | 2551 |
| | 2564 |
| | 2570 |
| | 2571 |
| | 2574 |
| | 2578 |
| | 2582 |
| | 2588 |
| | 2594 |
| | 2601 |
| | 2603 |
| | 2604 |
| | 2606 |
| | 2607 |
| | 2611 |
| | 2616 |
| | 2620 |
| | 2622 |
| | 2627 |
| | 2630 |
| | 2631 |
| | 2634 |
| | 2635 |
| | 2638 |
| | 2641 |
| | 2642 |
| | 2646 |
| | 2649 |
| | 2654 |
| | 2656 |
| | 2662 |
| | 2670 |
| | 2671 |
| | 2672 |
| | 2675 |
| | 2679 |
| | 2688 |
| | 2693 |
| | 2694 |
| | 2696 |
| | 2697 |
| | 2699 |
| | 2704 |
| | 2705 |
| | 2706 |
| | 2711 |
| | 2712 |
| | 2715 |
| | 2716 |
| | 2724 |
| | 2728 |
| | 2732 |
| | 2733 |
| | 2741 |
| | 2750 |

Combination
Signature 7

| | |
|---|---|
| 2 | 2005 |
| 3 | 2007 |
| 5 | 2010 |
| 8 | 2013 |
| 9 | 2014 |
| 10 | 2027 |
| 11 | 2039 |
| 13 | 2044 |
| 14 | 2046 |
| 16 | 2047 |
| 17 | 2048 |
| 19 | 2049 |
| 20 | 2050 |
| 21 | 2051 |
| 22 | 2052 |
| 23 | 2053 |
| 24 | 2055 |
| 28 | 2059 |
| 29 | 2061 |
| 30 | 2062 |
| 31 | 2065 |
| 32 | 2068 |
| 34 | 2073 |
| 35 | 2074 |
| 36 | 2075 |
| 37 | 2080 |
| 38 | 2081 |
| 40 | 2083 |
| 41 | 2084 |
| 42 | 2086 |
| 43 | 2087 |
| 45 | 2089 |
| 47 | 2093 |
| 48 | 2094 |
| 49 | 2095 |
| 51 | 2097 |
| 52 | 2098 |
| 54 | 2100 |
| 56 | 2103 |
| 58 | 2104 |
| 60 | 2106 |
| 61 | 2109 |
| 63 | 2110 |
| 69 | 2111 |
| 70 | 2116 |
| 71 | 2120 |
| 72 | 2127 |
| 74 | 2134 |
| 76 | 2142 |
| 77 | 2145 |
| 78 | 2147 |
| 79 | 2148 |
| 80 | 2150 |
| 83 | 2152 |
| 87 | 2153 |
| 89 | 2154 |
| 91 | 2155 |
| 92 | 2156 |
| 93 | 2157 |
| 95 | 2158 |
| 96 | 2160 |
| 97 | 2161 |
| 98 | 2162 |
| 99 | 2163 |
| 100 | 2164 |
| 101 | 2169 |
| 102 | 2172 |
| 103 | 2179 |
| 105 | 2180 |
| 107 | 2184 |
| 108 | 2190 |
| 109 | 2193 |
| 110 | 2195 |
| 111 | 2200 |
| 112 | 2203 |
| 115 | 2204 |
| 117 | 2206 |
| 118 | 2208 |
| 120 | 2209 |
| 121 | 2212 |
| 122 | 2213 |
| 123 | 2214 |
| 124 | 2215 |
| 125 | 2224 |
| 126 | 2225 |
| 127 | 2227 |
| 129 | 2228 |
| 130 | 2231 |
| 132 | 2232 |
| 133 | 2235 |
| 134 | 2236 |
| 136 | 2241 |
| 137 | 2247 |
| 138 | 2249 |
| 139 | 2253 |
| 141 | 2254 |
| 145 | 2256 |
| 146 | 2270 |
| 148 | 2271 |
| 149 | 2274 |
| 153 | 2276 |
| 155 | 2278 |
| 157 | 2281 |
| 158 | 2283 |
| 159 | 2284 |
| 163 | 2286 |
| 164 | 2288 |
| 165 | 2289 |
| 168 | 2290 |
| 171 | 2293 |
| 174 | 2294 |
| 177 | 2295 |
| 178 | 2296 |
| 180 | 2298 |
| 183 | 2299 |
| 185 | 2300 |
| 186 | 2301 |
| 187 | 2306 |
| 188 | 2308 |
| 191 | 2312 |
| 193 | 2314 |
| 196 | 2319 |
| 197 | 2321 |
| 199 | 2327 |
| 201 | 2328 |
| 205 | 2335 |
| 206 | 2336 |
| 207 | 2337 |
| 211 | 2340 |
| 244 | 2342 |
| 255 | 2345 |
| 256 | 2346 |
| 258 | 2348 |
| 259 | 2349 |
| 262 | 2351 |
| 264 | 2352 |
| 269 | 2354 |
| 271 | 2359 |
| 272 | 2360 |
| 274 | 2367 |
| 275 | 2370 |
| 279 | 2373 |
| 281 | 2376 |
| 285 | 2382 |
| 286 | 2384 |
| 289 | 2385 |
| 292 | 2386 |
| 293 | 2389 |
| 297 | 2390 |
| 302 | 2391 |
| 304 | 2393 |
| 310 | 2398 |
| 312 | 2400 |
| 314 | 2404 |
| 315 | 2413 |
| 320 | 2414 |
| 322 | 2416 |
| 325 | 2420 |
| 329 | 2422 |
| 331 | 2423 |
| 333 | 2430 |
| 335 | 2431 |
| 336 | 2434 |
| 337 | 2436 |
| 340 | 2438 |
| 341 | 2441 |
| 342 | 2444 |
| 343 | 2445 |
| 346 | 2448 |
| 350 | 2450 |
| 351 | 2454 |
| 352 | 2456 |
| 355 | 2457 |
| 356 | 2458 |
| 358 | 2461 |
| 363 | 2463 |
| 371 | 2464 |
| 373 | 2468 |
| 375 | 2472 |
| 376 | 2473 |
| 377 | 2474 |
| 378 | 2475 |
| 380 | 2478 |
| 381 | 2484 |
| 382 | 2485 |
| 384 | 2489 |
| 385 | 2498 |
| 386 | 2500 |
| 389 | 2502 |
| 391 | 2503 |
| 392 | 2504 |
| 397 | 2505 |
| 398 | 2506 |
| 399 | 2509 |
| 401 | 2510 |
| 402 | 2511 |
| 404 | 2515 |
| 406 | 2518 |
| 408 | 2522 |
| 411 | 2523 |
| 412 | 2524 |
| 414 | 2531 |
| 416 | 2533 |
| 418 | 2534 |
| 419 | 2538 |
| 420 | 2539 |
| 421 | 2540 |
| 422 | 2545 |
| 423 | 2547 |
| 427 | 2558 |
| 430 | 2559 |
| 436 | 2562 |
| 438 | 2569 |
| 439 | 2571 |
| 440 | 2574 |
| 444 | 2576 |
| 447 | 2578 |
| 448 | 2582 |
| 453 | 2585 |
| 454 | 2586 |
| 456 | 2587 |
| 457 | 2588 |
| 461 | 2591 |
| 462 | 2601 |
| 465 | 2603 |
| 466 | 2606 |
| 469 | 2607 |
| 476 | 2611 |
| 480 | 2616 |
| 481 | 2618 |
| 483 | 2620 |
| 485 | 2621 |
| 486 | 2622 |
| 488 | 2626 |
| 495 | 2628 |
| 496 | 2630 |
| 497 | 2632 |
| 498 | 2634 |
| 503 | 2638 |
| 504 | 2640 |
| 505 | 2641 |
| 507 | 2642 |
| 509 | 2643 |
| 513 | 2648 |
| 514 | 2649 |
| 526 | 2653 |
| 527 | 2654 |
| 530 | 2656 |
| 533 | 2659 |
| 534 | 2661 |
| 537 | 2663 |
| 538 | 2668 |
| 540 | 2669 |
| 544 | 2671 |
| 547 | 2673 |
| 550 | 2675 |
| 552 | 2676 |
| 553 | 2677 |
| 557 | 2679 |
| 561 | 2683 |
| 564 | 2687 |
| 565 | 2688 |
| 566 | 2695 |
| 568 | 2697 |
| 569 | 2703 |
| 570 | 2705 |
| 572 | 2710 |
| 579 | 2713 |
| 583 | 2705 |
| 598 | 2710 |
| 599 | 2713 |
| 603 | 2719 |
| 604 | 2730 |
| 607 | 2732 |
| 609 | 2741 |
| 610 | |
| 613 | |
| 614 | |
| 617 | |
| 620 | |
| 624 | |
| 628 | |
| 631 | |
| 636 | |
| 637 | |
| 638 | |
| 642 | |
| 646 | |
| 647 | |
| 653 | |
| 659 | |
| 661 | |
| 662 | |
| 663 | |
| 664 | |
| 666 | |
| 675 | |
| 676 | |
| 677 | |
| 678 | |
| 679 | |
| 680 | |
| 689 | |
| 690 | |
| 692 | |
| 693 | |
| 696 | |
| 707 | |
| 709 | |
| 712 | |
| 713 | |
| 714 | |
| 715 | |
| 718 | |
| 719 | |
| 722 | |
| 725 | |
| 728 | |
| 730 | |
| 732 | |
| 733 | |
| 744 | |
| 745 | |
| 746 | |
| 749 | |
| 750 | |
| 753 | |
| 755 | |
| 756 | |
| 759 | |
| 761 | |
| 763 | |
| 766 | |
| 769 | |
| 770 | |
| 771 | |
| 783 | |
| 784 | |
| 785 | |
| 787 | |
| 789 | |
| 792 | |
| 796 | |
| 799 | |
| 800 | |
| 801 | |
| 804 | |
| 810 | |
| 814 | |
| 817 | |
| 825 | |
| 826 | |
| 829 | |
| 831 | |
| 837 | |
| 844 | |
| 845 | |
| 847 | |
| 851 | |
| 858 | |
| 860 | |
| 865 | |
| 869 | |
| 876 | |
| 877 | |
| 878 | |
| 881 | |
| 884 | |
| 888 | |
| 890 | |
| 892 | |
| 893 | |
| 902 | |
| 903 | |
| 907 | |
| 910 | |
| 916 | |
| 918 | |
| 921 | |
| 925 | |
| 932 | |
| 939 | |
| 940 | |
| 941 | |
| 944 | |
| 951 | |
| 954 | |
| 957 | |
| 960 | |
| 961 | |
| 967 | |
| 971 | |
| 975 | |
| 978 | |
| 981 | |
| 987 | |
| 988 | |
| 991 | |
| 994 | |
| 997 | |
| 999 | |
| 1000 | |
| 1002 | |
| 1007 | |
| 1010 | |
| 1013 | |
| 1014 | |
| 1018 | |
| 1019 | |
| 1021 | |
| 1034 | |
| 1038 | |
| 1043 | |
| 1064 | |
| 1066 | |
| 1068 | |
| 1070 | |
| 1071 | |
| 1072 | |
| 1076 | |
| 1078 | |
| 1080 | |
| 1093 | |
| 1096 | |
| 1106 | |
| 1108 | |
| 1117 | |
| 1118 | |
| 1121 | |
| 1122 | |
| 1123 | |
| 1127 | |
| 1136 | |
| 1137 | |
| 1140 | |
| 1141 | |
| 1146 | |
| 1154 | |
| 1160 | |
| 1162 | |
| 1164 | |
| 1166 | |
| 1167 | |
| 1168 | |
| 1170 | |
| 1171 | |
| 1172 | |
| 1175 | |
| 1178 | |
| 1179 | |
| 1181 | |
| 1183 | |
| 1184 | |
| 1187 | |
| 1189 | |
| 1197 | |
| 1199 | |
| 1214 | |
| 1215 | |
| 1218 | |
| 1219 | |
| 1222 | |
| 1226 | |
| 1228 | |
| 1230 | |
| 1231 | |
| 1234 | |
| 1237 | |
| 1239 | |
| 1242 | |
| 1245 | |
| 1247 | |
| 1255 | |
| 1258 | |
| 1266 | |
| 1268 | |
| 1271 | |
| 1285 | |
| 1288 | |
| 1290 | |
| 1292 | |
| 1293 | |
| 1294 | |
| 1295 | |
| 1296 | |
| 1297 | |
| 1303 | |
| 1305 | |
| 1311 | |
| 1313 | |
| 1322 | |
| 1327 | |
| 1334 | |
| 1344 | |
| 1350 | |
| 1351 | |
| 1367 | |
| 1368 | |
| 1370 | |
| 1372 | |
| 1376 | |
| 1381 | |
| 1382 | |
| 1383 | |
| 1387 | |
| 1389 | |
| 1390 | |
| 1393 | |
| 1394 | |
| 1397 | |
| 1398 | |
| 1400 | |
| 1407 | |
| 1408 | |
| 1426 | |
| 1429 | |
| 1431 | |
| 1433 | |
| 1436 | |
| 1438 | |
| 1441 | |
| 1445 | |
| 1460 | |
| 1466 | |
| 1472 | |
| 1481 | |
| 1482 | |
| 1509 | |
| 1517 | |
| 1518 | |
| 1525 | |
| 1529 | |
| 1530 | |
| 1534 | |
| 1535 | |
| 1536 | |
| 1543 | |
| 1544 | |
| 1549 | |
| 1550 | |
| 1552 | |
| 1553 | |
| 1564 | |
| 1566 | |
| 1567 | |
| 1568 | |
| 1571 | |
| 1572 | |
| 1583 | |
| 1584 | |
| 1586 | |
| 1587 | |
| 1602 | |
| 1605 | |
| 1610 | |
| 1611 | |
| 1612 | |
| 1619 | |
| 1624 | |
| 1626 | |
| 1627 | |
| 1629 | |
| 1634 | |
| 1637 | |
| 1640 | |
| 1641 | |
| 1644 | |
| 1663 | |
| 1664 | |
| 1666 | |
| 1681 | |
| 1682 | |
| 1685 | |
| 1690 | |
| 1692 | |
| 1701 | |
| 1717 | |
| 1719 | |
| 1724 | |
| 1731 | |
| 1732 | |
| 1740 | |
| 1747 | |
| 1756 | |
| 1757 | |
| 1767 | |
| 1771 | |
| 1774 | |
| 1778 | |
| 1789 | |
| 1809 | |
| 1817 | |
| 1821 | |
| 1848 | |
| 1862 | |
| 1866 | |
| 1876 | |
| 1877 | |
| 1878 | |
| 1884 | |
| 1893 | |
| 1895 | |
| 1898 | |
| 1906 | |
| 1921 | |
| 1923 | |
| 1925 | |
| 1932 | |
| 1946 | |
| 1947 | |
| 1948 | |
| 1954 | |
| 1959 | |
| 1961 | |
| 1962 | |
| 1969 | |
| 1976 | |
| 1981 | |
| 1983 | |
| 2001 | |

Combination
Signature 8

| | |
|---|---|
| 3 | 2005 |
| 4 | 2010 |
| 6 | 2017 |
| 9 | 2020 |
| 10 | 2021 |
| 11 | 2022 |
| 12 | 2023 |
| 14 | 2025 |
| 16 | 2026 |
| 17 | 2029 |
| 19 | 2032 |
| 22 | 2036 |
| 28 | 2037 |
| 29 | 2038 |
| 30 | 2040 |
| 32 | 2041 |
| 34 | 2043 |
| 41 | 2045 |
| 43 | 2049 |
| 47 | 2052 |
| 51 | 2060 |
| 52 | 2061 |
| 54 | 2069 |
| 56 | 2070 |
| 61 | 2071 |
| 69 | 2073 |
| 70 | 2075 |
| 71 | 2076 |
| 72 | 2077 |
| 74 | 2078 |
| 77 | 2081 |
| 78 | 2082 |
| 79 | 2083 |
| 86 | 2087 |
| 87 | 2089 |
| 89 | 2093 |
| 92 | 2095 |
| 93 | 2096 |
| 95 | 2100 |
| 98 | 2101 |
| 99 | 2105 |
| 100 | 2108 |
| 108 | 2111 |
| 112 | 2113 |
| 113 | 2116 |
| 118 | 2117 |
| 121 | 2118 |
| 124 | 2119 |
| 126 | 2123 |
| 127 | 2127 |
| 130 | 2129 |
| 134 | 2130 |
| 136 | 2138 |
| 137 | 2139 |
| 138 | 2142 |
| 145 | 2145 |
| 146 | 2147 |
| 149 | 2149 |
| 158 | 2150 |
| 159 | 2151 |
| 163 | 2153 |
| 178 | 2161 |
| 183 | 2162 |
| 188 | 2165 |
| 191 | 2168 |
| 206 | 2169 |
| 207 | 2171 |
| 211 | 2172 |
| 256 | 2183 |
| 258 | 2187 |
| 271 | 2191 |
| 285 | 2195 |
| 292 | 2200 |
| 293 | 2201 |
| 297 | 2202 |
| 302 | 2203 |
| 312 | 2206 |
| 314 | 2207 |
| 315 | 2209 |
| 316 | 2211 |
| 336 | 2212 |
| 340 | 2214 |
| 341 | 2217 |
| 349 | 2218 |
| 350 | 2220 |
| 355 | 2221 |
| 356 | 2222 |
| 363 | 2224 |
| 371 | 2225 |
| 372 | 2226 |
| 378 | 2228 |
| 380 | 2231 |
| 382 | 2234 |
| 386 | 2236 |
| 389 | 2237 |
| 406 | 2239 |
| 411 | 2241 |
| 416 | 2243 |
| 417 | 2246 |
| 418 | 2251 |
| 419 | 2253 |
| 427 | 2256 |
| 438 | 2257 |
| 439 | 2261 |
| 440 | 2268 |
| 444 | 2270 |
| 448 | 2275 |
| 462 | 2276 |
| 465 | 2277 |
| 476 | 2282 |
| 485 | 2287 |
| 488 | 2290 |
| 493 | 2295 |
| 496 | 2296 |
| 497 | 2298 |
| 503 | 2303 |
| 506 | 2306 |
| 513 | 2316 |
| 524 | 2326 |
| 526 | 2335 |
| 552 | 2340 |
| 553 | 2341 |
| 561 | 2342 |
| 565 | 2345 |
| 566 | 2346 |
| 568 | 2351 |
| 569 | 2352 |
| 579 | 2354 |
| 599 | 2356 |
| 602 | 2357 |
| 603 | 2359 |
| 604 | 2364 |
| 606 | 2366 |
| 607 | 2367 |
| 613 | 2369 |
| 614 | 2374 |
| 617 | 2375 |
| 622 | 2376 |
| 628 | 2383 |
| 631 | 2385 |
| 637 | 2386 |
| 638 | 2388 |
| 647 | 2389 |
| 659 | 2390 |
| 663 | 2391 |
| 664 | 2392 |
| 679 | 2395 |
| 692 | 2398 |
| 693 | 2401 |
| 702 | 2404 |
| 707 | 2405 |
| 718 | 2415 |
| 719 | 2416 |
| 725 | 2421 |
| 730 | 2425 |
| 755 | 2427 |
| 760 | 2428 |
| 763 | 2429 |
| 766 | 2433 |
| 771 | 2435 |
| 789 | 2438 |
| 799 | 2441 |
| 810 | 2444 |
| 817 | 2450 |
| 824 | 2454 |
| 825 | 2455 |
| 826 | 2458 |
| 828 | 2459 |
| 831 | 2461 |
| 837 | 2464 |
| 851 | 2466 |
| 865 | 2467 |
| 876 | 2473 |
| 877 | 2475 |
| 884 | 2479 |
| 890 | 2480 |
| 892 | 2481 |
| 893 | 2482 |
| 902 | 2485 |
| 907 | 2486 |
| 914 | 2491 |
| 921 | 2495 |
| 944 | 2499 |
| 954 | 2515 |
| 978 | 2521 |
| 988 | 2524 |
| 991 | 2526 |
| 997 | 2528 |
| 999 | 2531 |
| 1002 | 2537 |
| 1005 | 2538 |
| 1019 | 2539 |
| 1034 | 2541 |
| 1038 | 2542 |
| 1071 | 2545 |
| 1078 | 2546 |
| 1093 | 2547 |
| 1111 | 2549 |
| 1117 | 2550 |
| 1118 | 2551 |
| 1127 | 2556 |
| 1136 | 2558 |
| 1154 | 2567 |
| 1160 | 2569 |
| 1162 | 2570 |
| 1164 | 2573 |
| 1167 | 2574 |
| 1175 | 2585 |
| 1183 | 2586 |
| 1187 | 2588 |
| 1211 | 2598 |
| 1219 | 2601 |
| 1242 | 2603 |
| 1255 | 2604 |
| 1258 | 2605 |
| 1261 | 2606 |
| 1268 | 2607 |
| 1285 | 2610 |
| 1288 | 2616 |
| 1292 | 2621 |
| 1295 | 2622 |
| 1297 | 2624 |
| 1311 | 2628 |
| 1344 | 2631 |
| 1368 | 2632 |
| 1372 | 2633 |
| 1381 | 2635 |
| 1389 | 2643 |
| 1390 | 2646 |
| 1407 | 2647 |
| 1417 | 2654 |
| 1426 | 2655 |
| 1429 | 2659 |
| 1436 | 2661 |
| 1440 | 2662 |
| 1460 | 2665 |
| 1485 | 2666 |
| 1517 | 2668 |
| 1529 | 2669 |
| 1533 | 2670 |
| 1536 | 2671 |
| 1544 | 2674 |
| 1549 | 2676 |
| 1552 | 2679 |
| 1553 | 2683 |
| 1566 | 2688 |
| 1572 | 2692 |
| 1584 | 2694 |
| 1586 | 2695 |
| 1605 | 2696 |
| 1610 | 2697 |
| 1611 | 2698 |
| 1619 | 2701 |
| 1626 | 2703 |
| 1637 | 2705 |
| 1664 | 2706 |
| 1681 | 2711 |
| 1724 | 2713 |
| 1731 | 2715 |
| 1732 | 2716 |
| 1771 | 2719 |
| 1789 | 2722 |
| 1810 | 2724 |
| 1877 | 2726 |
| 1884 | 2727 |
| 1895 | 2732 |
| 1898 | 2733 |
| 1921 | 2735 |
| 1925 | 2738 |
| 1926 | 2741 |
| 1946 | 2748 |
| 1952 | 2751 |
| 1954 | |
| 1976 | |
| 2001 | |

Combination
Signature 9

| | |
|---|---|
| 2 | 2003 |
| 3 | 2005 |
| 4 | 2006 |
| 5 | 2007 |
| 6 | 2008 |
| 8 | 2009 |
| 11 | 2010 |
| 12 | 2013 |
| 14 | 2014 |
| 15 | 2015 |
| 16 | 2016 |
| 17 | 2017 |
| 19 | 2018 |
| 22 | 2020 |
| 23 | 2021 |
| 24 | 2022 |
| 28 | 2023 |
| 29 | 2025 |
| 30 | 2026 |
| 32 | 2027 |
| 34 | 2029 |
| 36 | 2030 |
| 37 | 2032 |
| 38 | 2034 |
| 41 | 2035 |
| 43 | 2036 |
| 44 | 2037 |
| 45 | 2038 |
| 47 | 2039 |
| 48 | 2040 |
| 51 | 2041 |
| 52 | 2042 |
| 54 | 2043 |
| 56 | 2044 |
| 60 | 2045 |
| 61 | 2046 |
| 69 | 2047 |
| 70 | 2048 |
| 72 | 2049 |
| 74 | 2050 |
| 76 | 2051 |
| 77 | 2052 |
| 79 | 2053 |
| 83 | 2054 |
| 86 | 2055 |
| 87 | 2056 |
| 89 | 2057 |
| 92 | 2058 |
| 93 | 2059 |
| 95 | 2060 |
| 98 | 2061 |
| 99 | 2062 |
| 100 | 2063 |
| 101 | 2065 |
| 102 | 2066 |
| 103 | 2067 |
| 107 | 2068 |
| 110 | 2069 |
| 112 | 2070 |
| 118 | 2071 |
| 121 | 2072 |
| 124 | 2073 |
| 126 | 2074 |
| 127 | 2075 |
| 129 | 2076 |
| 130 | 2077 |
| 132 | 2078 |
| 136 | 2080 |
| 137 | 2081 |
| 141 | 2082 |
| 144 | 2083 |
| 145 | 2084 |
| 149 | 2086 |
| 151 | 2087 |
| 154 | 2088 |
| 157 | 2089 |
| 158 | 2090 |
| 159 | 2093 |
| 164 | 2094 |
| 171 | 2095 |
| 172 | 2096 |
| 180 | 2097 |
| 183 | 2098 |
| 188 | 2099 |
| 196 | 2100 |
| 197 | 2101 |
| 199 | 2103 |
| 206 | 2104 |
| 244 | 2105 |
| 255 | 2106 |
| 256 | 2107 |
| 258 | 2108 |
| 262 | 2109 |
| 268 | 2110 |
| 269 | 2111 |
| 271 | 2112 |
| 279 | 2113 |
| 285 | 2114 |
| 292 | 2115 |
| 297 | 2116 |
| 302 | 2117 |
| 320 | 2118 |
| 331 | 2119 |
| 337 | 2120 |
| 342 | 2121 |
| 343 | 2123 |
| 346 | 2124 |
| 351 | 2125 |
| 355 | 2126 |
| 356 | 2127 |
| 360 | 2128 |
| 371 | 2129 |
| 373 | 2130 |
| 375 | 2131 |
| 377 | 2132 |
| 378 | 2133 |
| 385 | 2134 |
| 397 | 2137 |
| 398 | 2138 |
| 399 | 2139 |
| 406 | 2141 |
| 412 | 2142 |
| 416 | 2143 |
| 417 | 2145 |
| 419 | 2146 |
| 421 | 2147 |
| 422 | 2148 |
| 438 | 2149 |
| 439 | 2150 |
| 444 | 2151 |
| 448 | 2152 |
| 453 | 2153 |
| 457 | 2154 |
| 461 | 2155 |
| 462 | 2156 |
| 465 | 2157 |
| 481 | 2158 |
| 485 | 2160 |
| 488 | 2161 |
| 505 | 2162 |
| 506 | 2163 |
| 515 | 2164 |
| 518 | 2165 |
| 524 | 2166 |
| 526 | 2167 |
| 533 | 2168 |
| 544 | 2169 |
| 550 | 2171 |
| 561 | 2172 |
| 565 | 2173 |
| 566 | 2177 |
| 568 | 2179 |
| 569 | 2180 |
| 570 | 2183 |
| 572 | 2184 |
| 579 | 2186 |
| 582 | 2187 |
| 583 | 2188 |
| 599 | 2189 |
| 609 | 2190 |
| 613 | 2191 |
| 617 | 2192 |
| 620 | 2193 |
| 624 | 2194 |
| 631 | 2195 |
| 638 | 2196 |
| 642 | 2197 |
| 646 | 2198 |
| 675 | 2200 |
| 690 | 2201 |
| 696 | 2202 |
| 702 | 2203 |
| 715 | 2204 |
| 730 | 2205 |
| 732 | 2206 |
| 746 | 2207 |
| 755 | 2208 |
| 761 | 2209 |
| 763 | 2210 |
| 769 | 2211 |
| 783 | 2212 |
| 784 | 2213 |
| 785 | 2214 |
| 789 | 2215 |
| 799 | 2216 |
| 810 | 2217 |
| 814 | 2218 |
| 817 | 2219 |
| 824 | 2220 |
| 825 | 2221 |
| 826 | 2222 |
| 831 | 2223 |
| 860 | 2224 |
| 865 | 2225 |
| 877 | 2226 |
| 884 | 2227 |
| 903 | 2228 |
| 907 | 2230 |
| 910 | 2231 |
| 914 | 2232 |
| 923 | 2234 |
| 925 | 2235 |
| 932 | 2236 |
| 944 | 2237 |
| 975 | 2238 |
| 978 | 2239 |
| 991 | 2240 |
| 996 | 2241 |
| 997 | 2242 |
| 999 | 2243 |
| 1000 | 2244 |
| 1010 | 2245 |
| 1038 | 2246 |
| 1043 | 2247 |
| 1068 | 2248 |
| 1072 | 2249 |
| 1096 | 2251 |
| 1106 | 2252 |
| 1117 | 2253 |
| 1118 | 2254 |
| 1136 | 2255 |
| 1154 | 2256 |
| 1164 | 2257 |
| 1175 | 2258 |
| 1184 | 2261 |
| 1197 | 2263 |
| 1219 | 2264 |
| 1234 | 2266 |
| 1242 | 2268 |
| 1285 | 2270 |
| 1292 | 2271 |
| 1293 | 2272 |
| 1296 | 2274 |
| 1303 | 2275 |
| 1311 | 2276 |
| 1350 | 2277 |
| 1390 | 2278 |
| 1398 | 2279 |
| 1407 | 2280 |
| 1426 | 2281 |
| 1436 | 2282 |
| 1453 | 2283 |
| 1517 | 2284 |
| 1525 | 2285 |
| 1529 | 2286 |
| 1535 | 2287 |
| 1544 | 2288 |
| 1552 | 2289 |
| 1566 | 2290 |
| 1611 | 2291 |
| 1612 | 2292 |
| 1627 | 2293 |
| 1634 | 2294 |
| 1667 | 2295 |
| 1681 | 2296 |
| 1731 | 2297 |
| 1732 | 2298 |
| 1740 | 2299 |
| 1789 | 2300 |
| 1810 | 2301 |
| 1884 | 2303 |
| 1895 | 2304 |
| 1898 | 2306 |
| 1926 | 2307 |
| 1946 | 2308 |
| 1947 | 2309 |
| 1952 | 2310 |
| 1976 | 2312 |
| 2001 | 2314 |
| | 2315 |
| | 2316 |
| | 2317 |
| | 2318 |
| | 2319 |
| | 2321 |
| | 2323 |
| | 2324 |
| | 2325 |
| | 2326 |
| | 2327 |
| | 2328 |
| | 2329 |
| | 2331 |
| | 2332 |
| | 2333 |
| | 2334 |
| | 2335 |
| | 2336 |
| | 2337 |
| | 2338 |
| | 2339 |
| | 2340 |
| | 2341 |
| | 2342 |
| | 2343 |
| | 2344 |
| | 2345 |
| | 2346 |
| | 2348 |
| | 2349 |
| | 2351 |
| | 2352 |
| | 2353 |
| | 2354 |
| | 2356 |
| | 2357 |
| | 2358 |
| | 2359 |
| | 2360 |
| | 2361 |
| | 2364 |
| | 2365 |
| | 2366 |
| | 2367 |
| | 2368 |
| | 2369 |
| | 2370 |
| | 2371 |
| | 2372 |
| | 2373 |
| | 2374 |
| | 2375 |
| | 2376 |
| | 2379 |
| | 2380 |
| | 2382 |
| | 2383 |
| | 2384 |
| | 2385 |
| | 2386 |
| | 2388 |
| | 2389 |
| | 2390 |
| | 2391 |
| | 2392 |
| | 2393 |
| | 2394 |
| | 2395 |
| | 2398 |
| | 2400 |
| | 2401 |
| | 2402 |
| | 2403 |
| | 2404 |
| | 2405 |
| | 2407 |
| | 2408 |
| | 2409 |
| | 2410 |
| | 2411 |
| | 2413 |
| | 2414 |
| | 2415 |
| | 2416 |
| | 2420 |
| | 2421 |
| | 2422 |
| | 2423 |
| | 2424 |
| | 2425 |
| | 2427 |
| | 2428 |
| | 2429 |
| | 2430 |
| | 2431 |
| | 2432 |
| | 2433 |
| | 2434 |
| | 2435 |
| | 2436 |
| | 2438 |
| | 2439 |
| | 2440 |
| | 2441 |
| | 2442 |
| | 2444 |
| | 2445 |
| | 2446 |
| | 2447 |
| | 2448 |
| | 2449 |
| | 2450 |
| | 2451 |
| | 2452 |
| | 2453 |
| | 2454 |
| | 2455 |
| | 2456 |
| | 2457 |
| | 2458 |
| | 2459 |
| | 2460 |
| | 2461 |
| | 2462 |
| | 2463 |
| | 2464 |
| | 2466 |
| | 2467 |
| | 2468 |
| | 2469 |
| | 2470 |
| | 2472 |
| | 2473 |
| | 2474 |
| | 2475 |
| | 2476 |
| | 2477 |
| | 2478 |
| | 2479 |
| | 2480 |
| | 2481 |
| | 2482 |
| | 2483 |
| | 2484 |
| | 2485 |
| | 2486 |
| | 2487 |
| | 2488 |
| | 2489 |
| | 2491 |
| | 2492 |
| | 2494 |
| | 2495 |
| | 2496 |
| | 2498 |
| | 2499 |
| | 2500 |
| | 2501 |
| | 2502 |
| | 2503 |
| | 2504 |
| | 2505 |
| | 2506 |
| | 2509 |
| | 2510 |
| | 2511 |
| | 2512 |
| | 2513 |
| | 2514 |
| | 2515 |
| | 2517 |
| | 2518 |
| | 2519 |
| | 2520 |
| | 2521 |
| | 2522 |
| | 2523 |
| | 2524 |
| | 2525 |
| | 2526 |
| | 2528 |
| | 2529 |
| | 2531 |
| | 2532 |
| | 2533 |
| | 2534 |
| | 2535 |
| | 2537 |
| | 2538 |
| | 2539 |
| | 2540 |
| | 2541 |
| | 2542 |
| | 2543 |
| | 2544 |
| | 2545 |
| | 2546 |
| | 2547 |
| | 2549 |
| | 2550 |
| | 2551 |
| | 2554 |
| | 2555 |
| | 2556 |
| | 2558 |
| | 2559 |
| | 2560 |
| | 2562 |
| | 2563 |
| | 2564 |
| | 2565 |
| | 2567 |
| | 2569 |
| | 2570 |
| | 2571 |
| | 2573 |
| | 2574 |
| | 2576 |
| | 2577 |
| | 2578 |
| | 2579 |
| | 2580 |
| | 2581 |
| | 2582 |
| | 2584 |
| | 2585 |
| | 2586 |
| | 2587 |
| | 2588 |
| | 2589 |
| | 2590 |
| | 2591 |
| | 2593 |
| | 2594 |
| | 2598 |
| | 2600 |
| | 2601 |
| | 2603 |
| | 2604 |
| | 2605 |
| | 2606 |
| | 2607 |
| | 2609 |
| | 2610 |
| | 2611 |
| | 2613 |
| | 2614 |
| | 2615 |
| | 2616 |
| | 2618 |
| | 2619 |
| | 2620 |
| | 2621 |
| | 2622 |
| | 2624 |
| | 2625 |
| | 2626 |
| | 2627 |
| | 2628 |
| | 2629 |
| | 2630 |
| | 2631 |
| | 2632 |
| | 2633 |
| | 2634 |
| | 2635 |
| | 2636 |
| | 2638 |
| | 2639 |
| | 2640 |
| | 2641 |
| | 2642 |
| | 2643 |
| | 2645 |
| | 2646 |
| | 2647 |
| | 2648 |
| | 2649 |
| | 2650 |
| | 2653 |
| | 2654 |
| | 2655 |
| | 2656 |
| | 2657 |
| | 2659 |
| | 2661 |
| | 2662 |
| | 2663 |
| | 2664 |
| | 2665 |
| | 2666 |
| | 2668 |
| | 2669 |
| | 2670 |
| | 2671 |
| | 2672 |
| | 2673 |
| | 2674 |
| | 2675 |
| | 2676 |
| | 2677 |
| | 2679 |
| | 2681 |
| | 2682 |
| | 2683 |
| | 2686 |
| | 2687 |
| | 2688 |
| | 2689 |
| | 2691 |
| | 2692 |
| | 2693 |
| | 2694 |
| | 2695 |
| | 2696 |
| | 2697 |
| | 2698 |
| | 2699 |
| | 2700 |
| | 2701 |
| | 2702 |
| | 2703 |
| | 2704 |
| | 2705 |
| | 2706 |
| | 2707 |
| | 2708 |
| | 2710 |
| | 2711 |
| | 2712 |
| | 2713 |
| | 2714 |
| | 2715 |
| | 2716 |
| | 2717 |
| | 2718 |
| | 2719 |
| | 2720 |
| | 2721 |
| | 2722 |
| | 2724 |
| | 2725 |
| | 2726 |
| | 2727 |
| | 2728 |
| | 2729 |
| | 2730 |
| | 2731 |
| | 2732 |
| | 2733 |
| | 2735 |
| | 2737 |
| | 2738 |
| | 2741 |
| | 2742 |
| | 2743 |
| | 2744 |
| | 2745 |
| | 2747 |
| | 2748 |
| | 2750 |
| | 2751 |
| | 2752 |

1. A method for the detection of colorectal cancer in a human subject based on RNA from a blood sample obtained from said subject, comprising:
measuring the abundance of at least 8 RNAs in the sample, that are chosen from the RNAs listed in Table 1, and
concluding based on the measured abundance whether the subject has colorectal cancer.

2. The method of claim 1, wherein the abundance of at least 30 RNAs, at least 60 RNAs, at least 102 RNAs, at least 202 RNAs, at least 502 RNAs, at least 1002 RNAs, or of at least 2002 RNAs that are chosen from the RNAs listed in Table 1 is measured.

3. The method of claim 1, wherein the abundance of a set of 8 RNAs as listed in Table 4 is measured.

4. The method of claim 2, wherein the abundance of a set of 30 RNAs as listed in Table 5 is measured.

5. The method of claim 2, wherein the abundance of a set of 60 RNAs as listed in Table 6 is measured.

6. The method of claim 42, wherein the abundance of a set of 102 RNAs as listed in Table 7 is measured.

7. The method of claim 2, wherein the abundance of the 202 RNAs of Table 8 is measured.

8. The method of claim 2, wherein the abundance of at least the 502 RNAs of Table 9 is measured.

9. The method of claim 4, wherein the abundance of at least the 1002 RNAs of Table 10 is measured.

10. The method of claim 2, wherein the abundance of at least the 2002 RNAs of Table 1 is measured.

11. The method of claim 1, wherein the abundance of at least 202 RNAs is measured, wherein at least 152 of the 202 measured RNAs are chosen from the list in Table 8, and up to 50 of the remaining measured RNAs are chosen from the list in Table 11.

12. The method of claim 1, wherein the abundance of at least 1002 RNAs of Table 10 is measured, wherein at least 952 of the 1002 measured RNAs are chosen from the list in Table 10, and up to 50 of the remaining RNAs are chosen from the list in Table 12.

13. The method of claim 1, comprising measuring the abundance of at least 50 RNAs provided in table 13.

14. The method of claim 1, wherein the measuring of RNA abundance is performed using a microarray, a real-time polymerase chain reaction or sequencing.

15. The method of claim 1, wherein the decision whether the subject has colon cancer comprises the step of training a classification algorithm on a training set of cases and controls, and applying it to measured RNA abundance.

16. The method of claim 1, wherein the classification method is a random forest method, a support vector machine (SVM), or a k-nearest neighbor method (k-NN), such as a 3-nearest neighbor method (3-NN).

17. The method of claim 1 wherein the RNA is mRNA, cDNA, microRNA, small nuclear RNA, unspliced RNA, or its fragments.

18. A method for preparing an RNA expression profile that is indicative of the presence or absence of colorectal cancer, comprising: isolating RNA from a whole blood sample, and determining the level or abundance of from 5 to about 3000 RNAs, including at least 3 RNAs selected from Table 1.

19. The method of claim 18, wherein the expression profile contains the level or abundance of 2002 RNAs or less.

20. The method of claim 18, wherein the expression profile contains the level or abundance of 1002 RNAs or less.

21-28. (canceled)

29. A microarray, comprising a solid support and a set of oligonucleotide probes, the set containing from 5 to about 3,000 probes, and including at least 3 probes selected from Table 1 or 8.

30-38. (canceled)

The application's sequence listing, which the Patent Office published only in electronic form, follows.

SEQUENCE LISTING (2752 sequences)

SEQ ID NO: 1 - DNA, 2973 bp, HOMO SAPIENS
actgccctaacagagcaggtggggaatgttctgtttactccacttgtgcttctatttggccaacttcgcctcttcaattaaaaggacacatgctgttaacgggtgctgtggattacagatgatcgcactctgggcacagtcctctggaaatgcagatgcccgtgtggaggaaattctggcgggagaggagcggcgactcgccgctctgcttggatctcaaggcatgaggttctgggtgtgcctcgcagcctgcagagccatgtggggccttgctgccagacgaggacgggctgaagacagcagctcgtctccagtggacgcctccaagttcccatggaggggtgggcagcatcgcaccaccatgatgccttgtctgctgcgggtgggagttttcaggccctgtcatgtgagacccacgggggatccttcctgcgatgtgcagcctccacgactcggcttctccagagtgccagatacacaggtggcattttatggcagtggtcactgggacccaactcccttctctgtacacagctgtttttttaatttccaggtcagaaaaattatcttcctactttgaactctttctcctttttgccaaaaatgtttctctcttacaatgcagaagcagaacacagctcctgctcttgaaatactggatggatgtttcagagggtattgtgaggcttggagctccagccagtgacattccagccacatccttctctcctggctccacttcacagaggctggctgtgtctctggactacacctcagagctaatctgctttctggaagggtcgtgtttacttctgctggtgctgtgcatgtaggagacagctgtggccagccctgtttccctggggaggtggcagaggcggtaccatgagcaagggatgcagatgctcaagggggaccagtcaggggacacggggagggtttggcctctccagccaggggctcgccacctccatggtataaacatccatgtgaacaaaaaagttctaacaagtaccagcacactgagaatattttaaaccacaactatcgtggaaaatctgggagggtggttcctaggtccagggtggaaaagtagctgaaaacctggtagggtttgaagaacaatcagaggcggccttccacttctgagaacagttcctgtgagtcacctgatgttgttctagattaattctatcaaagacagtgttggtcaacccagctgcaggcacttgatttcctctaaaagctctggataacagaagcagagctgtgaagaaagtcaagttgaataaaatgcttccacttaaaagaatagggcttttccttgaaatggtccactggatcgaccatttcctctcatttattattattatcatctccattcccatgcatgctatttagacaaggaaggctggaagcaagtgacaggtgcggcagtgcgcagcaaggcctctgcacctggcccgtcagtagggccggcacgcagcctgactactgagtttcttctgcctcattcctctccagaggccctcaacttacaatagagacccaggagctgggagatgactgaatctgttaacatgacacagaaggactaacccataaacatgagcgtgaatgtcttttgttgggggactaaggagatgacactgaaaaggagaatcacaagccaagtgccataagcagaccacattccctgcaagctgccctgctaggctttatcccaaatcaaagaaaaagggagaatgtcttaatattctcacagatttgtaaccacttcactggggtaagttttcctttgtatagatgacggattatccttctaagctgcaagctgataaatgagaagctaagtataaaatatctagaactaaggtagatgaagatgtctatatgtgcactgggtgtcacttatatatctgcctgtgttattaagggcacaaaggttgtgtggggctgtgtaaactatagatattaggaatacagattaaaacagtaatttcacaatgcaagtagtgccaagccacgaaaatatgcctggagcatcttctcttttctctacttcacagaaaatatttccatagacacttttcaccaggcatctgcagctgtttttttttttttaaacaatcataattttaagcactatatggtaagccatttggaagccattcgaattatgcattaaaacaaggaaaaataagatgccacttgacatacactgaaacacataaaatcagatacagactcttgggtggaaaaagtatgttcttcaacttagttcagatgttaacatataaaacatgctcagggaaccctgaaaaaatccagaggtgaacactctgatggtcaatcacatgtgttccttcttctgatctggatgattcttacatttttagggcgctgtactgttttttagccctttgactcattaatgtatcagggaataaaaaggatatcaaactcaaacagtttaattgagctacttgtctactgaccaaaaacttcgttttttgggagaggtgctgggctcttgggcaggaaagagggtaaaatgttggctctggtgagtcatctacctgctttcttgctgaccgctgtgtcggtgggtaagagttggctctattcagaaaacctgaatactctccatatggaaacagataatggctgctgcagtggggtgggattcatagcagtgctatggaagctgccgtcaactatttgagaagctgactctgtccaggtaaccactgcttgacgaatttctttaggaattatccagtggaactggtagcataatcatctctgttgagaaggaatggtctgaaagaagatactctatcttggaaggttttctgttgatatttagagacaagcagcaaatattagctcgaggtcaatgctggagattgtaaaacggctctgcattagtaacactttccaatcacaaggaatgtattttcattggtgtct

SEQ ID NO: 2 - DNA, 288 bp, HOMO SAPIENS
acaaataaacccttggtgacctctggtacagtagtagcaagcagtctaacacatgtctaagtgagttcctaggaattgggagagggaggagctgtcaaagaactttaataaacctgaagcaagagtaacacagaaagtcacaccaagccagataatattcaagttgtcgaaaatcagtcataaatagagaaacatccagggaagaaaactaaatatagtagttcaaaagataggaatgactgctggttgttcatcaaggacaaatgccaccccaaaaccaatgaaatg

SEQ ID NO: 3 - DNA, 420 bp, HOMO SAPIENS
ggtcctggggtacatcaattttggttggccatgactgcctatgtaacagatagattggggggaaaaaagccatataatcattatgcagatgatagtaaagtacatcacaatgaacttactgggacaaaatctacagacttaaagaaaaaagcagcagccttgcaaacccattcaacatcctgtaaacatcagcaaggccaccagaagggcaaatgtggttttgaaacatggttcagtttgtggcttattggccaagtgaaaacttcatcacaggtgtcagaaaagaaaatagggcaaagagctactccatcttttctatacaaaagctttatactaaacattttttagaagcccatggaggttattggcaaagcaaaacctgaacaccacgtcttgtttctttggttcttagatcacata

SEQ ID NO: 4 - DNA, 4830 bp, HOMO SAPIENS
gaggcagctcctgtggggaaaggcgccagtgcgccgaggcggggagtggcggcggggtaacacctggccgaggtgactcgttctgaagagcagcggttccttacaccaatcggaacgtgcaggggtggggagctggccaatcaggcgcggagggcggggccgggcggggttccacctggcggctggctctcagtcccctcgctgtagtcgcggagctgtgtctgttcccaggagtccttcggcggctgttgtgtcgggagcctgatcgcgatggggacaaaggcgcaagtcgagaggaaactgttgtgcctcttcatattggcgatcctgttgtgctccctggcattgggcagtgttacagtgcactcttctgaacctgaagtcagaattcctgagaataatcctgtgaagttgtcctgtgcctactcgggcttttcttctccccgtgtggagtggaagtttgaccaaggagacaccaccagactcgtttgctataataacaagatcacagcttcctatgaggaccgggtgaccttcttgccaactggtatcaccttcaagtccgtgacacgggaagacactgggacatacacttgtatggtctctgaggaaggcggcaacagctatggggaggtcaaggtcaagctcatcgtgcttgtgcctccatccaagcctacagttaacatcccctcctctgccaccattgggaaccgggcagtgctgacatgctcagaacaagatggttccccaccttctgaatacacctggttcaaagatgggatagtgatgcctacgaatcccaaaagcacccgtgccttcagcaactcttcctatgtcctgaatcccacaacaggagagctggtctttgatcccctgtcagcctctgatactggagaatacagctgtgaggcacggaatgggtatgggacacccatgacttcaaatgctgtgcgcatggaagctgtggagcggaatgtgggggtcatcgtggcagccgtccttgtaaccctgattctcctgggaatcttggtttttggcatctggtttgcctatagccgaggccactttgacagaacaaagaaagggacttcgagtaagaaggtgatttacagccagcctagtgcccgaagtgaaggagaattcaaacagacctcgtcattcctggtgtgagcctggtcggctcaccgcctatcatctgcatttgccttactcaggtgctaccggactctggcccctgatgtctgtagtttcacaggatgccttatttgtcttctacaccccacagggccccctacttcttcggatgtgtttttaataatgtcagctatgtgccccatcctccttcatgccctccctccctttcctaccactgctgagtggcctggaacttgtttaaagtgtttattccccatttctttgagggatcaggaaggaatcctgggtatgccattgacttcccttctaagtagacagcaaaaatggcgggggtcgcaggaatctgcactcaactgcccacctggctggcagggatctttgaataggtatcttgagcttggttctgggctctttccttgtgtactgacgaccagggccagctgttctagagcgggaattagaggctagagcggctgaaatggttgtttggtgatgacactggggtccttccatctctggggcccactctcttctgtcttcccatgggaagtgccactgggatccctctgccctgtcctcctgaatacaagctgactgacattgactgtgtctgtggaaaatgggagctcttgttgtggagagcatagtaaattttcagagaacttgaagccaaaaggatttaaaaccgctgctctaaagaaaagaaaactggaggctgggcgcagtggctcacgcctataatcccagaggctgaggcaggcggatcacctgaggtcaggagttcaagatcagcctgaccaacatggagaaaccctactaaaaatacaaagttagccaggcatagtggtgcatgcctgtaatcccagctgctcaggagcctggcaacaagagcaaaactccagctcaaaaaaaaaaagaaagaaaagaaagctggagctggtggcttaggccatcacccttcccttggctggaactactggacagacccttttgagatgtgcctgtggtgctgtggagatgtgtgtagtggtcttagctctttgttgagcttgtgtgtgtgttgtgtagtcttagctgtatgctgaaattgggcgtgtgttggagggcttcttagctctttggtgagattgtatttctatgtgtttgtatcagctgaatgttgctggaaataaaaccttggtttgtcaaggctcttttttgtgggaagtaagtaggggaaaaggtctttgagggttcctaggctcctttgtacaacaggaaaatgcctcaaagccttgcttcccagcaacctggggctggttcccagtgcctggtcctgccccttcctggttcttatctcaaggcagagcttctgaatttcaggccttcattccagagccctcttgtggccaggccttcctttgctggaggaaggtacacagggtgaagctgatgctgtacttgggggatctccttggcctgttccaccaagtgagagaaggtacttactcttgtacctcctgttcagccaggtgcattaacagacctccctacagctgtaggaactactgtcccagagctgaggcaaggggatttctcaggtcatttggagaacaagtgctttagtagtagtttaaagtagtaactgctactgtatttagtggggtggaattcagaagaaatttgaagaccagatcatgggtggtctgcatgtgaatgaacaggaatgagccggacagcctggctgtcattgctttcttcctccccatttggacccttctctgcccttacatttttgtttctccatctaccaccatccaccagtctatttattaacttagcaagaggacaagtaaagggccctcttggcttgattttgcttctttctttctgtggaggatatactaagtgcgactttgccctatcctatttggaaatccctaacagaattgagttttctattaaggatccaaaaagaaaaacaaaatgctaatgaagccatcagtcaagggtcacatgccaataaacaataaattttccagaagaaatgaaatccaactagacaaataaagtagagcttatgaaatggttcagtaaagatgagtttgttgttttttgttttgttttgttttgtttttttaaagacggagtctcgctctgtcacccaggctggagtgcagtggtatgatcttggctcactgtaacctccgcctcccgggttcaagccattctcctgcctcagtctcctgagtagctgggattacgggtgcgtgccaccatgcctggctaatttttgtgtttttagtagagacagggtttcaccatgttggtcgggctggtctcaaactcctgacctcttgatccgcctgccttggcctcccaaagtgatgggattacagatgtgagccaccgtgcctagccaaggatgagatttttaaagtatgtttcagttctgtgtcatggttggaagacagagtaggaaggatatggaaaaggtcatggggaagcagaggtgattcatggctctgtgaatttgaggtgaatggttccttattgtctaggccacttgtgaagaatatgagtcagttattgccagccttggaatttacttctctagcttacaatggaccttttgaactggaaaacaccttgtctgcattcactttaaaatgtcaaaactaatttttataataaatgtttattttcacattgagtttgtttaaatcctgaagttcttaccttaagagaattgggactcctagagtgattggacattcaaaatattcctgatagtcttgttaattaagagattaggatatctttccattaccttgataattacgttttaatttagcttttttcattggcctgtgtttaaatgcaaataaccccacaatggacatttcctatgttaaagtgacatttaggggataaaaaatgagagcagttccatggattttggtgtttcccctgagacatgaactcagcataatctgggataaaatgattgagtgttaaggatgtgtttgttgttcctgtcgtttttttattttcttcaaagtatacaacatggtttgatatgcacatacatttgtgtaatgattgccatggtcaattaacacatcaccatttttgtgtgtgtgtgtgtgtgtgtgtgtgagggagtcttgctccgttgccaggctggagtgcaatggtacaaccttggctcactgcaacctccacctcctgggttcaagcaattctcttgcctcagcctcctaagtagctgggactataggcgtgtgccaccatgcccagctaatttttgtatttttagtagagacggggtttcaccatgttggccaggatgatctcgatcccttgacctcatgatccgcccacctcggcctcccaaagtgctgggattacaggcgtgagtcactgcacccggccacatcacctcccatgttctatcttacgtattcagaacttgttcatcttgtaactgaaagcgtgtaccctttgaccaacactgtttttcctgtcttaacaggatctacagatcaaggacaggggaggggatagtggaggaaaacggagttagtctgtttctaaatgaggggacagtatgtttcttggggcctgaggacagcttaataaagtagacaaatgaagaaaaacaacaatttgcattaaaaaatatccaattcttta

SEQ ID NO: 5 - DNA, 339 bp, HOMO SAPIENS
  misc_feature (52)..(52): n is a, c, g, or t
  misc_feature (76)..(76): n is a, c, g, or t
  misc_feature (195)..(195): n is a, c, g, or t
gttgacagactcttgttttctggaggttaaccttgtctctggtccaaattangagtcaggcatttaggatgaggtnctgatgatggttcatagaattttgtccacaatctgttatgaaccctggactggtgagccttgttatctgtggccaacctagggaattttaatcttatggaattgaaaaaacaaggaacnatgtttgtgagggatttattaatttcttcccagatttttctttttctcccctgttgtctctcatagtttttccagccctcctagtcacaatccccagaggcagctacttcaattcttctggctacctagttttactttactctg

SEQ ID NO: 6 - DNA, 2695 bp, HOMO SAPIENS
agcaaagagcagtgcccagcccagctcagagggcaaatgggacagatcccagaggccctgaggaggtctctgctgctgatgaagctgtgaccaaacgcacccaacccttggcagccatctgtccctgcagccatagcccacattcccatgacctccctctgcttgttttgggaccatgtctgtacagcctctaggccccagccccggaggtgaatgccatgccatgattctggtgtgctccatggcatccccagcctagctcccaatcccactttggcacgatgttagccaacagctcctcaaccaacagttctgttctcccgtgtcctgactaccgacctacccaccgcctgcacttggtggtctacagcttggtgctggctgccgggctccccctcaacgcgctagccctctgggtcttcctgcgcgcgctgcgcgtgcactcggtggtgagcgtgtacatgtgtaacctggcggccagcgacctgctcttcaccctctcgctgcccgttcgtctctcctactacgcactgcaccactggcccttccccgacctcctgtgccagacgacgggcgccatcttccagatgaacatgtacggcagctgcatcttcctgatgctcatcaacgtggaccgctacgccgccatcgtgcacccgctgcgactgcgccacctgcggcggccccgcgtggcgcggctgctctgcctgggcgtgtgggcgctcatcctggtgtttgccgtgcccgccgcccgcgtgcacaggccctcgcgttgccgctaccgggacctcgaggtgcgcctatgcttcgagagcttcagcgacgagctgtggaaaggcaggctgctgcccctcgtgctgctggccgaggcgctgggcttcctgctgcccctggcggcggtggtctactcgtcgggccgagtcttctggacgctggcgcgccccgacgccacgcagagccagcggcggcggaagaccgtgcgcctcctgctggctaacctcgtcatcttcctgctgtgcttcgtgccctacaacagcacgctggcggtctacgggctgctgcggagcaagctggtggcggccagcgtgcctgcccgcgatcgcgtgcgcggggtgctgatggtgatggtgctgctggccggcgccaactgcgtgctggacccgctggtgtactactttagcgccgagggcttccgcaacaccctgcgcggcctgggcactccgcaccgggccaggacctcggccaccaacgggacgcgggcggcgctcgcgcaatccgaaaggtccgccgtcaccaccgacgccaccaggccggatgccgccagtcaggggctgctccgaccctccgactcccactctctgtcttccttcacacagtgtccccaggattccgccctctgaacacacatgccattgcgctgtccgtgcccgactcccaacgcctctcgttctgggaggcttacagggtgtacacacaagaaggtgggctgggcacttggacctttgggtggcaattccagcttagcaacgcagaagagtacaaagtgtggaagccagggcccagggaaggcagtgctgctggaaatggcttctttaaactgtgagcacgcagagcaccccttctccagcggtgggaagtgatgcagagagcccacccgtgcagagggcagaagaggacgaaatgcctttgggtgggcagggcattaaactgctaaaagctggttagatggaacagaaaatgggcattctggatctaaaccgccacaggggcctgagagctgaagagcaccaggtttggtggacaaagctactgagatgcctgttcatctgctgacttctgtctaggctcatggatgccaccccctttcatttcggcctaggcttcccctgctcaccactgaggcctaatacaagagttcctatggacagaactacattctttctcgcatagtgacttgtgacaatttagacttggcatccagcatgggatagttggggcaaggcaaaactaacttagagtttccccctcaacaacatccaagtccaaaccctttttaggttatcctttcttccatcacatccccttttccaggcctcctccattttaggtccttaatattctttctttttctctctctctcgtttctctcttctctctcctctcctctcctctctcttctcctcttctctctctctccctctctctcctttgtccagagtaaggataaaattctttctactaaagcactggttctcaaactttttggtctcagaccccactcttagaaattgaggatctcaaagagctttgcttatattttgttcttttgatacttaccatactagaaattaaagcgaatacatttttaaaataaatacacatgcacacattacattagccatgggagcaataatgtcaccacacacacttcatgaagcctctggaaaactctacagtatacttgtgagagaatgagagtgaaagggacaaataacatctgtgtagcagtattatgaaaatagcttgacctcgtggacttcctcagagggttggtccctggatcacactttgagaaccatacttgtcctgaagtattggagttcatgtctaacttcttcccagggcattatgtacagtgctttttattactgtggggagagggcagtgctaaataaattaatcactactgatagtc

SEQ ID NO: 7 - DNA, 6246 bp, HOMO SAPIENS
gacttaaactctggggcccgggaggccgccggttttctccccgcttgccggggtggtcctcttccctttgtcggaccaaagaagtaaacactgtgtggagagggactgacgtgtttggagggaaatgggaatgtacacgataattaaagagtaaagttgtgctcaacgctgtttacttctaattatttcctgattcacaaattaatttttgcaattcacaacttcaagaatacttggactattggattcaatccatagtaatctgcaaaagaagagaagcagaattatacctagaagtctactaatggacagttagtcacccacctacatgttgagattcctgacattcagacaactgacttgtaactgacttataactgacttgtaatacactgctactatatcaaaccgacaatgaattggaatgaaaaaccaaagagtgctacattaccaccactgtatcctaaaagccagccaccttttttgcaccagtctttaataaaccaaattaccacaacatctcagagttctttcagctatcctggaagtaaccaagaagcatgcatgtatcccggtaattcaaatccaatttcacagccactgctgaatatccaaaattatcctcaacaaatttctgtttctgatatgcataatgggacagttgtggcctcacacacttcagtagaaagaataacatatgcaaatgttaatggacccaaacaactaactcacaatttgcagatgtcttcaggagttacccaaaacgtatggttgaactcaccaatgaggaatcctgtgcattctcatataggggcaactgtatctcatcaaactgattttggagctaacgtacccaatatgccggcactacagagtcaactgataacatcagatacctattctatgcaaatgcagatgatcccttctaattctacacgacttcctgtagcttaccaaggaaatcagggacttaaccagtctttttcagagcaacaggttgattggacacaacagtgtatatctaagggactgacttacccagattacagaccacctccaaagctataccgttactcaccacaaagctttttaccagattctaccattcaaaaacaaaactttataccacatacatcattgcaagttaaaaatagtcagcttctaaattctgtattaactttaccatcaaggcagacctcagctgtaccatcacagcagtatgccacgcaaactgacaaaagacctcctcctcctccttacaactgtagatatggaagccagcctttgcaaagtactcagcatattactaaacacttgtctatggaagttcctcagagtcgagaaatgctgtcatctgaaataaggaccagctttcaacagcagtggcaaaaccctaatgaaaatgtcagcacaattggaaatttcactaacttgaaagtaaataccaacagcaaacagccttttaacagtcccattagatcttctgtggatggtgttcagactcttgctcaaactaatgaagagaaaataatggattcttgcaatccaacttcaaatcaagtactggacacaagtgttgcaaaagaaaagctagtaagggatattaaaacattagtagagataaaacagaagttttcagaacttgcaaggaaaattaaaatcaataaagatcttttgatggcagcaggttgtattaaaatgactaatacttcttatagtgaaccagctcagaattctaaattgtctctaaaacaaactgccaaaatccagtctggaccccagataactccagtaatgccagagaatgcagagagacaaacaccaacagtagtggaatctgcagaaacaaataagactcaatgtatgttgaattctgacattcaggaagtcaattgcagaaggtttaaccaagttgattctgttttaccaaatcctgtctattctgaaaagcggccaatgccagacccatctcatgatgtgaaagttctcacttcaaagacatcagctgttgagatgacccaggcagtattgaatactcagctttcatcagaaaatgttaccaaagttgagcaaaattcaccagcagtttgtgaaacaatttctgttcccaagtccatgtccactgaggaatataaatcaaaaattcaaaatgaaaatatgctacttctcgctttgctttcacaggcacgtaagactcagaagacagtattaaaagatgctaatcaaactattcaggattctaaaccagacagttgtgaaatgaatccaaatacccaaatgactggtaaccaactgaatttgaagaacatggaaactccaagtacttctaatgtaagtggcagggttttggacaactccttttgcagtggacaagaatcctcaacaaaaggaatgcctgctaaaagtgacagtagctgttccatggaagtgctagcaacctgtctttccctgtggaaaaagcaaccttcagatactgcaaaagaaaaggagtgtgataaactcagaacaaacacaacagcagttggaatttcaaagcctgctaacatccacgttaagagtccttgttcagttgtgggaaattcaaattctcagaataaaataagtaatccctcacagcagacagctttgtcgatggtaatgcacaattatgagtcttcaggtataaatataacaaagggaacagaacttcagatagctgtagtgtcaccgttagttctgtcagaggtcaaaacattgtctgtcaaaggaataacacctgcagtgttacctgaaacagtgtatcccgttattaaagaaggcagtgtttgtagtttacaaaatcaattggcagaaaatgcaaaggcaactgctgctttgaaagttgatgttagtggaccagtagcaagtacagcaacatcaaccaagatttttccactaactcagaaggaaaagcagaatgagtcaactaatggtaattcagaagtcacacctaatgtcaatcaaggaaagcataacaaattagagtcagctatccattctcctatgaacgatcagcaaatctcacaggagtcaaggaatagtactgttgtgagtagtgatacattacagattgacaatatttgttctctggttgaaggtgatacctcttacaattcccaaatagcaaagatattcagctctcttcccttgaaaatggttgagccacagaaaccttctctacccaatcagcaagggattggcagcagagaaccagaaaaacaattagataataccactgaaaataaagactttggttttcaaaaagataaacctgtacagtgcacagatgtttcacataaaatatgtgatcagtcaaagtcagagccacccttagagtcatcttttaacaatcttgaaacaaacagagttattctagagaaaagtagtttggagcatgccactgaaaaaagcacagctaacgatacgtgctcgtcagctgctattcaggaggatatttaccctcaggaaatagatgcatccagcaactatactccccaagatcctgcaagaaatgaaatccacagtgataaggcacctgtcttatacctacatgaccagctgtcagaacttctaaaagagtttccttatggcattgaggctgtgaatacacgtgaaggttctgtgggccagcaaactacataccagacctcagaagatcaaactgctgataaaaccagttctgactccaaagacccagcagatcaaatacaaattacaatattaagctcagagcaaatgaaagaaatatttcctgaacaggatgatcaaccctatgtagtagacaagttggcagaacctcagaaagaagagcccatcacagaagtagttagccagtgtgacctgcaggcacctgcagctggacaaagtcgtgattctgtgatactggactctgagaaagatgatatccactgctgtgcattgggctggctctccatggtttacgaaggagtaccccagtgtcagtgtaattccatcaagaactcatcttcagaggaagagaaacaaaaagagcagtgttctcctttggataccaacagttgtaaacaaggagagagaacttctgatagagatgtcactgttgttcaatttaagagccttgtaaataatccaaagactcctccagatgggaaaagtcattttcctgaactacaagacgacagtagaaaagatacacccaaaacaaaacataaaagcttaccaaggacagaacaagaattagttgctggtcagttttcatctaaatgtgataaactaaatcccttgcaaaatcacaaaagaaaaaaattgaggtttcacgaggtaacctttcactccagtaataaaatgacagcatcttatgaacaagcttctcaggaaacccgacagaagaaacatgtaacacagaactcacgtccactaaaaacaaaaacagcttttttgccaaataaagatgtgtataagaagcatagttctttgggacagtcattatcaccagaaaagataaaattgaaactcaaatcagttagcttcaaacaaaaacgaaagttagaccaagggaacgtattagatatggaagtaaagaaaaagaaacatgataaacaagaacagaaaggaagtgtgggagctacattcaaattaggtgactctttgtcaaacccaaacgaaagagccattgttaaagaaaagatggtatcaaatactaagtctgtagacacgaaagcgagttcatctaaatttagtagaattctaactcctaaggagtatttacaaaggcagaagcataaagaagctctgagtaataaagcatcgaagaaaatctgtgtgaaaaacgtgccatgtgattctgaacatatgagaccaagtaaacttgccgtgcaggttgaaagttgtgggaaatcaaatgagaaacacagcagcggcgtgcagacctctaaagaatcattaaatggcttgacaagccatggtaaaaacctcaaaatccaccattctcaggagtctaaaacatacaacattctaaggaatgttaaagaaaaagttggtgggaagcagcctgataaaatatggattgataagactaaattagacaaattaaccaatataagcaacgaagctcaattcagccaaatgcctccccaagtaaaggatcaaaagaaattatatctgaatagagttgggtttaaatgcactgaacgtgaaagcatttctctcaccaaattagaaagttcacccaggaagcttcataaagataagagacaggaaaataaacataagacctttttaccggtgaaaggtaacacagaaaaatcaaacatgctggagtttaaattatgtccagatatcttactaaagaatacaaactctgtggaagaacggaaggatgtaaagcctcatcctaggaaggagcaagcccctctgcaagtttcaggaataaaaagtacaaaagaagactggttaaaatttgttgctacaaagaaaaggacacagaaagacagccaagagagagataatgttaattcaagactctcgaagagaagcttcagtgcagatggatttgagatgctacaaaacccagtaaaagattcaaaagaaatgtttcaaacctacaaacagatgtacctggagaagagaagcagaagccttggtagcagtcctgtaaaataattacaagatgtggttttgtaattgccactgggaaatttctttccttttctgttcaaaatatttcgctgaaactaatgagaaatgccatgataaagatttctcagagtttggttcccactttcattgtatttcattgaaagtgcttaattaaaatggcttgagaactttgggtagccatgtgtaagaaatggatggtattcaccggggaaacaaggtatttgaatttctactttattgaaccagatttaccattattttaaaaggaatgcttatacaaatcaatttgaaattctacccatcttgagggaggaccgttcctcagttaaggacttgtttatttaaatgggactgtaaatatgttttggtttctaagctatattagcaaaatttatttttcaaaaatgcccactgtgatgtgaatgtcaaaatatattcttaagtgttttataactaattgtaaactttttttcagaagtcttattttatacttgtgaaactgaacacaattttgggacaacgtttaaacattacttttcatacttgaaataaacatttattttttaaaaaactaaaaaaaaaaaaaaaaaa

SEQ ID NO: 8 - DNA, 472 bp, HOMO SAPIENS
  misc_feature (26)..(26): n is a, c, g, or t
  misc_feature (56)..(56): n is a, c, g, or t
  misc_feature (62)..(62): n is a, c, g, or t
  misc_feature (86)..(86): n is a, c, g, or t
  misc_feature (98)..(98): n is a, c, g, or t
  misc_feature (104)..(104): n is a, c, g, or t
  misc_feature (108)..(108): n is a, c, g, or t
  misc_feature (111)..(111): n is a, c, g, or t
  misc_feature (126)..(127): n is a, c, g, or t
  misc_feature (131)..(131): n is a, c, g, or t
  misc_feature (164)..(164): n is a, c, g, or t
  misc_feature (210)..(210): n is a, c, g, or t
  misc_feature (335)..(335): n is a, c, g, or t
aatgtactgacataattcccttattnactgattgcatatgagctaatgtatgtgtntgtagnagaatagttccagtagttctttanccttttctgtgncttatnatgnctncttcctttctactgnntaangttcaagttttaatcttccagacttctcatttnttctgtaacagtatcttctagccacgtgtgcccttctaatctctcntgtggaatttgttcttcacaatactacaagaattctattgcattgaaaaccccaaatcttattaagccagcctccatcattagagcatgtttctcaaactcttggtgtgtgcaaatcattcttantctgtgatttctattttcatgctttttcagtttgcttcatttgccatatgatagaggttttcttcagaccatattttggaaagtatgctcttagttttaaattctactatgggttatttccaagacccatagtagaa

SEQ ID NO: 9 - DNA, 342 bp, HOMO SAPIENS
agagtacaggaacccaatccagcttggagttggggaagaccccctaaaagaggtggcatctgagttcatcctttaaagaaagaaggagtggtcaaggaggcagctgagtacaggtgctcctggccaaatgtgcaaaggcagagtgagagagagcaggcccaggtgagtcacctgtaggtagttgtgaagttggaacaaagtctgggacctacctcctatcactacactattcctgaggctgtgaggagccactgaagcgaggaagacaccatcagatttgtgtcttggaaagactacagtccagcacagtgttttccaaagcaccttcatcagaataacctg

SEQ ID NO: 10 - DNA, 1936 bp, HOMO SAPIENS
ggggcggggcggcggcggcggcggcggcggtggcggccggggagggtcagttggaggcaggcgctcgctgaggcaaaaggaggcgctcggcccgcggcctgacagggacttagcccgcagagatcgaccccgcgcgcgtgaccccacacccacccactcatccatctatccactccctgcgccgcctcctcccaccctgagcagagccgccgaggatgataaacacccaggacagtagtattttgcctttgagtaactgtccccagctccagtgctgcaggcacattgttccagggcctctgtggtgctcctgatgcccctcacccactgtcgaagatccccggtgggcgagggggcggcagggatccttctctctcagctctaatatataaggacgagaagctcactgtgacccaggacctccctgtgaatgatggaaaacctcacatcgtccacttccagtatgaggtcaccgaggtgaaggtctcttcttgggatgcagtcctgtccagccagagcctgtttgtagaaatcccagatggattattagctgatgggagcaaagaaggattgttagcactgctagagtttgctgaagagaagatgaaagtgaactatgtcttcatctgcttcaggaagggccgagaagacagagctccactcctgaagaccttcagcttcttgggctttgagattgtacgtccaggccatccctgtgtcccctctcggccagatgtgatgttcatggtttatcccctggaccagaacttgtccgatgaggactaatagtcatagaggatgctttacccaagagccacagtgggggaagaggggaagttaggcagccctgggacagacgagagggctcctcgctgtctagggaaggacactgaggggctcagggtgagggttgcctattgtgttctcggagttgactcgttgaaattgttttccataaagaacagtataaacatattattcacatgtaatcaccaatagtaaatgaagatgtttatgaactggcattagaagctttctaaactgcgctgtgtgatgtgttctatctagcctaggggaggacattgcctagagggggagggactgtctgggttcaggggcatggcctggagggctggtgggcagcactgtcaggctcaggtttccctgctgttggctttctgttttggttattaagacttgtgtattttctttctttgcttcctgtcaccccaggggctcctgagtataggcttttcagtccctgggcagtgtccttgagttgttttttgacactcttacctgggcttctctgtgtgcatttgcgtctggcctggagtaagcaggtccgacccctccttctttacagcttagtgttattctggcatttggttaagctggcttaatctgtttaatgttatcagtacattttaaataggggcattgaaatttactcccaccaccagggcttttttgggggatgcctgggcctttaaaacactagccaaactctaattaattctcaaatcactgccaggagttcttgctcctggctgcaggcccaggccccaaggtctccttcttggggtcacaaacagcagtaaggaagaggaatatatagcaactcagggcctgggaattgtggggcaatccgttcttagggactggatacttctggctggctgagtatagtactagctgcctccccaccaggttccgagtagtgtctgagactctgctctgcagggcctagggtagcgctgggagtgtagaagtggcctgcccttaactgttttcactaaacagctttttctaaggggagagcaagggggagagatctagattgggtgagggggacggggatgtcagggaggcaagtgtgttgtgttactgtgtcaataaactgatttaaagttgtgaaaaaaaaaaaaaaaaaaaa

SEQ ID NO: 11 - DNA, 3978 bp, HOMO SAPIENS
ctcttcagtaacactgatactttgtggaggggttatgagagaattgcaggcagggccccagcacctagagcccatgggccagctgacccacaggaacaaacagagaatggcgttgagtggcagatgctgaggcacttggttcctggtgtggtctgcttcctcccgtgcatggagcagtgtgtgcattcacatggtgtgatccatatggccctcttcacacctaaatggtgggcaaatccgtcttcagtttctgacagtcactttggatttgcacagcaccagctcatagcagacagacaccttcaccatctatgccattgacctgggggccctgaccaagattcggattcgccacgacaacacaggcaacagagcaggctggttcctggacagaatagacattactgacatgaacaacgagatcacgtactactttccatgccaacgttggctggcagtggaggaagatgatggccagctgtccagggagctgttgccagtggatgagtcctatgtgctgccacagagcgaggagggtaggggaggcggtgacaacaaccccctcgacaacctggccctggagcagaaagataaatctaccacattctcagtgaccataaagactggggttaagaagaatgcgggcacagatgctaatgtcttcatcacactctttggcacacaggatgacactggaatgaccctcctgaagtcctccaagacaaacagcgataagtttgagagggacagcattgaaatcttcacggtggagacgctggatctgggagacctgtggaaagtccggcttggccatgacaacacaggcaaggccccaggctggtttgtagactgggtagaggtggatgccccatctcttgggaagtgcatgacgtttccctgtggccgctggctggccaaaaacgaagacgacgggtccatcatcagagacctcttccatgcagagcttcagacgaggctgtacacaccatttgttccttacgagatcaccctctacaccagtgatgtctttgctgctgggacagatgccaacatcttcatcatcatctatggctgcgatgccgtgtgcacccagcagaagtatctgtgtaccaacaagagggaacagaagcagttctttgagaggaagtctgcctcccgcttcatcgtagagttagaagatgtgggagaaatcattgaaaaaattcggattggccataataacacgggcatgaatcctgggtggcactgctctcacgtggacatccgcaggctcctcccggataaagacggtgcagagaccttgactttcccatgcgatcggtggcttgccacctctgaggatgacaaaaagaccattcgagaactggttccatatgacatcttcactgagaaatacatgaaagatgggtccttacggcaagtctacaaggaagtagaagagcctctggacattgtgctgtactcggtgcagatcttcacagggaacattcctggggcagggacggatgccaaggtgtacatcaccatctatggagacctcggggacactggggagcgataccttggcaagtcagagaaccggaccaacaagttcgagagaggaacggctgacaccttcatcatcgaggccgctgacctaggcgtcatctacaagatcaagctccgccatgacaactccaagtggtgcgcagactggtacgtggagaaggtggagatctggaatgacaccaacgaggacgagttcctgttcctatgcgggcgctggctctccctgaagaaggaggatgggcgactcgagaggctcttttacgagaaggagtacactggggaccgcagcagcaactgcagcagccctgctgacttctgggagatcgccctgagctccaagatggccgatgtcgacatcagcacagtgaccgggcccatggctgactacgttcaagagggcccaattattccctactatgtgtcagtcaccactgggaagcacaaggacgcggccactgacagccgagccttcatctttctcatcggggaggatgatgaacgtagtaagcgcatctggttggactacccccgagggaagaggggcttcagccgtggctctgtggaggagttctacgtcgcaggcttggatgtgggcatcatcaagaaaatagagctgggccatgacggggcctcccctgagagctgctggctggtggaagagttgtgtttggcagtgcccacccagggcaccaagtacatgttgaactgtaactgctggctggccaaggacagaggcgacggcatcacctcccgtgtcttcgacctcttggatgccatggtggtgaacattggggtgaaggttctctatgaaatgacggtgtggacaggggatgtggttggcgggggcactgactccaacatcttcatgaccctctacggcatcaacgggagcacagaggagatgcagctggacaaaaagaaagccaggtttgagcgggagcagaacgacaccttcatcatggagatcctagacattgctccattcaccaagatgcggatccggattgatggcctgggcagtcggccggagtggttcctggagaggatcctactgaagaacatgaacactggagacctgaccatgttctactatggagactggctgtcccagcggaagggcaagaagaccctggtgtgtgaaatgtgtgccgttatcgatgaggaagaaatgatggagtggacctcctacaccgtcgcagttaagaccagcgacatcctgggagcaggcactgatgccaacgtgttcatcatcatcttcggggagaacggggatagtgggacactggccctgaagcagtcggcaaactggaacaagtttgagcggaacaacacggacacattcaacttccctgacatgctgagcttgggccacctctgcaagctgagggtctggcacgacaacaaagggatatttcctggctggcatctgagctatgtcgatgtgaaggacaactcccgcgacgagaccttccacttccagtgtgactgctggctctccaagagtgagggtgacgggcagacggtccgcgactttgcctgtgccaacaacaagatctgtgatgagctggaagagaccacctacgagatcgtcatagaaacgggcaacggaggcgaaaccagggagaacgtctggctcatcctggagggcaggaagaaccgatccaaagagtttctcatggaaaattcttctaggcagcgggcctttaggaaggggaccacagacacgtttgagtttgacagcatctacttgggggacattgcctccctctgtgtgggccaccttgccagggaagaccggtttatccccaagagagaacttgcctggcatgtcaagaccatcaccatcaccgagatggagtacggcaatgtgtacttctttaactgtgactgcctcatccccctcaagaggaagaggaagtacttcaaggtattcgaggttaccaagacgacagagagctttgccagcaaggtccagagcctggtgcccgtcaagtacgaagtcatcgtgacaacaggctatgagccaggggcaggcactgatgccaacgtcttcgtgaccatctttggggccaacggagacacaggcaagcgggagctgaagcagaaaatgcgcaacctcttcgagcggggcagcacagaccgcttcttcctggagacgctggagctggtagtgaccaggctgggacttgctgcagagtgtggatgagaaattgagtcttcacccaggggatagaagtggagaagcagaggccatcaagatggtgtattttaagcaaaaactaattaacacttttccccaaaaaagctaggctaattaaattattaccaaccatatcctataaagaactcatcttagcatctgcttgctaagaagtgtatacttttccccagtttcaataaacccagtggcaagtggaaaaaaaaaaaaaa

SEQ ID NO: 12 - DNA, 587 bp, HOMO SAPIENS
  misc_feature (158)..(161): n is a, c, g, or t
atcaatggttttcaatctatggctgagggtaatactggtgagaatctgaccagggagtttttgtacctcacattccaatgatgcagggattgagcctctctgttggactctttctcggcctgcttttaagttctaagtgtgatggcttgggcaagggnnnntatttgctgatgattgtatttgctttgagtgttgggctgtccttcccttacccctgtcttggcctttgagttactcagttaaacccattttgatctgaagcgactgaaagcaggtcctggccaggtaacattacagcctttgaaggattaagatctttagaactaattgctcagaggatgaagaaccacaaagctgcatatgaggcaaaagtgtaattctggcctttcattaccagtgtgggctaggaagcagaggcttgagaggattggggtatgcaaaactattttttccttaaatttaagagtagaggctgggcatagtggctcacacctgtaatctgtaatcccagcactctgggaggccgaggtgggcaaatctgttgagttcaagatcaccctgggcaatgaagcaaaatccccatctct

SEQ ID NO: 13 - DNA, 2470 bp, HOMO SAPIENS
ggcggctgtagccgagggggcggccggaaagcagcggcggcgtctggggcgctttcgcaacattcagacctcggttgcagcccggtgccgtgagctgaagaggtttcacatcttactccgccccacaccctgggcgttgcggcgctgggctcgttgctgcagccggaccctgctcgatgggcacgactgggctggagagtctgagtctgggggaccgcggagctgcccccaccgtcacctctagtgagcgcctagtcccagacccgccgaatgacctccgcaaagaagatgttgctatggaattggaaagagtgggagaagatgaggaacaaatgatgataaaaagaagcagtgaatgtaatcccttgctacaagaacccatcgcttctgctcagtttggtgctactgcaggaacagaatgccgtaagtctgtcccatgtggatgggaaagagttgtgaagcaaaggttatttgggaagacagcaggaagatttgatgtgtactttatcagcccacaaggactgaagttcagatccaaaagttcacttgctaattatcttcacaaaaatggagagacttctcttaagccagaagattttgattttactgtactttctaaaaggggtatcaagtcaagatataaagactgcagcatggcagccctgacatcccatctacaaaaccaaagtaacaattcaaactggaacctcaggacccgaagcaagtgcaaaaaggatgtgtttatgccgccaagtagtagttcagagttgcaggagagcagaggactctctaactttacttccactcatttgcttttgaaagaagatgagggtgttgatgatgttaacttcagaaaggttagaaagcccaaaggaaaggtgactattttgaaaggaatcccaattaagaaaactaaaaaaggatgtaggaagagctgttcaggttttgttcaaagtgatagcaaaagagaatctgtgtgtaataaagcagatgctgaaagtgaacctgttgcacaaaaaagtcagcttgatagaactgtctgcatttctgatgctggagcatgtggtgagaccctcagtgtgaccagtgaagaaaacagccttgtaaaaaaaaaagaaagatcattgagttcaggatcaaatttttgttctgaacaaaaaacttctggcatcataaacaaattttgttcagccaaagactcagaacacaacgagaagtatgaggatacctttttagaatctgaagaaatcggaacaaaagtagaagttgtggaaaggaaagaacatttgcatactgacattttaaaacgtggctctgaaatggacaacaactgctcaccaaccaggaaagacttcactggtgagaaaatatttcaagaagataccatcccacgaacacagatagaaagaaggaaaacaagcctgtatttttccagcaaatataacaaagaagctcttagccccccacgacgtaaagcctttaagaaatggacacctcctcggtcaccttttaatctcgttcaagaaacactttttcatgatccatggaagcttctcatcgctactatatttctcaatcggacctcaggcaaaatggcaatacctgtgctttggaagtttctggagaagtatccttcagctgaggtagcaagaaccgcagactggagagatgtgtcagaacttcttaaacctcttggtctctacgatcttcgggcaaaaaccattgtcaagttctcagatgaatacctgacaaagcagtggaagtatccaattgagcttcatgggattggtaaatatggcaacgactcttaccgaattttttgtgtcaatgagtggaagcaggtgcaccctgaagaccacaaattaaataaatatcatgactggctttgggaaaatcatgaaaaattaagtctatcttaaactctgcagctttcaagctcatctgttatgcatagctttgcacttcaaaaaagcttaattaagtacaaccaaccacctttccagccatagagattttaattagcccaactagaagcctagtgtgtgtgctttcttaatgtgtgtgccaatggtggatctttgctactgaatgtgtttgaacatgttttgagatttttttaaaataaattattatttgacaacaatccaaaaaaaatacggcttttccaatgatgaaatataatcagaagatgaaaaatagttttaaactatcaataatacaaagcaaatttctatcagccttgctaaagctaggggcccactaaatatttttatcggctaggcgtggtggtgcatgcctgtaatctcggaaggctgaggcaggaggatcatttgagctcatgagggcccaggaggtcaaggcttcagtgagccatgatcatgccactgcactccagtctggatgacagagagagaccctgtctcaaaaaatatatatttaaaaaataaaaataaaagctgaccccaaagac

SEQ ID NO: 14 - DNA, 4277 bp, HOMO SAPIENS
ggcggctccggcgcagaccttggagagcacagctgccggcccgcgagccagcctcggttcccgcggcccgccgaggctcggagccatccagcgacccggcgaccggcctcaggccccgccatggggaagaccaacagcaagctggcccccgaggtgctggaggaccttgttcagaacactgagttcagcgagcaggagctgaagcagtggtacaagggcttcctgaaggactgccccagcggcatcctcaacctggaggagtttcagcagctctacatcaagttcttcccctacggcgacgcctccaagttcgcgcagcacgctttccgcaccttcgacaagaacggcgacggcaccatcgacttccgggagttcatctgcgccctgtcggtcacctcccgcggcagcttcgagcagaagctcaactgggcctttgagatgtacgacctggacggcgacgggcgcatcacgcgcctggagatgctggagatcatcgaggcaatctacaagatggtgggcaccgtgatcatgatgcgcatgaaccaggacgggctcacgccccagcagcgtgtggacaagatcttcaagaagatggaccaggataaggacgaccagattacattggaggagttcaaggaggcagccaagagtgacccatccattgtgttgctgctgcagtgtgacatgcagaagtagaagctggtgaggggcagggtccctggccagaaggggcatggccacctcccaacctgatgacctctctggctggcctcccaggaggagggacactccagcccccctctctggcccacccagtcctctgcccaagcccttcctcccctccatcaagatctttgagggaccacctcaccctgcaaaagagacaggtcctccagtaccctgtcttctagccccacctcccacttggccagaaccaatgtccattgggcataggggagttggcttttgccccaggaggtgaggttaaggagttgggggcctggggttctggttaggaattctcttgatcctgggattatgctttataggatgtggtcccacaggcctgtcacagggccaaattgggtctgtccattcctgaggctccagatcccataaagggggtctcttccccatcccttctactctacctggcccttccagccccagcctttggagcgttcattcagtcctttcttcagctaatgattactgagcacctgtttggtgctaaggatatggtcatttacaagacacatcttgtgccctctggaagctcatagggttgtgaggcaaacttccagccgtcagggtctcagctaagcagaaggtgctggaaggctggttagtctgggaggagctatttcatcttccagctcagctccacacaaagctgcagaaggacgaaatgaaaagcatttggaagtttaggagccacgtgagtgaaagttttaagaaaaatgaaatttatgtcatacttatttttttagtaccctttaaaggagctacagtcattttattatttcaggaggttaaaatatactctatattacttggtttattataaaatgattaaatgaatagagaaaatattaattttcaaggggaaaaaacctgagaagaaagggagaaaagaccatgaaatttaccagataacactttttaagactaagtcctgagctgccactctcagcagtttttgctgcttcagctcttcctttttattacctttttcaattcaacaagcaactttctgctacatacttactccggttgggtgctgacttcagggacaggaaaaagcaaggtttgcaaagagtgaaactagtgtatattccgtatcttggtagttcgtttctggattgggtttagtttcagaactggacttgttccttcactgccacagaatcagaaagagctagaagaaaaggctcacctggccactgtttaggcacccagacataatttatggacgaaatgcctaaaaatgtgccaggcatgctctgtttgagaggctttttctaaccccaaatcttagatctgccaggtagttcaacatcttccaagtgtgctggttctgctttccaatgcctgcttcccaattttggatccatgagctatacagctgcatgctttgactgccggaaaaattaatcttgcttcttcatcaggtctttctcctgtacttgtgatcagaaattacctttgacgtgcagtgacagttgatttcctcttgaactgccggtgaaaacagtctagtacacaggtgctgtcagcccagggtgggagcaggaaatgattgctgagcccggggcaggggaattgcatctgcaggaaagagatgcagcatgctcctcactcctgagtgcccacctgtcctgcttctctgcaggtgaaaactctgggggatgctgatcaatagagcttggtcccaagctctactgggcccttggaggtagcaaggccactgggttgctatcctcttgctggggatagcaaccactggtttgcaaccactgggttgctatccttttgctatcctcttgctcatgaccagccatatggtgaggctggggagttcacatcctcaggcaggaactagcagttgtttatccagcaatgcctcaaggatgttgcattgctcccaggagctggctattaggtatgtcttgtgcggtcagtcagcatcacagacacatagatgctcaccagcctggcttagctgggacctaaatcttctggtgaaaagcttttcactaagtgaggttccttccctgcaaatgctgaatctagcctaattcgcaaccacacagaatttcatggctttcaaaggcttgccatgtgccccatctcattctatactcacatcccatggaggtgaggattttcacttcttttctctagacttggaagctgagattcagagaggaagcatcccttgtgcaagatcacatagtcaggaggtgacacagggctaagacttgaaccaaggctctaagaggatttcttcttttcagagtctcttccctgtccatttctgtgactaagctgtgcagaggttgacagcagggcaagttacattgatattcatcctttataggcttcctgctaaaaagcttctgagattgtggtcttccaaaaaaaataggagcttggttgaagtccccacattttcaagcactcagtgttctgcctctggcagctgtgctaacagctcagtgctgtcctgggagtcctctgactcagaaccctcgaagcatcctgcattgtctttacccaccatcatcgtcactaagagaaacatgcctacccatgaaggcgtgtttgattactccaggcttctggacacacatacccatgggtgatttttgctcctcaggcccaatattctcagacagcccagcagtgtgaacacacaatgccaggccaggaactgggaccaccatcttgctgatggaaggaacaacaggtggcccaggacatgctcctgcatactcctgggtgtcccagggactgtgtgctcaggagcactgtggtagagcactggccctgccttgagaagagacacaggtctcccgtccctgcaccagctgagagagacttgccacaaagcacaaggctggcagagatttatgtatgacttgcacagacacaaaaatatacagacaatcaaaacattgatatattcaaactctcctttaaattccaatcttattgcaacaactctgtgaattgcaaggtcccagaatctgccttctcacatactctaccctcattcatccttttgggctaattgatgagcatcttatttcttatctctaaaaattatcagcaaaggctacttcagatggccactttagtcctttcagctgtagtcaggattatttaacttacctgtatatcaaaagtgaagaaaaagttagttcataagtaaaggcactaaatcctttcctgacaatggcagagtctctagaggtagaaatttgccttgctgcagagagagaaggaatggcgtgggatgggggaaagaaaagaaagagaagaagctggggtctccaggcagggtagtaagctgacactaaatattttttacacaaaaatgtattgaagcaacaaatatttcctgaagatccaccctgggtgaggctttgagctgactttagagatcactgtggggtcaagaatgtcttacatgttttattcatcattcttgaaaaaagaaataattcaaaccttggaattaaaaagtcagaaaaataaaaaaaaaaaaaaaaaaa

SEQ ID NO: 15 - DNA, 480 bp, HOMO SAPIENS
tacactgtgcgaccaaagccgtagtagcgctgtccccgcgcgatcgcgtacgcccttccgcagtacgaccttccccgagagcgcgacctgctacgggaccgggaccggtaccgcgaaggagaccggtagtatctcctggtgaacccgtagcgcctctctcggtaacggcggctgcgggatcgcgaccggctccgcgagtatgaccgcgagtagcgcctgtacttccgctggtggcgccttcgggaacgggacctggacttgctcctccgactcctggacgaaaaccggctcgagacgcgggaatgggaccgagagcttctggaaaaagagcggctcctagaccgcgacgacagccggctggacccgcccgaccgcgaggtcgagggcgaatccttctcctgcggcgagcccggccacatgtcgttcgcgtagttggacatcttcacctgcggctttagcctgcgctttctccggaaagga

SEQ ID NO: 16 - DNA, 1501 bp, HOMO SAPIENS
gcgcccgcccccgaagcggcgcgggacgcctggcgccgtccgcgatccgcagggctgcccgcttaggcttaggcccggcccgctggcaaagccgagccgcagcattttatttcgttcgtggtttccgcacaggctggagtttcgtgggttgggtcgtacttgggacctcggcgaagaggacccgtttatttttttttctttccaaaatggcagcctccagtcgcgcacaagtgttatctctgtaccgggcgatgctgagagagagcaagcgtttcagcgcctacaattacagaacatatgctgtcaggaggataagagatgccttcagagaaaataaaaatgtaaaggatcctgtagaaattcaaaccctagtgaataaagccaagagagaccttggagtaattcgtcgacaggtccacattggccaactgtattcaactgacaagctgatcattgagaatcgagacatgcccaggacctagcaagccggggaccagccaccagtggcggccagggaccaccttcagcatccactctctgtttgagatgggggctcccaaaaccagcttacaatagccttttgcgctgcctgtcctgtgggagctgataaaccaagtcacatttgcattctgttgcaggcttagtgaaaaaggactgctgtctttccttggttcaagtgttagaatggagagctggagttcgttcagaatagtgctgtgtgttaccacgtctcccctgcaccccattcctaccttgtagctcatgaccattgtgtatagcatttctacactttgtttcttggtccttggcaataaaaagaatgatctccctgagcctttgaccccagataaacccctcccaattaatgcattttcatttcctactgatacaaggcctggagagggctgttgggggccctcagggagggttcaactctgagacgagaactgccttggtgaaggcaagttcaagcaccacttgagactgggggcagcatggagtagggcagggctacggggatacacggtgcaccctgcaacttatacctgagcccagtacaacaaaggtgacgggtgtgtaggtacacacccagagatggagcactgcagatcagcaacctcagccccacctgggaatttgctggaaatgcaggctcaagcccctccccacacctggtgaatgagagagccccagcctgacccaagcccagggcgactcccataccctgaagcctggggcatgctgggcagcaccggtgcccaaatctggctggtggacagaagcacctggagagttggagagctttttaaaaagacatctctcagcacttccctctctgcagattctgactcagtaagtgaggggtgaggcacagtcatttttctctattctgaagctctcccactgttttcaatgtttaaccaactggggacccctgctctttaagtatattacaggtaataaagatattgtttgtatgcttttaaaaaaaaaaaaaaaa

SEQ ID NO: 17 - DNA, 4720 bp, HOMO SAPIENS
agaggaggaggagaactcaggcagctctgcagagggggccaggagctcgggtgtttggtacccccagccccaccgctgttgctgctcctgcagcggggacacaggtgaggacgccccgagagagagggggagggggaccaccactagcgctgtcctcatccttccctggtccagcccccacgccctaacccatcctgggatagtccccaggggtcccactggaccttgcccttcccaggcctccttccagggaccccgcaccctccccctgcctatgccaccttctctcctatgcctggctgtggttgcttctcttcctcctgctgccgctgctgctactgccactgcccagtacacaccgccagcccctcggggtgtggtttccccagacctgcccccaacggtgggacccagccttctcccggcgtctcctgccagcttcctgcaaagcccaggagcccccctccctggagacacacccaactccctttcaacaccccacccccctcttaatcccattttggggttaacccccttcctcttatttagtcttcatagatcccctgggtgctctgggattgtgcccaacttcctaacatttgagtcccggcccttggaattccccaggcccctttttcctccctgtagaactcctgagagtgtcgaccaggctttgttggcccgtctagatacccacctcccccagataactctcagcctctcaaaaaataacccagccccctgtctacccctttagataaccccttcccctctccagccctactaggaggctctggcctctcctttcttccccagaactcctgtagagtatagacacccccccgggctattcttggcaactctaggcagtcccaagacacctttcagcctctttacaacctcctggatccacagccacccctcaagatgcaccagctccctttccagatccatgaggggggtctaaccctcttatgcttcccctagaagtcttgagggtgtggacaaccctcctcacctgtctcagcccctctagaacccccacttccaggcactctcagtctctttcaagcacctctggtcccatttctacccctctggatgccccagtctcctctccaccactgcaaaggaattccaggctcttctgccttccctgagactcttgagagtgcagagaattccccacgtgtttcttggcccctctagacgcccccagacacctctcaggcacaggctgactcctttagaatcatctcagtctctctaaaccctccctcagctccttcttggccccatccccacaccccttttctgctcttctccatgtccccaaggcccttctcagtccctcagaacattgcccaggcccctcctaggttctgtaaatgtcccccagactccttcccatctctttagttcttcctcctggttcctcttggcctctctagacacccccagtttccttgtttgggtggctcaaggtgtctccaagcccccaccatcctggagacagccacattctcctaaacgccaccctcactaagtctccctgggcttggggagtggcacgatggcggcaggcctggccacgtggctgccttttgctcgggcagcagcagtgggctggctgcccctggcccagcaacccctgcccccggcaccgggggtgaaggcatctcgaggagatgaggttctggtggtgaacgtgagcggacggcgctttgagacttggaagaatacgctggaccgctacccagacaccttgctgggcagctcggagaaggaattcttctacgatgctgactcaggcgagtacttcttcgatcgcgaccctgacatgttccgccatgtgctgaacttctaccgaacggggcggctgcattgcccacggcaggagtgcatccaggccttcgacgaagagctggctttctacggcctggttcccgagctagtcggtgactgctgccttgaagagtatcgggaccgaaagaaggagaatgccgagcgcctggcagaggatgaggaggcagagcaggccggggacggcccagccctgccagcaggcagctccctgcggcagcggctctggcgggccttcgagaatccacacacgagcaccgcagccctcgttttctactatgtgaccggcttcttcatcgccgtgtcggtcatcgccaatgtggtggagaccatcccatgccgcggctctgcacgcaggtcctcaagggagcagccctgtggcgaacgcttcccacaggcctttttctgcatggacacagcctgtgtactcatattcacaggtgaatacctcctgcggctgtttgccgcccccagccgttgccgcttcctgcggagtgtcatgagcctcatcgacgtggtggccatcctgccctactacattgggcttttggtgcccaagaacgacgatgtctctggcgcctttgtcaccctgcgtgtgttccgggtgtttcgcatcttcaagttctccaggcactcacagggcttgaggattctgggctacacactcaagagctgtgcctctgagctgggctttctcctcttttccctaaccatggccatcatcatctttgccactgtcatgttttatgctgagaagggcacaaacaagaccaactttacaagcatccctgcggccttctggtataccattgtcaccatgaccacgcttggctacggagacatggtgcccagcaccattgctggcaagattttcgggtccatctgctcactcagtggcgtcttggtcattgccctgcctgtgccagtcattgtgtccaactttagccgcatctaccaccagaaccagcgggctgacaagcgccgagcacagcagaaggtgcgcttggcaaggatccgattggcaaagagtggtaccaccaatgccttcctgcagtacaagcagaatgggggccttgaggacagcggcagtggcgaggaacaggctctttgtgtcaggaaccgttctgcctttgaacagcaacatcaccacttgctgcactgtctagagaagacaacgtgccatgagttcacagatgagctcaccttcagtgaagccctgggagccgtctcgccgggtggccgcaccagccgtagcacctctgtgtcttcccagccagtgggacccggaagcctgctgtcttcttgctgccctcgcagggccaagcgccgcgccatccgccttgccaactccactgcctcagtcagccgtggcagcatgcaggagctggacatgctggcagggctgcgcaggagccatgcccctcagagccgctccagcctcaatgccaagccccatgacagccttgacctgaactgcgacagccgggacttcgtggctgccattatcagcatccctacccctcctgccaacaccccagatgagagccaaccttcctcccctggcggcggtggcagggccggcagcaccctcaggaactccagcctgggtaccccttgcctcttccccgagactgtcaagatctcatccctgtgaggggtaggcctgctgattcagagggtcctcttcatttttgggaactcctttccaaagccatatttttgggaggcagagaggggcaggcttgggcaccccttctgccccccccactgagaactatgcaatggagtttcatgaaatggtccacatagtggggaagtagccaggaaatgagaaacttcctcccaccccagacatttttcctggtgggagctgaagcactgggcttccacaggcccctggcctccttgccctagcacactgggactggccccactctcccagctggactcctgcatgctcctccccttgggctctcagatgaaggcaaagctttgatccgacatctgagctctagcctaagaaggagagttgagatttcctcctccctctggctgggatatggagctttggaggttcagagaagagaaccctcacctctgatctggcctctacgagaggtcctcatctccatctggcccaacaattcccagattctgaagcttggaatgcaaacacaggcttcatgggctgtggcctctgcagcgacctgccatccccaggccttgcctgaggggtcaggctgcctctcccaacacacactcagatagcacaaattctaccatccccttccctggctgctggaaatggaccccgcaaccctgtcctctgctgggcccccagcaaactctagcaatagcagctgctgccgtgtcattatgcaaagcctctgaccagtttgctgcagcatttacatctgccctaatcagaggggccacctctaactcctcctcctcctctcttctcctctggtttgcgtccttcctgggttgggctggagtctggactggctgagataagagcctggcaaccagcaagagctgggctgtatttggagatcatgggctgattccatgttcttgggcaacagtccagaagcatcaggggctccggcctgggatgtttctgaactttgggagttataggagacaggaggaacttctcctcctcctcctcccctacaattccttttcacatattcctttcttctccctcttgggtgaccttccaaaactctgctctcaggctgaaatctggcatcatctcaggttccctgtccccagcactgtccccatggagctggtggctgacaaagatgtagtttccatcagtcaataaaacctgagaggagagatgagg

SEQ ID NO: 18 - DNA, 6072 bp, HOMO SAPIENS
cagccgcgtcccccagccccggcctcccgcggacccatgcccgcccgtatcggctactacgagatcgaccgcaccatcggcaagggcaacttcgcggtggtcaagcgggccacgcacctcgtcaccaaggccaaggttgctatcaagatcatagataagacccagctggatgaagaaaacttgaagaagattttccgggaagttcaaattatgaagatgctttgccacccccatatcatcaggctctaccaggttatggagacagaacggatgatttatctggtgacagaatatgctagtggaggggaaatatttgaccacctggtggcccatggtagaatggcagaaaaggaggcacgtcggaagttcaaacagatcgtcacagctgtctatttttgtcactgtcggaacattgttcatcgtgatttaaaagctgaaaatttacttctggatgccaatctgaatatcaaaatagcagattttggtttcagtaacctcttcactcctgggcagctgctgaagacctggtgtggcagccctccctatgctgcacctgaactctttgaaggaaaagaatatgatgggcccaaagtggacatctggagccttggagttgtcctctacgtgcttgtgtgcggtgccctgccatttgatggaagcacactgcagaatctgcgggcccgcgtgctgagtggaaagttccgcatcccattttttatgtccacagaatgtgagcatttgatccgccatatgttggtgttagatcccaataagcgcctctccatggagcagatctgcaagcacaagtggatgaagctaggggacgccgatcccaactttgacaggttaatagctgaatgccaacaactaaaggaagaaagacaggtggaccccctgaatgaggatgtcctcttggccatggaggacatgggactggacaaagaacagacactgcagtcattaagatcagatgcctatgatcactatagtgcaatctacagcctgctgtgtgatcgacataagagacataaaaccctgcgtctcggagcacttcctagcatgccccgagccctggcctttcaagcaccagtcaatatccaggcggagcaggcaggtactgctatgaacatcagcgttccccaggtgcagctgatcaacccagagaaccaaattgtggagccggatgggacactgaatttggacagtgatgagggtgaagagccttcccctgaagcattggtgcgctatttgtcaatgaggaggcacacagtgggtgtggctgacccacgcacggaagttatggaagatctgcagaagctcctacctggctttcctggagtcaacccccaggctccattcctgcaggtggcccctaatgtgaacttcatgcacaacctgttgcctatgcaaaacttgcaaccaaccgggcaacttgagtacaaggagcagtctctcctacagccgcccacgctacagctgttgaatggaatgggcccccttggccggagggcatcagatggaggagccaacatccaactgcatgcccagcagctgctgaagcgcccacggggaccctctccgcttgtcaccatgacaccagcagtgccagcagttacccctgtggacgaggagagctcagacggggagccagaccaggaagctgtgcagagctctacctacaaggactccaacactctgcacctccctacggagcgtttctcccctgtgcgccggttctcagatggggctgcgagcatccaggccttcaaagctcacctggaaaaaatgggcaacaacagcagcatcaaacagctgcagcaggagtgtgagcagctgcagaagatgtacggggggcagattgatgaaagaaccctggagaagacccagcagcagcatatgttataccagcaggagcagcaccatcaaattctccagcaacaaattcaagactctatctgtcctcctcagccatctccacctcttcaggctgcatgtgaaaatcagccagccctccttacccatcagctccagaggttaaggattcagccttcaagcccaccccccaaccaccccaacaaccatctcttcaggcagcccagtaatagtcctccccccatgagcagtgccatgatccagcctcacggggctgcatcttcttcccagtttcaaggcttaccttcccgcagtgcaatctttcagcagcaacctgagaactgttcctctcctcccaacgtggcactaacctgcttgggtatgcagcagcctgctcagtcacagcaggtcaccatccaagtccaagagcctgttgacatgctcagcaacatgccaggcacagctgcaggctccagtgggcgcggcatctccatcagccccagtgctggtcagatgcagatgcagcaccgtaccaacctgatggccaccctcagctatgggcaccgtcccttgtccaagcagctgagtgctgacagtgcagaggctcacagcttgaacgtgaatcggttctcccctgctaactacgaccaggcgcatttacacccccatctgttttcggaccagtcccggggttcccccagcagctacagcccttcaacaggagtggggttctctccaacccaagccctgaaagtccctccacttgaccaattccccaccttccctcccagtgcacatcagcagccgccacactataccacgtcggcactacagcaggccctgctgtctcccacgccgccagactatacaagacaccagcaggtaccccacatccttcaaggactgctttctccccggcattcgctcaccggccactcggacatccggctgcccccaacagagtttgcacagctcattaaaaggcagcagcaacaacggcagcagcagcagcaacagcagcaacagcaagaataccaggaactgttcaggcacatgaaccaaggggatgcggggagtctggctcccagccttgggggacagagcatgacagagcgccaggctttatcttatcaaaatgctgactcttatcaccatcacaccagcccccagcatctgctacaaatcagggcacaagaatgtgtctcacaggcttcctcacccaccccgccccacgggtatgctcaccagccggcactgatgcattcagagagcatggaggaggactgctcgtgtgagggggccaaggatggcttccaagacagtaagagttcaagtacattgaccaaaggttgccatgacagccctctgctcttgagtaccggtggacctggggaccctgaatctttgctaggaactgtgagtcatgcccaagaattggggatacatccctatggtcatcagccaactgctgcattcagtaaaaataaggtgcccagcagagagcctgtcatagggaactgcatggatagaagttctccaggacaagcagtggagctgccggatcacaatgggctcgggtacccagcacgcccctccgtccatgagcaccacaggccccgggccctccagagacaccacacgatccagaacagcgacgatgcttatgtacagctggataacttgccaggaatgagtctcgtggctgggaaagcacttagctctgcccggatgtcggatgcagttctcagtcagtcttcgctcatgggcagccagcagtttcaggatggggaaaatgaggaatgtggggcaagcctgggaggtcatgagcacccagacctgagtgatggcagccagcatttaaactcctcttgctatccatctacgtgtattacagacattctgctcagctacaagcaccccgaagtctccttcagcatggagcaggcaggcgtgtaacaagaaacagagagttttgtgtacagcttgggaatgaaaaggttgattgtaaacccacagtatctagcagcgttgtgccaaattgcccttgtgtttctctccacccaaaatatcacagctgctttcctcacatttggttcatccgtgtgctgttcttttgggttctgagagggttttgccatgtttgcttgtatgaccaagtcaccaaggaaataaacaggaaggaaatccatgttctccatcttttgtgaaagtatatttgagttggtggttttttgttttgtttgggggtttgtgttttgttttgtttttggtatgttttcttccagaggtgatatactttcttttttttcttcctttcttttttttctttcgttccttttttgaaacaggagagcaaagcagttagagttcagaggccagcggcctcagggccactccctccctagccttcatcagcagagcaccctccatccccctgcattgctcttctgtgaaagcaaatactaaaggatgccatcctctggaatcctaatggcaggcaaagggagagaggaagggtgacggcttctggcacttagaaaacaaaaagaacaaaaaaagagaaacccccaagcctggaacgcagagaggtctttactgctgggatccacggaaaacatgtctgtcctagccaagatcatatgaagagtttggcacggaggctgagaatgacctggcatagatggtttgccagttaggatgtctcaatttgagcctttgcttttggtggataactcagctcccctcttgtaacctggaaagttggttgcctttatcatcctgctggttttatccatggactgaacacccaacagcagtgcactatgctttctatggcatctttcattctcattttatattgtgctataaaaaggattgtttctccatatatatattatatatgtgtgtatatatataatataatatatgtgtatatatatattatatatataatatataatataatatattatatatatattatatatataatatatatataaaatatatatatatatgctctcctctttcagcctctttgtcacagggaagaagtgtaggaggttgccttgggccctgcctctctcctaacctcctcttccccactgggtaccctcagcccctatattttaattcttgatcatgtagaaattgtttttggtaaatgttgatattattgttattatcattattaataaataaagagaaaaggaatttttgtttaaatgagaaatgtttaaccagattctgttctatttgaattgtgacttgcaccttttgttcaaagtatttcctttaggcattgtaattgtgaacagctcttacttgtgccagtgacagatgcagtggtctcctttccccagttgaagcagtgcatacgcagtagctattatttgtgttatctttatttctcttcattgttagaaaccaaagtcttctctgctggctggggctgagagagggtctgggttatctccttctgatcttcaaaacaagagagagaccttgaatacactgactcttccaccctttttttttctgggaaaggagagcaagaggtcccgagtcccctcctagtctttcatcctgaatttgcacagaggaaagcgggtgcccggcatggccatcctgatgttgctggcgggatccccatgcaccttgtccttctccactgatactggcagctcggctcctggacccaagatcccttgagtggaattctgcagtgcaagagcccttcgtgggagctgtcccatgtttccatggtccccagtctcccctccacttggtggggtcaccaactactcaccagaagggggcttaccaagaaagccctaaaaagctgttgacttatctgcgcttgttccaactcttatgcccccaacctgccctaccaccaccacgcgctcagcctgatgtgtttacatggtactgtatgtatgggagagcagactgcaccctccagcaacaacagatgaaagccagtgagcctactaaccgtgccatcttgcaaactacactttaaaaaaaactcattgctttgtattgtagtaaccaatatgtgcagtatacgttgaatgtatatgaacatactttcctatttctgttctttgaaaatgtcagaaatatttttttctttctcattttatgttgaactaaaaaggattaaaaaaaaaatctccagactcaagttgctaaaaa

SEQ ID NO: 19 - DNA, 3084 bp, HOMO SAPIENS
agcaaaccaatcgcaagcctcgttgagtggaaggggtgggatcttccccggaagtgttggttaaagcccctccaatcagcggctcggtgcggcaagtttgaatttcgtggaggctcgggttgtgagggttcctgcttcggagtcggcggtggtcgtccagaccgagtgttctttactttttgtttggttgaggtttcacgctagaaggtggctcaggatgtcttcatcacattttgccagtcgacacaggaaggatataagtactgaaatgattagaactaaaattgctcataggaaatcactgtctcagaaagaaaatagacataaggaatacgaacgaaatagacactttggtttgaaagatgtaaacattccaaccttggaaggtagaattcttgttgaattagatgagacatctcaagggcttgttccagaaaagaccaatgttaagccaagggcaatgaaaactattctaggtgatcaacgaaaacagatgctccaaaaatacaaagaagaaaagcaacttcaaaaattgaaagagcagagagagaaagctaaacgaggaatatttaaagtgggtcgttatagacctgatatgccttgttttcttttatcaaaccagaatgctgtgaaagctgagccaaaaaaggctattccatcttctgtacggattacaaggtcaaaggccaaagaccaaatggagcagactaagattgataacgagagtgatgttcgagcaatccgacctggtccaagacaaacttctgaaaagaaagtgtcagacaaagagaaaaaagttgtgcagcctgtaatgcccacgtcgttgagaatgactcgatcagctactcaagcagcaaagcaggttcccagaacagtctcatctaccacagcaagaaagccagtcacaagagctgctaatgaaaacgaaccagaaggaaaggtgccaagtaaaggaagacctgccaaaaatgtagaaacaaaacccgacaagggtatttcttgtaaagtcgatagtgaagaaaatactttgaattcacaaactaatgcaacaagtggaatgaatccagatggagtcttatcaaaaatggaaaacttacctgagataaatactgcaaaaataaaagggaagaattcctttgcacctaaggattttatgtttcagccactggatggtctgaagacctatcaagtaacacctatgactcccagaagtgccaatgcttttttgacacccagttacacctggactcctttaaaaacagaagttgatgagtctcaagcaacaaaagaaattttggcacaaaaatgtaaaacttactctaccaagacaatacagcaagattcaaataaattgccatgtcctttgggtcctctaactgtttggcatgaagaacatgttttaaataaaaatgaagctactactaaaaatttaaatggccttccaataaaagaagtcccatcacttgaaagaaatgaaggtcgaattgctcagccccaccatggtgtgccatatttcagaaatatcctccagtcagaaactgagaaattaacttcacattgcttcgagtgggacaggaaacttgaattggacattccagatgatgctaaagatcttattcgcacagcagttggtcaaacaagactccttatgaaggaaaggtttaaacagtttgaaggactggttgatgattgtgaatataaacgaggtataaaggagactacctgtacagatctggatggattttgggatatggttagttttcagatagaagatgtaatccacaaattcaacaatctgatcaaacttgaggaatctgggtggcaagtcaataataatatgaatcataatatgaacaaaaatgtctttaggaaaaaagttgtctcaggtatagcaagtaaaccaaaacaggatgatgctggaagaattgcagcgagaaatcgcctagctgccataaaaaatgcaatgagagagagaattaggcaggaagaatgtgctgaaacagcagtttctgtgataccaaaggaagttgataaaatagtgttcgatgctggatttttcagagttgaaagtcctgttaaattattctcaggactttctgtctcttctgaaggcccttctcaaagacttggaacacctaagtctgtcaacaaagctgtatctcagagtagaaatgagatgggcattccacaacaaactacatcaccagaaaatgccggtcctcagaatacgaaaagtgaacatgtgaagaagactttgtttttgagtattcctgaaagcaggagcagcatagaagatgctcagtgtcctggattaccagatttaattgaagaaaatcatgttgtaaataagacagacttgaaggtggattgtttatccagtgagagaatgagtttgcctcttcttgctggtggagtagcagatgatattaatactaacaaaaaagaaggaatttcagatgttgtggaaggaatggaactgaattcttcaattacatcacaggatgttttgatgagtagccctgaaaaaaatacagcttcacaaaatagcatcttagaagaaggggaaactaaaatttctcagtcagaactatttgataataaaagtctcactactgaatgccaccttcttgattcagtgggatcttgctatgttgctcgggctggtcttgaagtcctgggttcaagtgatcctaccacctcagcctcccgagtagctgggactacagccaggtctaaactgcagtaatccatttactcagctggagaggagacatcaagaacatgccagacacatttcttttggtggtaacctgattactttttcacctctacaaccaggagaattttgaatttaaaaataaatccaaacattttccttcatattatcaatgcttatatattccttagactattgaaattttggagaaaatgtatttgtgttcacttctatagcatataatgttttaatattctgtgttcatcaaagtgtattttagatatactctttctcaagggaagtggggatattttgtacattttcaacacagaataaaaaatgtactgtgccttgcctctcttgtttaa

SEQ ID NO: 20 - DNA, 3858 bp, HOMO SAPIENS
gaagttggcgcatgcgcctaaagctgacgggtttgaaatggcttcgatgttagccgggacccgactcagatcgatgctatagaagacaaacaagggaaggttttttttccttttgcatcatggctcaatttggaggacagaagaatccgccatgggctactcagtttacagccactgcagtatcacagccagctgcactgggtgttcaacagccatcactccttggagcatctcctaccatttatacacagcaaactgcattggcagcagcaggccttaccacacaaactccagcaaactatcagttaacacaaactgctgcattgcagcaacaagccgcagctgcagcagctgcattacaacagcaatattcacaacctcagcaggccctgtatagtgtgcaacaacagttacagcaaccccagcaaaccctcttaacacagccagctgttgcactgcctacaagccttagcctgtctactcctcagccaacagcacaaataactgtatcatatccaacaccaaggtccagtcaacagcaaacccagcctcagaagcagcgtgttttcacaggggtggttacaaaactacatgatacgtttggatttgtggatgaagatgtattctttcagcttagtgctgtcaaagggaaaaccccccaagtaggtgacagagtattggttgaagctacttataatcctaatatgccttttaaatggaatgcacagagaattcaaacactaccaaatcagaatcagtcgcaaacccagccattactgaagactcctcctgctgtacttcagccaattgcaccacagacaacatttggtgttcagactcagccccagccccagtcactgctgcaggcacagatttcagcagcttctattacaccactattgcagactcaaccacagcccttattacagcagcctcagcaaaaagctggtttattgcagcctcctgttcgtatagtttcacagccacaaccggcacgacgattagatcccccatcccgattttcaggaagaaatgacagaggggatcaagtgcctaacagaaaagatgatcgaagtcgtgagagagagagagaaagacgtagatcgagagaaagatcacctcagaggaaacgttcccgggaaagatctccacgaagagagcgagagcgatcacctcggagagttcgacgtgttgttccacgttacacagttcagttttcaaagttttctttagattgtcccagttgtgacatgatggaactaaggcgccgttatcaaaatttgtatatacctagtgacttttttgatgctcaatttacatgggtggatgctttccctttgtcaagaccatttcagctgggaaattactgcaatttttatgtaatgcacagagaagtagagtccttagaaaaaaatatggccattcttgatccaccagatgctgaccacttatacagtgcaaaggtaatgctgatggctagccctagtatggaagatttatatcataagtcatgtgctcttgctgaggacccacaagaacttcgagatggattccaacatcctgctagacttgttaagtttttagtgggcatgaaaggcaaggatgaagctatggccattggaggccactggtctccttcgttggatggaccagacccagaaaaagatccctctgtgttgattaagactgctattcgttgttgtaaggctctgacaggcattgatctaagtgtgtgcacacaatggtaccgttttgcagagattcgctaccatcgccctgaggagacccacaaggggcgtacagttccagctcatgtggagacagtggttttatttttcccggatgtttggcattgccttcccacccgctcagagtgggaaaccctctcccgaggatacaagcagcagctggtcgagaagcttcagggtgaacgcaaggaggctgatggagaacaggatgaagaagagaaggatgatggtgaagctaaagaaatttctacacctacccattggtctaaacttgatccaaagacaatgaaggtaaatgacctccgaaaagaattagaaagtcgagctcttagttccaaaggattaaaatcccagttaatagcccgattgacaaaacagcttaaagtagaggaacaaaaagaagaacagaaggagttagagaaatctgaaaaagaagaggatgaggatgatgataggaaatctgaagacgataaagaggaagaagaaaggaaacgtcaagaggaaatagaacgccagcgtcgagaaagaagatatattttgcctgatgaaccggccatcattgtacatccaaattgggctgcaaaaagtggcaagtttgattgtagcatcatgtctttgagtgtcctattggactacagattagaggataataaagaacattcatttgaggtttcattgtttgcggaacttttcaacgaaatgcttcaaagagattttggtgtccgtatatacaaatcattactgtctcttcctgagaaagaggacaaaaaagaaaaggataaaaaaagcaaaaaagatgagagaaaagataaaaaagaagaaagagatgatgaaactgatgaaccaaaacccaaacggagaaaatcaggcgatgataaagataaaaaagaagatagagatgaaaggaagaaagaagataaaagaaaagatgattctaaagatgatgatgaaactgaagaagataacaatcaagatgaatatgaccctatggaagcagaagaagctgaggatgaagaagatgatagggatgaggaagaaatgaccaaacgagatgacaaaagagatatcaacagatactgcaaggagaggccctctaaagataaggaaaaagaaaagactcaaatgatcacaattaacagagatctgttaatggcttttgtttattttgatcaaagtcattgtggttaccttcttgaaaaggatttggaagaaatactttatactcttggactacatctttctcgggctcaggtaaagaagcttcttaataaagtagtgctccgtgaatcttgcttttaccggaaattaacagacacctcaaaagatgaagagaaccatgaagagtctgagtcattgcaggaagatatgctaggaaacagattattacttccaacaccaacagtaaagcaggaatcaaaggatgtggaagaaaatgttggcctcattgtgtacaatggtgcaatggtagatgtaggaagcctcttgcaaaaattggaaaagagcgaaaaagtaagagctgaggtagaacagaagctgcagttactagaagaaaaaacagatgaagatgaaaaaaccatattaaatttggagaattccaacaaaagcctctctggtgaactcagagaagttaaaaaggaccttagtcagttacaagaaaacttaaagatttcggaaaacatgaatttacaatttgaaaaccaaatgaataagacaatcagaaacttatctacggtaatggatgaaatccacactgttctcaagaaggataatgtaaagaatgaagacaaagatcaaaaatccaaggagaatggtgccagtgtatgataaaatccatgtagtgatgaggaatggtgttaaataatgtaatatataaaaatcatgatataagaatgtttgaaggtgatgcatgtttgattttagtagtataaatgtattttagttcaaatgatgtataaagttttatgaatgtgagtttctgcttttgaaaattgcttgtaattcctagccttcaaattattaaacactccttgagtgaaataattttgcattgcaaagtgttttaggatgaactttgttatagttttaactccaataaagttcatcagtttaa

SEQ ID NO: 21 - DNA, 10540 bp, HOMO SAPIENS
aggagccggaggaggagccgccgccgccgttgacccggccgccggccgggagctgggagagatgcggagcccggccaccggcgtccccctcccaacgccgccgccgccgctgctgctgctgttgctgctgctgctgccgccgccactattgggagaccaagtggggccctgtcgttccttggggtccaggggacgaggctcttcgggggcctgcgcccccatgggctggctctgtccatcctcagcgtcgaacctctggctctacaccagccgctgcagggatgcgggcactgagctgactggccacctggtaccccaccacgatggcctgagggtttggtgtccagaatccgaggcccatattcccctaccaccagctcctgaaggctgcccctggagctgtcgcctcctgggcattggaggccacctttccccacagggcaagctcacactgcccgaggagcacccgtgcttaaaggctccacggctcagatgccagtcctgcaagctggcacaggcccccgggctcagggcaggggaaaggtcaccagaagagtccctgggtgggcgtcggaaaaggaatgtaaatacagccccccagttccagccccccagctaccaggccacagtgccggagaaccagccagcaggcacccctgttgcatccctgagggccatcgacccggacgagggtgaggcaggtcgactggagtacaccatggatgccctctttgatagccgctccaaccagttcttctccctggacccagtcactggtgcagtaaccacagccgaggagctggatcgtgagaccaagagcacccacgtcttcagggtcacggcgcaggaccacggcatgccccgacgaagtgccctggctacactcaccatcttggttactgacaccaatgaccatgaccctgtgttcgagcagcaggagtacaaggagagcctcagggagaacctggaggttggctatgaggtgctcactgtcagggccacggatggtgatgcccctcccaatgccaatattctgtaccgcctgctggaggggtctgggggcagcccctctgaagtctttgagatcgaccctcgctctggggtgatccgaacccgtggccctgtggatcgggaagaggtggaatcctaccagctgacggtagaggcaagtgaccagggtcgggacccgggtcctcggagtaccacagccgctgttttcctttctgtggaggatgacaatgataatgccccccagtttagtgagaagcgctatgtggtccaggtgagggaggatgtgactccaggggccccagtactccgagtcacagcctcggatcgagacaaggggagcaatgccgtggtgcactatagcatcatgagtggcaatgctcggggacagttttatctggatgcccagactggagctctggatgtggtgagccctcttgactatgagacgaccaaggagtacaccctacgggtgcgagcacaggatggtggccgtcccccactctctaatgtctctggcttggtgacagtacaggtcctggatatcaacgacaatgcccccatcttcgtcagcacccctttccaggctactgtcctggagagtgtccccttaggctacctggttctccatgtccaggctatcgacgctgatgctggtgacaatgcccgcctggaataccgccttgctggggtgggacatgacttccccttcaccatcaacaatggcacaggctggatctctgtggctgctgaactggaccgggaggaagttgatttctacagctttggggtagaagctcgagaccatggcactccagcactcactgcctcggccagtgtcagcgtgactgtcctggatgtcaacgacaacaatccaacctttacccaaccagagtacacagtgcggctcaatgaggatgcagctgtgggcaccagcgtggtgacggtgtcagctgtggaccgtgatgctcatagtgtcatcacctaccagatcaccagtggcaatactcgaaaccgcttctccatcaccagccaaagtggtggtgggctggtatcccttgccctgccactggactacaaacttgagcggcagtatgtgttggctgttaccgcctccgatggcactcggcaggacacggcacagattgtggtgaatgtcaccgacgccaacacccatcgtcctgtctttcagagctcccactatacagtgaatgttaatgaggaccggccggcaggcaccacggtggtgctgatcagcgccacggatgaggacacaggtgagaatgcccgcatcacctacttcatggaggacagcatcccccagttccgcatcgatgcagacacgggggctgtcaccacccaggctgagctggactatgaagaccaagtgtcttacaccctggccattactgctcgggacaatggcattccccagaagtccgacaccacctacctggagatcctggtgaacgacgtgaatgacaatgcccctcagttcctgcgagactcctaccagggcagtgtctatgaggatgtgccacccttcactagcgtcctgcagatctcagccactgatcgtgattctggacttaatggcagggtcttctacaccttccaaggaggcgacgatggagacggtgactttattgttgagtccacgtcaggcatcgtgcgaacgctacggaggctggatcgagagaacgtggcccagtatgtcttgcgggcatatgcagtggacaaggggatgcccccagcccgcacacctatggaagtgacagtcactgtgttggatgtgaatgacaatccccctgtctttgagcaggatgagtttgatgtgtttgtggaagagaacagccccattgggctagccgtggcccgggtcacagccactgaccccgatgaaggcaccaatgcccagattatgtaccagattgtggagggcaacatccctgaggtctttcagctggacatcttctccggggagctgacagccctggtagacttagactacgaggaccggcctgagtacgtcctggtcatccaggccacgtcagctcctctggtgagccgggctacagtccacgtccgcctccttgaccgcaatgacaacccaccagtgctgggcaactttgagatccttttcaacaactatgtcaccaatcgctcaagcagcttccctgggggtgccattggccgagtacctgcccatgaccctgatatctcagatagtctgacttacagctttgagcggggaaatgaactcagcctggtcctgctcaatgcctccacgggtgagctgaagctaagccgcgcactggacaacaaccggcctctggaggccatcatgagcgtgctggtgtcagacggcgtacacagcgtgaccgcccagtgcgcgctgcgtgtgaccatcatcaccgatgagatgctcacccacagcatcacgctgcgcctggaggacatgtcacccgagcgcttcctgtcaccactgctaggcctcttcatccaggcggtggccgccacgctggccacgccaccggaccacgtggtggtcttcaacgtacagcgggacaccgacgcccccgggggccacatcctcaacgtgagcctgtcggtgggccagccgccagggcccgggggcgggccgcccttcctgccctctgaggacctgcaggagcgcctatacctcaaccgcagcctgctgacggccatctcggcacagcgcgtgctgcccttcgacgacaacatctgcctgcgggagccctgcgagaactacatgcgctgcgtgtcggtgctgcgcttcgactcctccgcgcccttcatcgcctcctcctccgtgctcttccggcccatccaccccgtcggagggctgcgctgccgctgcccgcccggcttcacgggtgactactgcgagaccgaggtggacctctgctactcgcggccctgtggcccccacgggcgctgccgcagccgcgagggcggctacacctgcctctgtcgtgatggctacacgggtgagcactgtgaggtgagtgctcgctcaggccgttgcaccccgggtgtctgcaagaatgggggcacctgtgtcaacctgctggtgggcggtttcaagtgcgattgcccatctggagacttcgagaagccctactgccaggtgaccacgcgcagcttccccgcccactccttcatcacctttcgcggcctgcgccagcgtttccacttcaccctggccctctcgtttgccacaaaggagcgcgacgggttgctgttgtacaatgggcgtttcaatgagaagcatgactttgtggccctcgaggtgatccaggagcaggtccagctcaccttctctgcaggggagtcaaccaccacggtgtccccattcgtgcccggaggagtcagtgatggccagtggcatacggtgcagctgaaatactacaataagccactgttgggtcagacagggctcccacagggcccatcagagcagaaggtggctgtggtgaccgtggatggctgtgacacaggagtggccttgcgcttcggatctgtcctgggcaactactcctgtgctgcccagggcacccagggtggcagcaagaagtctctggatctgacggggcccctgctactaggcggggtgcctgacctgcccgagagcttcccagtccgaatgcggcagttcgtgggctgcatgcggaacctgcaggtggacagccggcacatagacatggctgacttcattgccaacaatggcaccgtgcctggctgccctgccaagaagaacgtgtgtgacagcaacacttgccacaatgggggcacttgcgtgaaccagtgggacgcgttcagctgcgagtgccccctgggctttgggggcaagagctgcgcccaggaaatggccaatccacagcacttcctgggcagcagcctggtggcctggcatggcctctcgctgcccatctcccaaccctggtacctcagcctcatgttccgcacgcgccaggccgacggtgtcctgctgcaggccatcaccagggggcgcagcaccatcaccctacagctacgagagggccacgtgatgctgagcgtggagggcacagggcttcaggcctcctctctccgtctggagccaggccgggccaatgacggtgactggcaccatgcacagctggcactgggagccagcggggggcccggccatgccattctgtccttcgattatgggcagcagagagcagagggcaacctgggcccccggctgcatggtctgcacctgagcaacataacagtgggcggaatacctgggccagccggcggtgtggcccgtggctttcggggctgtttgcagggtgtgcgggtgagcgatacgccggagggggttaacagcctggatcccagccatggggagagcatcaacgtggagcaaggctgtagcctgcctgacccttgtgactcaaacccgtgtcctgctaacagctattgcagcaacgactgggacagctattcctgcagctgtgatccaggttactatggtgacaactgtactaatgtgtgtgacctgaacccgtgtgagcaccagtctgtgtgtacccgcaagcccagtgccccccatggctatacctgcgagtgtcccccaaattaccttgggccatactgtgagaccaggattgaccagccttgtccccgtggctggtggggacatcccacatgtggcccatgcaactgtgatgtcagcaaaggctttgacccagactgcaacaagacaagcggcgagtgccactgcaaggagaaccactaccggcccccaggcagccccacctgcctcttgtgtgactgctaccccacaggctccttgtccagagtctgtgaccctgaggatggccagtgtccatgcaagccaggtgtcatcgggcgtcagtgtgaccgctgtgacaacccttttgctgaggtcaccaccaatggctgtgaagtgaattatgacagctgcccacgagcgattgaggctgggatctggtggccccgtacccgcttcgggctgcctgctgctgctccctgtcccaaaggctcctttgggactgctgtgcgccactgtgatgagcacagggggtggctccccccaaacctcttcaactgcacgtccatcaccttctcagaactgaagggcttcgctgagcggctacagcggaatgagtcaggcctagactcagggcgctcccagcagctagccctgctcctgcgcaacgccacgcagcacacagctggctacttcggcagcgacgtcaaggtggcctaccagctggccacgcggctgctggcccacgagagcacccagcggggctttgggctgtctgccacacaggacgtgcacttcactgagaatctgctgcgggtgggcagcgccctcctggacacagccaacaagcggcactgggagctgatccagcagacagagggtggcaccgcctggctgctccagcactatgaggcctacgccagtgccctggcccagaacatgcggcacacctacctaagccccttcaccatcgtcacgcccaacattgtcatctccgtagtgcgcttggacaaagggaactttgctggggccaagctgccccgctacgaggccctgcgtggggagcagcccccggaccttgagacaacagtcattctgcctgagtctgtcttcagagagacgccccccgtggtcaggcccgcaggccccggagaggcccaggagccagaggagctggcacggcgacagcgacggcacccggagctgagccagggtgaggctgtggccagcgtcatcatctaccgcaccctggccgggctactgcctcataactatgaccctgacaagcgcagcttgagagtccccaaacgcccgatcatcaacacacccgtggtgagcatcagcgtccatgatgatgaggagcttctgccccgggccctggacaaacccgtcacggtgcagttccgcctgctggagacagaggagcggaccaagcccatctgtgtcttctggaaccattcaatcctggtcagtggcacaggtggctggtcggccagaggctgtgaagtcgtcttccgcaatgagagccacgtcagctgccagtgcaaccacatgacgagcttcgctgtgctcatggacgtttctcggcgggagaatggggagatcctgccactgaagacactgacatacgtggctctaggtgtcaccttggctgcccttctgctcaccttcttcttcctcactctcttgcgtatcctgcgctccaaccaacacggcatccgacgtaacctgacagctgccctgggcctggctcagctggtcttcctcctgggaatcaaccaggctgacctcccttttgcctgcacagtcattgccatcctgctgcacttcctgtacctctgcaccttttcctgggctctgctggaggccttgcacctgtaccgggcactcactgaggtgcgcgatgtcaacaccggccccatgcgcttctactacatgctgggctggggcgtgcctgccttcatcacagggctagccgtgggcctggaccccgagggctacgggaaccctgacttctgctggctctccatctatgacacgctcatctggagttttgctggcccggtggcctttgccgtctcgatgagtgtcttcctgtacatcctggcggcccgggcctcctgtgctgcccagcggcagggctttgagaagaaaggtcctgtctcgggcctgcagccctccttcgccgtcctcctgctgctgagcgccacgtggctgctggcactgctctctgtcaacagcgacaccctcctcttccactacctctttgctacctgcaattgcatccagggccccttcatcttcctctcctatgtggtgcttagcaaggaggtccggaaagcactcaagcttgcctgcagccgcaagcccagccctgaccctgctctgaccaccaagtccaccctgacctcgtcctacaactgccccagcccctacgcagatgggcggctgtaccagccctacggagactcggccggctctctgcacagcaccagtcgctcgggcaagagtcagcccagctacatccccttcttgctgagggaggagtccgcactgaaccctggccaagggccccctggcctgggggatccaggcagcctgttcctggaaggtcaagaccagcagcatgatcctgacacggactccgacagtgacctgtccttagaagacgaccagagtggctcctatgcctctacccactcatcagacagtgaggaggaagaagaggaggaggaagaggaggccgccttccctggagagcagggctgggatagcctgctggggcctggagcagagagactgcccctgcacagtactcccaaggatgggggcccagggcctggcaaggccccctggccaggagactttgggaccacagcaaaagagagtagtggcaacggggcccctgaggagcggctgcgggagaatggagatgccctgtctcgagaggggtccctaggcccccttccaggctcttctgcccagcctcacaaaggcatccttaagaagaagtgtctgcccaccatcagcgagaagagcagcctcctgcggctccccctggagcaatgcacagggtcttcccggggctcctccgctagtgagggcagccggggaggcccccctccccgcccaccgccccggcagagcctccaggagcagctgaacggggtcatgcccatcgccatgagcatcaaggcaggcacggtggatgaggactcgtcaggctccgaatttctcttctttaacttcctgcattaaccctgggccgtggttcctacgcccgaggctcccttcccttccccagccgcactcatgccctgctcctgtcttgtgctttatcctgccccgctccccatcgcctgcccgcagcagcgacgaaacgtccatctgaggagcctgggccttgccgggaggggtactcaccccacctaaggccatctagtgccaactccccccccaccattcccctcactgcactttggacccctggggccaacatctccaagacaaagtttttcagaaaagaggaaaaaaagaatttaaaaaaggatctccactcttcatgacttcagggattcattttttttatacgctggaaattgactcccctttcccttcccaaagaggataggacctcccaggatgcttcccagcctctcctcagtttcccatctgctgtgcctctgggaggagagggactcctggggggcctgcccctcatacgccatcaccaaaaggaaaggacaaagccacacgcagccagggcttcacacccttcaggctgcacccgggcaggcctcagaacggtgaggggccagggcaaagggtgtgcctcgtcctgcccgcactgcctctcccaggaactggaaaagccctgtccggtgagggggcagaaggactcagcgcccctggacccccaaatgctgcatgaacacattttcaggggagcctgtgcccccaggcgggggtcgggcagccccagcccctctccttttcctggactctggccgtgcgcggcagcccaggtgtttgctcagttgctgacccaaaagtgcttcatttttcgtgcccgccccgcgccccgggcaggccagtcatgtgttaagttgcgcttctttgctgtgatgtgggtgggggaggaagagtaaacacagtgctggctcggctgccctgagggtgctcaatcaagcacaggtttcaagtctgggttctggtgtccactcacccaccccaccccccaaaatcagacaaatgctactttgtctaacctgctgtggcctctgagacatgttctatttttaaccccttcttggaattggctctcttcttcaaaggaccaggtcctgttcctctttctccccgactccaccccagctccctgtgaagagagagttaatatatttgttttatttatttgctttttgtgttgggatgggttcgtgtccagtcccgggggtctgatatggccatcacaggctgggtgttcccagcagccctggcttgggggcttgacgcccttccccttgccccaggccatcatctccccacctctcctcccctctcctcagttttgccgactgcttttcatctgagtcaccatttactccaagcatgtattccagacttgtcactgactttccttctggagcaggtggctagaaaaagaggctgtgggcaggaaagaaaggctcctgtttctcatttgtgaggccagcctctggcttttctgccgtggattctcccccgtcttctcccctcagcaattcctgcaaagggttaaaaatttaactggtttttactactgatgacttgatttaaaaaaaatacaaagatgctggatgctaacttggtactaaccatcagattgtacagtttggttgttgctgtaaatagggtagcgttttgttgttgttgttttttcatgccccatactactgaataaactagttctgtgcgggtacagca

SEQ ID NO: 22 - DNA, 4701 bp, HOMO SAPIENS
aatccatccgcatggctttttgctctagttcctcagatctttctgcgctagctgcactcccaagcccaggcttagatctaccctaatctagtcccagccccgacctcatggacactggctgcaaaacttaccgccttgcaacacctggatccttaaatagttcagggcctcaaaggctcccaagccgccctgcgcctgttgctatggcgactgggcaggcggccggaagcgcggccttgttgggggcccccgttgcccgcctcccagtagccgcgcctcaccctaggccaggaatggttttagggaagactgttgccggatgacaaggctgtcactattgttctgtactacctgacattatgggaccaggccagccagcttcaacctgtgttcatctagcacctaggacccaacttgatgggaggagcgaccccaaagtacttcagacccagaaccagctgcagtttaataggaatgttcctacacattcaagcaacttggcgatccgatattcttgcccacatgccattagaattgaaaaactgaagcactcatacaatgaatcataccattgtaaagatgcagattgtagagttggtcctgacctgggcagttctgtttcattttccgtcatatcccaagagagacttagctatgctgtccacctagccagaagagatgtgaaacgaagacaatttgaaaaacatataaaagaacatcatctcagaagtcagcctcaaagctctcagaagtgtggacatactaagtataaaatacccgaccacagggtggaaaggaaggaatcaaagagtcaagcagcctgtcagtgtagccaccagccatccaaagtagaaatctccagctctggtgccaaagtatacctttactcatctcatccaggccagtcagatcttactgtgccaaattcgccacccacccatgatccgggacttcagcctcatcccaggataggtgaccacaaaaacataagtgaacagaaaagcctgctagaagtccagcgactccagaaagaactgagcagttgtatccacaaaattgaagaggtaactaaaaaagatagactagaagaagctttggatccagatgaagaacgtcgaatccgtatcaggagacaggagcaagctgctcgctctgcccgaatgctctacgtcctccagcagcaggtaaaagaaatccaggaagaattggataaattgagtccacataaaattaaacacactaagaagtcatgggcaatgtctaagctggcggctgcccatcgaggagccattcgggccttacagatgtttgtcactcagtttactgaccgaggggagcatccacttcctgctcggtgtaaggaactgggcagccttattcgccagctttcactttgttctgtcaagctggatgcagacccttctgttcctgatgtggttatagatattctgcaacaaattgaggctttggaatctctcctggaaaagaaactgtcaccaaaaaaggtgaaaaaatgtttcagtgaaattcggagcagatttcctatcggtagccaaaaggccttggagagatggccaagtacatcaccaaagggtgagaggaggcccctcacagcaaaggacacattcccacaggaaacaagtcgaccttctgtagcaaagcagcttcttgccgataagtatcagcccgatacggagcttccggagacccagaggttgcagagtgagcttgatgtattagatgcggatatagttctggaagaaggaccatttattctagaccaaagtgcaagcttcaaagacgaggtgttagccgtggcaaaaacaaaagcagggaaaaagaagcctgtgactgagaatgtgccgtttaggaagaaagatactctggcgccagcaagacagcaaggactccgcaaagctgaaagaggtagacaaagccaacctcacagtaaaagcagagtgcagcagacaacagtttcatccagattaaaaatgaaccggcagcctgtgaaagaccgcaaggcaccatggatacccccaaaccccacatccccaccagcgtctcctaaatgtgctgcatggctaaaggtgaaaactagccccagagatgccacaaaagagcctctccagcaagaagatcctcaagaggaaagtcacctgacaggtgctgttgagcatgaagcagccaggctcgcttggcttgatgctgaaacttccaaaagattgaaggaactagaagagttaaaagccaaggaaattgacagcatgcaaaaacagaggcttgattggcttgatgctgaaacttctagaagaacaaaggaactgaatgagctcaaagctgaagaaatgtatagactccaacaattgagtgtttctgccacccacttagcagacaaggtagaggaggcagttctggatcgtttgaagcctctcttggtcaaggcccagagagtcaattctactacagaagcaaatattcatttgaaagatggctcgtcagtaaacacagcgaaagcccagcctgcacaggaggttgcagctgttgattttgaatccaacaacattcgtcagcttgatgattttttggaagattgtgccagtgagctctgggctgtgactcatgctaagatcttggggtctgaaaccttagccaccgttgaggacagcaaggatagcccagatctggagatcatgatgcgccgaatggaagagatggaaaaataccaggagtctgttcgtcaaagatataataaaatcgcatatgctgatcctcgactttggatgcaggaagaaaacaatgaccaaaaaatctcagcaataagtgaaaagcctctatctcctcatccaatcagaatcacgaagacagtggatcgcaaggatccagccgtgaacatcatgttagaaaggccctgtaatggcaattccctggatgaaagtgtgggaacagaggaaggatcagagaaaagagaggcccctcttctctccctagccgaagattctcaacagaaagaaggccgagctcccctctttgtcccaccgggtatgcagcacagcatcggtgactactgtagtcgttttgagcagtaccttcggatcatatctcatgaggctgtaggctccttcaacccgtggctgatagctgaaagcttttcagaagagctggtagatgaagctctgggtgctgtggctgctgaacttcaggatatgtgcgaagattatgcagaagctgtgttcacctcagaattcttagaggctgctacataaaggctctctgaggcgaggccatttgtgtcacactggagaagggatggcaccaccctttgttttggcccacaggaaattttcatcctcagctgtccatccaggcccagaaggtgctgcccactgaaaggaaggcagtgccggggaggtcatcctcactttgcattttcttttgtcatggcaatggttctggaaatgtatgatgcaatgtatcacacttatcagtgcccaggcaacacaacttgattatggcaatattttcagaatgtgtacttttcctattgaaataccatgttcattcctctggctcagtttggtgatgaaaatgttttgaaagataatcgatacgtatatttcacacaaggattcaggttgctgttgaacccttgctggcattgataccaacacaagtgcggctactagctggtcccatcacggggcccctgttttgcatctttggcgatttcctgtcaggacctctggccctactaggctgtagactcagggagagcacagtctggctgtgctgccaaacctctcctctgctgcagtttattccaaacaggagccccctggctgtcagtgcacaataatagacacacatttcttcaacgttccattcctaggtgattttcacatttttagttcctcagcatattttattgctgtgtgttgacacaatctggtataaaaaactttctctggattcagaggaagtttgaggaatcaggagaggaccaggccttctcctgtgcctgggtgaaggtacagacctcgctgtgtctccgatgaggtcagaagtgtctctatttcataccacaaaggaacccaagtgggagtagggaacagatggatggcgcgaagacctctgtgtctccccagagaaaggaagaaacttaagaaccatcatagcctggtcctccaacatcttacagatcatgttttccaagagaaaagcctgtgttttcagaaactctgaattcagaaaaagaaacggaatgtgcgtaagaatcaggccactgcctggaaagactttctctcaattcgtagcctgaggctcagtgaaggaaacatgcagaaagaatgcctgagacgcccccagggaataagggaactctttataacctgtccagtgccgtcatctgggatttttctctgaagtacaagaatttcaggtgatttaagctgcttgatcacacttatttgtgcaaaattgattttcatttaatgttaatgttttcctgcttaattttatataacttcagaatgtaaagagcttcaaggtaaattacagggtgtttaacctggggagttaaatgtgtacacttgaattaataggagcaccggttgttgctagtataaagtaatttgtgtggcagtttgtactgtgctgagtttttaaaataaacccaatattttaaagtaaaaaaaaaaaaaaaaa

SEQ ID NO: 23 - DNA, 211 bp, HOMO SAPIENS
  misc_feature (98)..(98): n is a, c, g, or t
  misc_feature (183)..(183): n is a, c, g, or t
agtcaggatgtttccgaatgccagggtttcaaaatcaagacaattctatgaagtaaaaagtagattagctattagaacaaagctgaaattagaacctnatatgctttaaataacttttaagaatttgcttgacctgtggcaatccaaaaatacatcagtatttataaattctagacttctgtnactacttctggcatatccacactttttt

SEQ ID NO: 24 - DNA, 2200 bp, HOMO SAPIENS
ccgggaccatggagcctggtgacgcggcgcgccctggctcgggtcgggctaccggggcgccgccgccgcggctgctgctgctgccgctgctgctgggttgggggctgcgagtcgcggccgcggcctcggcctcctcctctggggcggcggcggaggacagcagcgccatggaggagctcgctactgagaaggaggcggaggagagccaccggcaagacagcgtgagcctgctcaccttcatcctgctgctcacgctcaccatcctcaccatctggctcttcaagcaccgccgggtgcgctttctgcacgagaccgggctggccatgatctatgggctcatcgttggggtgatcctgaggtatggtacccctgctaccagtggccgtgacaaatcactcagctgcactcaggaagacagggccttcagtaccttattagtgaatgtcagcggaaagttcttcgaatacactctgaaaggagaaatcagtcctggcaagatcaacagcgtagagcagaatgatatgctacggaaggtaacattcgatccagaagtatttttcaacattcttctgcctccaattatttttcatgctggatacagcttaaagaagagacactttttcagaaatcttggatctatactggcctatgccttcttggggactgctgtttcatgcttcattattggaaatctcatgtatggtgtggtgaagctcatgaagattatgggacagctctcagataaattttactacacagattgtctcttttttggagcaatcatctctgccactgacccagtgactgtgctggcgatatttaatgaattgcatgcagacgtggatctttacgcacttctttttggagagagcgtcctaaatgatgctgttgccattgtactgtcctcgtctattgttgcctaccagccagcgggactgaacactcacgcctttgatgctgctgccttttttaagtcagttggcatttttctaggtatatttagtggctcttttaccatgggagctgtgactggtgttaatgccaacgtgactaagtttaccaaactgcactgcttccccctgctggagacggcgctgttcttcctcatgtcctggagcacgtttctcttggcagaagcctgcggatttacaggtgttgtagctgtccttttctgtggaatcacacaagctcattacacctacaacaatctgtcggtggaatcaagaagtcgaaccaagcagctctttgaggtgttacatttcctggcagagaacttcatcttctcctacatgggcctggcactgtttaccttccagaagcacgttttcagccccattttcatcatcggagcttttgttgccatcttcctgggcagagccgcgcacatctacccgctctccttcttcctcaacttgggcagaaggcataagattggctggaattttcaacacatgatgatgttttcaggcctcaggggagcaatggcatttgcgttggccatccgtgacacggcatcctatgctcgccagatgatgttcacgaccacccttctcattgtgttcttcactgtctggatcattggaggaggcacgacacccatgttgtcatggcttaacatcagagttggcgtcgaggagccctccgaagaggaccagaatgaacaccactggcagtacttcagagttggtgttgaccccgatcaagacccaccacccaacaacgacagctttcaagtcttacaaggggacggcccagattctgccagaggaaaccggacaaaacaggagagcgcatggatattcaggctgtggtacagctttgatcacaattacctgaagcccatcctcacacacagtggtcccccactaaccaccacgctccccgcctggtgtggcttactagctcgatgtctgaccagtccccaggtgtacgataaccaagagccactgagagaggaagactctgatttcatcctgaccgaaggcgacctgacattgacctacggggacagcacagtgactgcaaatggctcctcaagttcgcacaccgcctccacgagtctggagggcagccggagaacgaagagcagctcggaggaagtgctggagcgagacctgggaatgggagaccagaaggtttcgagccggggcacccgcctagtgtttcccctggaagataatgcttgactttccccccaagc

SEQ ID NO: 25 - DNA, 1344 bp, HOMO SAPIENS
gaaagagaacctgtaaacgctctcggaattatggcggcggtggatatccgagacaatctgctgggaatttcttgggttgacagctcttggatccctattttgaacagtggtagtgtcctggattacttttcagaaagaagtaatcctttttatgacagaacatgtaataatgaagtggtcaaaatgcagaggctaacattagaacacttgaatcagatggttggaatcgagtacatccttttgcatgctcaagagcccattcttttcatcattcggaagcaacagcggcagtcccctgcccaagttatcccactagctgattactatatcattgctggagtgatctatcaggcaccagacttgggatcagttataaactctagagtgcttactgcagtgcatggtattcagtcagcttttgatgaagctatgtcatactgtcgatatcatccttccaaagggtattggtggcacttcaaagatcatgaagagcaagataaagtcagacctaaagccaaaaggaaagaagaaccaagctctatttttcagagacaacgtgtggatgctttacttttagacctcagacaaaaatttccacccaaatttgtgcagctaaagcctggagaaaagcctgttccagtggatcaaacaaagaaagaggcagaacctataccagaaactgtaaaacctgaggagaaggagaccacaaagaatgtacaacagacagtgagtgctaaaggcccccctgaaaaacggatgagacttcagtgagtactggacaaaagagaagcctggaagactcctcatgctagttatcatacctcagtactgtggctcttgagctttgaagtactttattgtaaccttcttatttgtatggaatgcgcttattttttgaaaggatattaggccggatgtggtggctcacgcctgtaatcccagcactttgggaggccatggcgggtggatcacttgaggtcagaagttcaagaccagcctgaccaatatggtgaaaccccgtctctactaaaaatacaaaaattagccgggcgtggtggcgggcgcccatagtcccagctactcgggaggctgagacaggagacttgcttgaacccgggaggtggaggttgccctgagctgattatcatgctgttgcactccagcttgggcgacagagcgagactttgtctcaaaaaagaagaaaagatattattcccatcatgatttcttgtgaatatttgttatatgtcttctgtaacctttcctctcccggacttgagcaacctacacactcacatgtttactggtagatatgtttaaaagcaaaataaaggtatttgtata

SEQ ID NO: 26 - DNA, 4472 bp, HOMO SAPIENS
ctcgggataccttgtttatagtaccttctctttgccagtccatcttcaaattggaattatagaaagtagagggagggatagtctaccgtctctcactggattggtgccacctaaaacattgttatgctggaaatgctagaatataatcactatcaggtgcagacccacctcgaaaaccccaccaagtaccacatacagcaagcccaacggcagcaggtaaagcagtacctttctaccactttagcaaataaacatgccaaccaagtcctgagcttgccatgtccaaaccagcctggcgatcatgtcatgccaccggtgccggggagcagcgcacccaacagccccatggctatgcttacgcttaactccaactgtgaaaaagagggattttataagtttgaagagcaaaacagggcagagagcgagtgcccaggcatgaacacacattcacgagcgtcctgtatgcagatggatgatgtaatcgatgacatcattagcctagaatcaagttataatgaggaaatcttgggcttgatggatcctgctttgcaaatggcaaatacgttgcctgtctcgggaaacttgattgatctttatggaaaccaaggtctgcccccaccaggcctcaccatcagcaactcctgtccagccaaccttcccaacataaaaagggagctcacagcgtgtatttttcccacagagtctgaagcaagagcactggccaaagagaggcagaaaaaggacaatcacaacctgattgaacgaagaagaagatttaacataaatgaccgcattaaagaactaggtactttgattcccaagtcaaatgatccagacatgcgctggaacaagggaaccatcttaaaagcatccgtggactatatccgaaagttgcaacgagaacagcaacgcgcaaaagaacttgaaaaccgacagaagaaactggagcacgccaaccggcatttgttgctcagaatacaggaacttgaaatgcaggctcgagctcatggactttcccttattccatccacgggtctctgctctccagatttggtgaatcggatcatcaagcaagaacccgttcttgagaactgcagccaagacctccttcagcatcatgcagacctaacctgtacaacaactctcgatctcacggatggcaccatcaccttcaacaacaacctcggaactgggactgaggccaaccaagcctatagtgtccccacaaaaatgggatccaaactggaagacatcctgatggacgacaccctttctcccgtcggtgtcactgatccactcctttcctcagtgtcccccggagcttccaaaacaagcagccggaggagcagtatgagcatggaagagacggagcacacttgttagcgaatcctccctgcactgcattcgcacaaactgcttcctttcttgattcgtagatttaataacttacctgaaggggttttcttgataattttcctttaatatgaaattttttttcatgctttatcaatagcccaggatatattttatttttagaattttgtgaaacagacttgtatattctattttacaactacaaatgcctccaaagtattgtacaaataagtgtgcagtatctgtgaactgaattcaccacagactttagctttctgagcaagaggattttgcgtcagagaaatgtctgtccatttttattcaggggaaacttgatttgagatttttatgcctgtgacttccttggaaatcaaatgtaaagtttaattgaaagaatgtaaagcaaccaaaaagaaaaaaaaaaagaaagaaagaggaaaagaaatccatactaacccttttccattttataaatgtattgattcattggtactgccttaaagatacagtacccctctagctttgtttagtctttatactgcaaactatttaaagaaatatgtattctgtaaaagaaaaaaaaaatgcggccttttcatgaggatcgtctggttagaaaacataactgataccaaccgaaactgaagggagttagaccaaggctctgaaatataaagtctaatcttgctctcttttattctgtgctgttacagttttcttcatcaatgagtgtgatccagtttttcataagatattttattttgaaatggaaattaatgtcctctcaaagtaaaatattgaggagcactgaaagtatgttttactttttttttattttatttttgcttttgataagaaaaccgaactgggcatatttctaattggctttactatttttatttttaaattatgttttactgttcatttgatttgtacagattctttattatcattgttcttttcaatatatttgtattaatttgtaagaatatgcatcttaaaatggcaagttttccatatttttacaactcactggtggttttccgcattctttgtacacccatgaaagaaaacttttatgcaaggtcttgcatttaaaagacagctttgcgaatattttgtaaattacagtctcactcagaactgtttttggacacatttaaggtgtagtattaataggttaaaaccaggctttctagaaagaataaacttacatatttatttttaggacatgaaaatagcaatattcttggagattgataaccatagcattaatacgcccattatggtcatttaaattggggtttatttcagcaaacttgttgaatttatttttaagaaagaaatactgtattgggaagttactgttacttgataacaatgttttaacaagaagcaatgttataaagttagtttcagtgcattatctacttgtgtagtcctatgcaataacagtagtgttacatgtatcaagcctagatgttttatacagatgccatatagtgttatgagccaggctgttgaatggaatttctcagtagcagcctacaactgaatagcaagtggcataaagcatatccattcagaatgaagtgccttaaatatagcagtagtcttttttggactagcactgactgaactgtaatgtaggggaaagtttcatgatggtatctatagtcaagacgaacatgtagcatggtgcctatgtagacaatataagagcttccaattttccttcagatatttttaatattaaatatattttagtgacagagtgccaacttctttcatcaggaaaccttattcaggagggtttttaaaaagtgtttaaatgtcaaatgtgaattggtgatgggtgatggagggttcagagaggagtgatcgtcagatgtgtgaatggacggtttaggtgaaaataatcaactgcatagttcccatgcacgctgggcaatgagaatccttggaaacattggtgatgctatcagttttatagctttatttcttaagggggtagggaaaattagttcccattctttcaacccccttaactgtatagctcttttcctagaatagtgacgcaaatctgcatgaacagctaattgtaccatagtgttcattgatacaatcatagcattgtctatttttctcttcatatttatatgggggggagggcgctggatgcaaaagttgaagatcgtgatgctatgatgttagttttccttagctgattttgagggtttttaaaaataaagcaaggttgactaacctacggccacgggaacaggaccatggttaagcaaccatatagaaagctttgttgaaagaaagtatggcatcttgtaccactgccctgactgtcacaactcctaaccttgccattgcctgcctccccctccccttctccttaagagacaatttctgcaggtggcaggtgagcaagcccaggagaatgctgcaatcttgggggtggttttatttatttcttttttgccaaatagagtgtggattcatttcaggggctagctaagccaagaggcagtggtttgggcttgttgtttgtaacaagaaaatgatccacaccactcccccgattcccgggtgcagaattgtaactcggggttgggcctctatatggagtgaccaaaatgccaaaattgtccatctgcctctgagtagggcaatggaaataccaaaccttctgactttgccaaaaagcatacaagcaacctggtcatacataggatgacaaaattctttctggttgtttttaaacaataaagcaataagaacaaatacaatacataggaagttaaaagcacaaaggaatgaacttattaatatttttgaaaaatgcactgggaaaaagttgatgtcaataacagtataaaacagccctatttcttgataaaaaatgacaaatgactgtctcttgcggatgcttggtactgtaatgttaataatagtcacctgctgttggatgcagcaataatttctgtatggtccatagcactgtatattatggatcgatattaatgtatccaatgaaataatcgacttgttcttgatagcctcattaaagcatttggtttttcacatag

SEQ ID NO: 27 - DNA, 2359 bp, HOMO SAPIENS
gggcagtccacaatggaaggcttcttggaggaggagatgattgagctgcttctactaagatgagtatctcagagtcctcaacgtgggtgtggccgaggtgaagaaatccttcctggggcccttgtccccgtcctgtaagatggtgcagatgatgaggcagtttctgtaccgggtcctgcccgaggactcctacaaggtcaccacggggaagctccatgtgagcctcacccgcttaacggacggggagaatgtggtggtttcagagttcacgtccaaggaggagctcattgaggccctatactgcagctgcttcgtcccggtgtactgtggcctcatccccccgacttaccgcggtgtgtgggcatttctcactctgcccccacagaggtacatcgatgggggcttcacgggcatgcagccctgtgccttctggaccgacgccatcaccatctccaccttcagtgggcagcaggacatctgtccccgggactgcccggccatcttccacgacttccgcatgttcaactgctccttccagttctccctggagaacatcgccaggatgacccacgcattgttccccccggacctggtgatcctgcacgattactactaccgagggtacgaggatgcagttttgtacttgaggcggctgaatgctgtttatcttaattcttcctccaagagagtgattttcccccgggtggaagtgtactgccagatagaactcgcccttggcaatgagtgccctgaacgcagtcaaccaagccttcgagcacggcaggccagtctggaaggagccacacaacctcacaaggagtgggttcccaaaggggatggaaggggcagccatggtccgcctgtgtcccaacctgtgcagacacttgaattcacatgcgagtcacctgtttcagcaccagtctctccacttgagcagccacctgcacagccactggcctcttcaactccactttctctaagtggcatgccacctgtatcattcccagctgtgcacaagccacccagctccacacctggttcatcactgcccaccccaccacctggactgtcacctctgtcacctcagcagcaggtacaaccgtctggatcaccagccagatccctacactctcaggcacccacttcacccaggccatccctggggccttcaactgtgggggcacctcaaacactgccccgaagttctctttcagccttccctgctcagccacctgtggaggaactaggccaagaacagccccaagctgtagctcttcttgtctcttcaaaaccaaaaagcgccgtgcctctggttcatgtgaaggaaaccgtcagcaagccttatgtaacggagagccctgctgaagactcaaactgggtgaataaggtcttcaagaagaacaagcaaaagacaagtggcaccagaaaaggcttcccaagacattcgggatccaaaaaaccaagcagcaaagtgcagtgagcatgtctaatgttccttaaatcccacggagaggagcagctttgggaactgtgttcagagagattccgaggaatagaggagagtgtaagggagtagggggtgcagtgggagattgggctttggaacagacacatccgacataaaattcctgctctgccacagctccactcagggatcatggttgggacacttgctctccctgagcctccatttcctgtaaaatggggatgataccacttcataaagttgtgagagttaaatgtgatcgatgatgtaaattgcttcatagaatgcagaatgtgtaatagctcacaataagtaggtattatgtttacatattatgtttgtatttatgctacttaaatacaaaactggacaggccaggcatggtggctcatgcctgtaatcccagcactttgggaggctgaggtaggtggaaaacctgaggtcaggagttcaagaacagcctgaccaacatggtgaaactccatctctactaaaaatacaaaaattaaccaggcttgatggtgtgcacctgtaatctcagctactcgggaggctgaggcaagagaatcgcttgaacccaggaggcagaggttgcagtgcaccaagactgcgccattgcactccagcccgggcaacaagagcgaaaccccatctcgaaaaaaaacaaaacaaaactagacaagtgagtgcctacgtgacactcaaatgttgccagcatacagttaagggccctagtcaatgtaggcctgcttcttatagctttttgactatattatgctgtctttgacttagtcagtcaacacttattgagcacctactaagtgccaaacactctcctggactctggcaaaataaaaaatgaattaaaactct

SEQ ID NO: 28 - DNA, 7531 bp, HOMO SAPIENS
gaccagcttccccaactccctctggctcccgccttcgcccgcttccggtcgtcgtcgtcgccgctgctgccgctgctgttgctcctgaggctgctggctgaggccggaggatcgagcggcggcggcggcggcggctgagagggcggcggcgggagcggagcgggacgagggaacgggaggaagcgagcgaggagcgcgcagagcgcgcttttccgtccgcctgaggagccgaagcagccccggccccgccgccgccgcctgcccgccggacaaagccgagagcccgcgcccacagccatgtcctcgtcagccggcagcggccaccagcccagccagagccgcgccatccccacccgcaccgtggccatcagcgacgccgcgcagctacctcatgactattgcaccacgcccggggggacgctcttctccaccacaccgggaggaactcgaatcatttatgacagaaagtttctgttggatcgtcgcaattctcccatggctcagaccccaccctgccacctgcccaatatcccaggagtcactagccctggcaccttaattgaagactccaaagtagaagtaaacaatttgaacaacttgaacaatcacgacaggaaacatgcagttggggatgatgctcagttcgagatggacatctgactctcctgcaaggattagaagaaaagcagcaacactgatacttgtgtgcacctgatttggccaataggatcaacagtgaaaagacagaagaggcaataccagcagtccccattacagtctccacctccccgtcttcctctgggtgccaaatgatgggaagatgagcttcatctgaccatttcttctccctgtctcctgttccccttcccagttaaacaggttagattgaaggcccttgctgtatttctgtagagctaagcagcccttagaggaaaacagttcaactctgactttcctagttgtttttttattgagagccaccctcataccctgtaattttgtcccaaatcaaatatcaacctaccaacaactgcctggctgggaagtctggggaagggatacagagcttggtgggcctaacaccattcatattccttaccctctgtctctcctccctgtatcccacctatggttcagtgttgcaagagtctgggcttggggtctttaaaaccagcagggggaaatgataaaaagagagctgctttcccttttaccttgaggtattcgtccctcgggacagagcacagcttgtgcaactctggtagcgttaccctgtgacactgttttgaggtccacttcctttctttcctctgggaggaatgtcttctgtctttggtattatagttcatcttcccattcttttacttagtgcatttgtgcagatatttttaactctgtacatcagaagagagcccttggtaaccagttttgctcttcttctgccactcctccctgcttgcatctcgttgctggcagagtcctcttgtacttcaagaaagcaaagtgattttgtctgctcctagagcaggtccataccaagtaatagaggcactttagcttccacttggtgggtaaggcctgatcatagtattctgtcagataatgcctaagaatgaccgctgaagaacgttgacccatttgagtacccggtctcagtcgtcatttttaagtccagtgagcattgtggtagttgttcttagattgcagtttcttatgttttgagtttgaagttgattttcagaatgttcttagaaaagaactgcatttttttcctttgtggatctgctttgtttggctgctgggatagataagcatgggcttaaaaaatgtgttcctcccagttttcttgcctttcctgttgtactctgaatttctctccctacctccctcactttcttcctctctccttcctttccttcctttttctctaccaggccatttttcaaatttacatcaaagatacctgaagtgttggtatctgagaatatctgtcactcctcttatctgagaagtgaccttttatttttaagatgactacagacctatttttagatatgttttcagtacaattttgaacagcaactttttaattaaacatcttccagtgttaggaagttgagaaacgttcataggcaagtctgctgttctatgtcaccatcttttgtctcccctagtcccccaggagctctttcctttcccctctagttttgggtgtgcatgtttggagtttgtagtgggtggtttgtaaaactggaccattctgccttgctatgggttgttcaagaaagcctcattcttttctgtgaccctttcgcttttgcattcaccctccttcccacctacctgtcctggggctgttgagcagcataataatcccgggagaatgattcccctcatagaaagacaaaagcatccatcccctcatagttaagtagccactggtgtcctgggaatttctggttggatttggtgccctgaacttttttattaagaaatcagatcccagggtgagagtaacaggccatttggccaagaaagaaacctgtttgtttttcttttgaactatgaaaagaccctgtttgtgaatatattttagaaagagaggaaggatgtctgcagaactttgttctgttttctgccacaaaaatgtgaatagttcagagtgaaaaccttttgtgatggttgatgtctcaggaataagctggatctccaatgttttggggatgctttgagtctcaaaaaaaattgataatcagaaaagtaatttttgtttgtttgtttaatgtatccctgttctgtttttaattaaactccaagtctcattttacatattcttggaaaaacctaagttgctctgtaatttacataagaagcatgctcaggacctctttgtaccccggggagcctgattctttgggaatgaagcttttcattcttcatacactggccttggcatcctgtggaatttgacccaactagcagctagtcagtctgtcagtgagcagaagagtgaactcttcttgatctttattgctatgtgtgaaaacttggcttcctcactgaacggtgaggaatggatttaaagcatgagctttagtagtatcaagatgccattttcctttttcttgctgtcttggggagcttctgcatgtgaccccctaatcagaaggcatgtttttagtatttcttgggagtgtcagctgtataatgcagcagctgttcaatcccttacccttctctgcaaggacttccttacagcttggtgcagttctttcccagaggccaccactactagacagtctttcttttatcttatggagataaattggcatttaaaaaataatttcacaaggcatgagataaactttcaatagatgatacctttgtgtcatgcctcatggaattatttttagaacaagccagagtccattgagtggtttacctctgcatgtttggagggaacctcacagatgaaacccttaatgaataatgtgtccggggttttttagagagaaggagcactcttaagttaccactttgagacagctcttaacatcttagtgaccatttgtagttttctttttatgaggaacccatgcttctatacttgggcggacaatcgagcttaatgagaagtgacttcccttcaaattccaacagcagacatgcattgtcatgattctgtcttctttttagtgtggtttattgagttcagcagttctcatattctgtttaaataggtacagcattttcaagggcacagatacagagaagctggctttctaggtattgggcttccaagccaagagttttgtccttccacctgtattagttatctattgctgtgtaaaaaattaccctaaatttagtatgttaaaatagtaaacattatctgtcagtttctgtgggttaagaatttgggagtagtttaacatgatggttctggcccatggtatcatgaagttacagtcaagattgaacaggggctgcagtcagctggagctggagaaaccacttccaagttctctctttgtggccgttggcaggatgcctcagtttcttcccatgtgggtctctgcgtagggcagcatgagtgtcctcacaccatgacacctggcttctccctgagcagctgattccagagatcatggggcagggccaggagaaagctgcagtgccttttaagacatagtcttggaaaggacacaccgtcacttcttatcctagttgttagaagcaagccactaagttcagcctgcactcaaggagagaggaattacacatacctctaccccaatggagcagtagcaaagaatttatggacatatcttaaaagcaccacaccccaactggggatgaaagtaggtcaacagggaggtaggtttaatctagataagctgaaagatagattgctatcaaaaacagttctccaagatgtgcatagccaaactgggatagaaggcaaactccccaaagctacctgctggttttgagaggggtggtaagacatggcaattcccaggagtagtagaaaataatatgcctgactaccaacagctcaagtatgcttatttgcacatcctagacttggtgtctgtaagactcagttaccacttttattttcctgtagctaggagttagcaaaaggaactggggccttccagccgagccactaaacctgtcttatttggaatggggattgtccagcaaagggagcaaacatgaattagatgttaagctattgagctgaagaaaagaaagcagttcacatttaggtgaaatagatgatgttatcaggaagccaggttcccaccagagtcggtgcttggtacctggtctctccagtctcaacagactcaggtcaggtctctcacccaggaagcaaccactcaataaaatagagaacatctgagaattacaaatgtctatgcttgattgctcctctaaatccagtgcataggttaaccctgcatgcccatttcttcctgggcttcttgatggcaatgtgttcttaaataactggtcttgtgttcatgctaaagacaaacttacatgaagtttttcagtttaagacattctagtgaatggctgctatgtgtttctggcactcattcctaaccaagtctttagagatttcagatgaccttaaagatgcaatatctttttctttctttctttctttctttttttctgagacaagagttgcgccctgtcgcccaggctggggtgctggagtgcagtggtgcgatctcagctcactgcagcctctgcttcccaggttcaagtgtttctcctgcctcagccttccgagtagctgggattacaggcatgtaccactatgcctggctaatttttatttctatatttttagtagagatggggtttcatcatgtttgccaggctggtctcgaactcctggcctcaagtgatccgcccacctcagcctcccaaagtgctgggattacaggcgcgagccaccgcgcctggccaaagatgcaaattcttgtttggatttatgctctgcctcttcccagcattttcttatctgtagccctgcttgcttgagagtatacttggataagaagtattgctgttgagggagctataagaaaaggattcttcttccagaagtaaagaactcatctttagagtacctttaaatgaattttgtttttctttcttattttgaggtggattggtcttctctttttttgggtttccagctcactgggactctcagaccttacctttccagctcaaacaccattagttaaattccttcattctcattagaatgcagcctgctgagtatgtgggtttcactgccggagtccatcatttagccagtatacatagaggaactgcttcgaatcaaggcaactggtgaagggcttagcatgttggcagcaatatcccagagattgaatctgtttgcattttcctcatctaggataacagctgcttgaagccagggctcttagccctttgcattccccttgagcgaggaagccacactgcctttctgtgtctggttcagagctcttccttcttggcatgttttctggactacatgcacatgggcagctatagattaatctgcaaaacctagtcacttacctacccataatatctgggaaggtgtggtatttgttttaaagaaacattgtttctttgggagggcagtttctgtctggactttgaggtggacttagttatccctacagttctttaactctcagcttttaataaaagatgaaatcagatattgatgcagttgggtcacaattctttagaatgcttctaccccagggccgcttcctgttcctagtcatggttttccagtttagtagtggagtttcttgaggctaacttacagaaatttctaactgaaaactttaagagttattgatacttgttttttcagtcagtcacttacatcacctagcctactctctggaatttaaatttatttctctaggctggtcctggaagttgataaccttttggcaaagcttagatttaggagaaggcttgagtccctgttcagcgggtctgtggattctctttgcttatggctctctgcctgcagccctggcagaccatactgtatgtcatggatacccagtggaaatattactgagatgaaacacatttccaagggtatttaaactctcactctgccacctttctaagggtgggaggctggcagagatgctgcaatgcttgataatcatttggccacactgaaatttccaaagggagctcttgccggtgcttaaaaccaaaactcctggacacttagaaaattccatgaatctagcacaaaatatccattcttgcccaagtgtatcccctttctctccagcttaatcttttttttttttttttttttaaagcccaggccaagggtacttttaactggaaactggggaggagggaagaacactagcagggagctaagaggcaggttgctgggtaagccatcctgctcctacctggtgcctgtatctacattgctgagtgctgtgcgccagtgcctttccttcatctgcagatggagcccatctctttccacctgggtgaggagaccctctgctactccaggggtaaaccttaaagaaggtgtcttgaagagcccagaggacactcacgtgctaaggtgtccattttatgcatctttaaaatattttatttaaaaaaaaaaatagccctgccctgtcttagtgccactaacggcccagttccatccattctgaatggaaaagcggagactgccagcactttccttggtcttccctttgtctcccatgatgtgttgttccctcatccctcccatccatttcactgtgtgtggatggatagcagagggtaccacgcagtccttgaggcagtcctgtgtgattccatgatcagttgtttttgtattttaactattcttccaaaccagcagatgtttggaaattaaggaaaaaattaaattctcatcaatggttgctgttatagttaaatcagtaaagatcttgagtatcaa

SEQ ID NO: 29 - DNA, 1903 bp, HOMO SAPIENS
atttaaggggcgagctgggccgagaacgcagcggctgtttgcgccccttctgcctcccgcgcggccagcaccggtacttgcgagccatgagccgccaactgacccatttcccccgcggggagcgcctgggcttcagcggttgctccgcggtcctctctggcgggatcggcagcagctccgcctcattccgggcccgggtcaagggctcggcctcctttggcagcaagagcctctcctgccttgggggcagccgaagcctggcgctcagcgctgctgcacggcggggcggcggccgcctgggcggcttcgtgggcaccgccttcggcagcgccgggctggggcccaagtgtccctccgtgtgcccacccgggggcatccctcaggtcaccgtcaacaagagcctcctggccccgctcaacgtggagatggaccccgagatccagagggtgcgcgcccaggagcgggagcagatcaaggcgctaaacaacaagttcgcctccttcatcgacaaggtgcggttcctggagcagcagaatcaggtgctagagaccaagtggaacctcctacagcagctggacttgaacaactgcaggaagaacctggagcccatttatgagggctacatcagcaacctgcagaagcagctggagatgctgtctggggacggggtgaggctggattcggagctgaggaacatgcaggatttggtggaggactacaagaagaggtatgaggtggagattaacagacgcacagctgctgagaatgagtttgtggtgctcaagaaggacgtggatgctgcttacatgaataaggttgagctccaggccaaggtggactccttgacagatgagattaaattcttcaagtgcctttatgaaggggagatcactcagatccagtcccacatcagcgacacgtccatcgtcctgtcaatggacaacaaccgggatctggacctggacagcatcattgccgaggtccgtgcccagtacgaggagattgccctaaagagcaaggccgaggctgagaccctgtaccagaccaagatccaggagctgcaggtcacagcaggccagcatggggatgacctcaagctcaccaaggctgaaatctctgagctcaaccgcctgatccagaggatccgctcagagatagggaatgtgaagaagcagtgtgccgatctggagacggccatcgccgacgctgaacagcggggggactgcgccctgaaagatgcccgggccaagctggatgagctggagggcgccctgcaccaggccaaggaggagctggcacggatgctgcgtgagtaccaggagctcgtgagcctgaagctggccctggatatggagatcgccacctaccgcaagctgctggagagcgaggagtgcaggatgtctggcgaatatccaaattctgtgagcatctccgtcatcagcagcaccaatgctggggcaggaggggctggcttcagcatgggctttggcgcctcaagcagttatagctacaaaactgcagctgcagacgtcaagaccaaaggcagctgtggcagtgagctcaaggatccccttgccaaaacctcggggagcagctgtgccaccaaaaaggcctccagatgatggacaagtggttggctctgtgtgatgcttcgatgcaaggagtccagtcaggagctctctcagtggcctccttcttggtcccgtttcgttgggtcattgcctgaaatgcaaagacaacacttacccaggatgtttccccaaggccagctacaagcccctctgcccccatgcctttcttgggccttcactaccaagggactctcttcatcttctgattgggattgtgtccagtcctctgcttcttctgcaataaatgattaaatctgaaaaaaaaaaaaaaa

SEQ ID NO: 30 - DNA, 2224 bp, HOMO SAPIENS
cctacccggaccccgccggcctcacaccccggccagccagccgccagtagtgcgcaccgcctcctccccaagccccgccctgcgtccaccccaggggttaactcgcacgcgcgctcttgtggcggaggtagagtgcgccgtccagggctagagcaagcgcggccccgcggcccggagccatgctgaggagctgcgccgcgcgcctccgcacgctgggggctctgtgcctgccgccagtaggccggcgcctgccgggaagcgagccgcgacccgagctgaggtcattttcttctgaggaagtcattcttaaggactgttctgtccccaaccccagctggaacaaggacctaagactgctctttgaccagtttatgaagaaatgtgaagacggctcctggaaacgtttgccttcatataaacgtacacctactgaatggattcaagacttcaaaacccattttcttgacccaaagcttatgaaagaagaacaaatgtcacaggcccagctcttcaccagaagctttgatgatggcctgggctttgaatacgtgatgttctacaatgacattgagaaaaggatggtttgcttatttcaaggaggcccttacctggaaggaccacctggattcattcatggaggtgccattgcaaccatgattgatgctactgttggtatgtgtgcaatgatggctgggggaatcgtcatgactgccaatctcaacatcaattataaaagacctatccctctttgttctgttgttatgataaatagccaacttgataaagttgaaggaaggaaattttttgtttcctgtaatgttcagagtgttgatgagaagaccctatactcagaggcgacaagcttatttataaagctgaatcctgctaaaagtctgacataaagagctgctggtgaactccatctcattctcgcccctccagaagaagcagttgtcccccaaatactctgctccctcactgctgaatccctgtagggagaagcctgccaacagtgaccttccgaaacagccttctgaatacaaagaggattcagtttccatcttctcaactttttaacacagaaatacttcctgcgagcatatcgacaactctcgggccaggcgctgtggctcacacctataatcccagcactttaggaggccgaggcaggcggattgcctgagctcaggagttcaagatcagtctgggcaacacgatgaaactccgtctctactaaaatacaaaaaattatccaggcatggtggcgtacgcctgtagtcccagctactcaggaggctgaggcaggagaattgcttgaacccaggaggaagaggttgcagtgagccaagatcatgccacatcactccaacctgggcaacagaacaagaacccatctcaaacaaacaaacaaacaaaaaaaaaaaactcttgtctccttaggatatgttacctgctccactgcagactagagaaataaatgtgtattgaaccttttactgcaaacttgaaaatgctagaaaaccaagcatgaagaataaatacatggtgggaaacacacaggcatgtgcatatgcatatacattgtaagttagtaagttagaaagctagctttgttgtatctgaacacatgaatcttttttggtcagtgtaggaagcacagccagatcctataggaatgaatacctcaaatctgttgtctgagattctagagattaaaccactgtgccatttttaacccaggctgtactgttgtttcttaccaacagcataggttttcatcactggaaggagcctgtgttcatttcctagggctgctgtagcaaagtagtacaaactggattgtttaaaccaacaaaaactcattgtctctcagttctggaggccagaagttcaaaatcaaggtgttgaccaaggccattctcctgaaagtgctagggaaggagctgtccacgcctccctcctggcttctgggagcctcaggtgttccttggcttctagatgcatcattccagtcctccatcttcacatggcattccctctgtgtgtctccacagtgtcttccctctgtgcagatctatctctgtgtccaagtctcctctttttataaggaaaccagtcataatggacccacctgaatgacctcattttaacttgattacctctgtaaaaaatgtatttccaaataaagtgaccttatgaggtattgaaaaaaaaaaaaaaaaaa

SEQ ID NO: 31 - DNA, 2703 bp, HOMO SAPIENS
gcagcgcggagtcccggcccgggacacaagatggcggcagcggcgctggggagggcgaggcggaggcggcaaaacgggcggtcgagcagaacgtgtagccgcgtcccctccagtccgctccgggcagctgctgatgcaaggaatcccctgggctcccgtccactccactgctgaccagcccattcgcctgtgctgagtcttcctgcaggcctttccttgcctctgtgggaccctgtgggggtccatccggctggagaagaaaagcctctcatgctaacgttgcagaccccagagggtcctgtgtgggtgtggagatggccaatgagaatcacggcagcccccgggaggaagcgtccctgctgagtcactccccaggtacctccaatcagagccagccctgttctccaaagccaatccgcctggttcaggacctcccagaggagctggtgcatgcaggctgggagaagtgctggagccggagggagaatcgtccctactacttcaaccgattcaccaaccagtccctgtgggagatgcccgtgctggggcagcacgatgtgatttcggaccctttggggctgaatgcgaccccactgccccaagactcaagcttggtggaaactcccccggctgagaacaagcccagaaagcggcagctctcggaagagcagccaagcggcaatggtgtgaagaagcccaagattgaaatcccagtgacacccacaggccagtcggtgcccagctcccccagtatcccaggaaccccaacgctgaagatgtggggtacgtcccctgaagataaacagcaggcagctctcctacgacccactgaggtctactgggacctggacatccagaccaatgctgtcatcaagcaccgggggccttcagaggtgctgcccccgcatcccgaagtggaactgctccgctctcagctcatcctgaagcttcggcagcactatcgggagctgtgccagcagcgagagggcattgagcctccacgggagtctttcaaccgctggatgctggagcgcaaggtggtagacaaaggatctgaccccctgttgcccagcaactgtgaaccagtcgtgtcaccttccatgtttcgtgaaatcatgaacgacattcctatcaggttatcccgaatcaagttccgggaggaagccaagcgcctgctctttaaatatgcggaggccgccaggcggctcatcgagtccaggagtgcatcccctgacagtaggaaggtggtcaaatggaatgtggaagacacctttagctggcttcggaaggaccactcagcctccaaggaggactacatggatcgcctggagcatctgcggaggcagtgtggcccccacgtctcggccgcagccaaggactccgtggaaggcatctgcagtaagatctaccacatctccctggagtacgtcaaacggatccgagagaagcaccttgccatcctcaaggaaaacaacatctcagaggaggtggaggcccctgaggtggagccccgcctagtgtactgctacccagtccggctggctgtgtctgcaccgcccatgcccagcgtggagatgcacatggagaacaacgtggtctgcatccggtataagggagagatggtcaaggtcagccgcaactacttcagcaagctgtggctcctttaccgctacagctgcattgatgactctgcctttgagaggttcctgccccgggtctggtgtcttctccgacggtaccagatgatgttcggcgtgggcctctacgaggggactggcctgcagggatcgctgcctgtgcatgtctttgaggccctccaccgactctttggcgtcagcttcgagtgcttcgcctcacccctcaactgctacttccgccagtactgttctgccttccccgacacagacggctactttggctcccgcgggccctgcctagactttgctccactgagtggttcatttgaggccaaccctcccttctgcgaggagctcatggatgccatggtctctcactttgagagactgcttgagagctcaccggagcccctgtccttcatcgtgttcatccctgagtggcgggaacccccaacaccagcgctcacccgcatggagcagagccgcttcaaacgccaccagttgatcctgcctgcctttgagcatgagtaccgcagtggctcccagcacatctgcaagaaggaggaaatgcactacaaggccgtccacaacacggctgtgctcttcctacagaacgaccctggctttgccaagtgggcgccgacgcctgaacggctgcaggagctgagtgctgcctaccggcagtcaggccgcagccacagctctggttcttcctcatcgtcctcctcggaggccaaggaccgggactcgggccgtgagcagggtcctagccgcgagcctcaccccacttaacatatcctgcggggaggaggagccccaggggtgctagtctggactgctgggactcgggcccctggggcctcagagggaccccggctgccactgacatatgaagattatggttctgccagggctcccctccctgcctgtccccaagtcctcacctcaaactccctccaagtcccatgtatataggtcctgatgccttcccaaccccgcccctcaccctgttgccaccttgtttcatttgtaaaaggaaatacagaaacccccccaagaaaaaaaa

SEQ ID NO: 32 - DNA, 9249 bp, HOMO SAPIENS
tttttatatttttagtagagacagggtttcaccatgttggtcaggctggtctcaaactcctgacttcgtgatctgcccaccttggcctcccaaagtgctgggattacaggcgtgagccaccgcacccggtcagctattttctacatgcttcatttgcagtgtaatattggattgtatgagactttgggttttgtgttaatacctacagaaaatgttgatattttctcttagcaggctgtcaaccaggttaggttcaggtcataagtttctacccacattctttgaactgtagttgtcattttagtttatttttcaaaaacttttgcagtacctttttggtctgtcttgtgtgtgccttgcagtgaacagtctggatttggacagtggtctgtctgttagttcagtttctcaagcctttgtcacactaataggattggatttatgtatgtccagcttgggaattattacaggaattaaaaacaactttttagagtgctttcctgagctctctttctatttgttcccccttctactttttgcttccctgtggctgctgtttctatcctccagccagagagctagtgtttattttctccattgtgttacacacttgtgcagctgcaaccaccatatccagggcccaatggtaggaggtagagaagaaaagcaaaagggattggcctcatcctcttacaacgatagttccattgaatagagagaaaggttttcctgcctcagagtgttggctgcactaggcttttgttactgtagtctggccctgttaccatgggattgcttgcatgtggggatacaggagaattcagaaaagaaaaaaagatttgctatttctacattctccctgagcattaagacttcccttgcccattcctcaattcaaagctaaggcttcttctggagctgcctctgtgggcggttcgggagataccaaaggagaaaaagtaccactgttgatatggtggtatttcaaattctggtctaccctatttcacatgccttgtttacttttcagagctgacagattgctgctccatgcattctgtccagtttcctaagagagacagcttggagtatgcttaatccatcttacctgggactgaaacagctgcttattttgccgttaaaaattacatgcagtttactgcgtggctccgggtttgtttgtttgtttttcctctttaataggtttattcagaaaacatgtccactgcaattagggaggtaggagtttggagacagaccagaacacttctactgaagaattacttaattaaatgcagaaccaaaaagagtagtgttcaggaaattctttttccactattttttttattttggttaatattaattagcatgatgcatccaaataagaaatatgaagaagtgcctaatatagaactcaatcctatggacaagtttactctttctaatctaattcttggatatactccagtgactaatattacaagcagcatcatgcagaaagtgtctactgatcatctacctgatgtcataattactgaagaatatacaaatgaaaaagaaatgttaacatccagtctctctaagccgagcaactttgtaggtgtggttttcaaagactccatgtcctatgaacttcgtttttttcctgatatgattccagtatcttctatttatatggattcaagagctggctgttcaaaatcatgtgaggctgctcagtactggtcctcaggtttcacagttttacaagcatccatagatgctgccattatacagttgaagaccaatgtttctctttggaaggagctggagtcaactaaagctgttattatgggagaaactgctgttgtagaaatagatacctttccccgaggagtaattttaatatacctagttatagcattttcaccttttggatactttttggcaattcatatcgtagcagaaaaagaaaaaaaaataaaagaatttttaaagataatgggacttcatgatactgccttttggctttcctgggttcttctatatacaagtttaatttttcttatgtcccttcttatggcagtcattgcgacagcttctttgttatttcctcaaagtagcagcattgtgatatttctgctttttttcctttatggattatcatctgtattttttgctttaatgctgacacctctttttaaaaaatcaaaacatgtgggaatagttgaattttttgttactgtggcttttggatttattggccttatgataatcctcatagaaagttttcccaaatcgttagtgtggcttttcagtcctttctgtcactgtacttttgtgattggtattgcacaggtcatgcatttagaagattttaatgaaggtgcttcattttcaaatttgactgcaggcccatatcctctaattattacaattatcatgctcacacttaatagtatattctatgtcctcttggctgtctatcttgatcaagtcattccaggggaatttggcttacggagatcatctttatattttctgaagccttcatattggtcaaagagcaaaagaaattatgaggagttatcagagggcaatgttaatggaaatattagttttagtgaaattattgagccagtttcttcagaatttgtaggaaaagaagccataagaattagtggtattcagaagacatacagaaagaagggtgaaaatgtggaggctttgagaaatttgtcatttgacatatatgagggtcagattactgccttacttggccacagtggaacaggaaagagtacattgatgaatattctttgtggactctgcccaccttctgatgggtttgcatctatatatggacacagagtctcagaaatagatgaaatgtttgaagcaagaaaaatgattggcatttgtccacagttagatatacactttgatgttttgacagtagaagaaaatttatcaattttggcttcaatcaaagggataccagccaacaatataatacaagaagtgcagaaggttttactagatttagacatgcagactatcaaagataaccaagctaaaaaattaagtggtggtcaaaaaagaaagctgtcattaggaattgctgttcttgggaacccaaagatactgctgctagatgaaccaacagctggaatggacccctgttctcgacatattgtatggaatcttttaaaatacagaaaagccaatcgggtgacagtgttcagtactcatttcatggatgaagctgacattcttgcagataggaaagctgtgatatcacaaggaatgctgaaatgtgttggttcttcaatgttcctcaaaagtaaatgggggatcggctaccgcctgagcatgtacatagacaaatattgtgccacagaatctctttcttcactggttaaacaacatatacctggagctactttattacaacagaatgaccaacaacttgtgtatagcttgcctttcaaggacatggacaaattttcaggtttgttttctgccctagacagtcattcaaatttgggtgtcatttcttatggtgtttccatgacgactttggaagacgtatttttaaagctagaagttgaagcagaaattgaccaagcagattatagtgtatttactcagcagccactggaggaagaaatggattcaaaatcttttgatgaaatggaacagagcttacttattctttctgaaaccaaggctgctctagtgagcaccatgagcctttggaaacaacagatgtatacaatagcaaagtttcatttctttaccttgaaacgtgaaagtaaatcagtgagatcagtgttgcttctgcttttaatttttttcacagttcagatttttatgtttttggttcatcactcttttaaaaatgctgtggttcccatcaaacttgttccagacttatattttctaaaacctggagacaaaccacataaatacaaaacaagtctgcttcttcaaaattctgctgactcagatatcagtgatcttattagctttttcacaagccagaacataatggtgacgatgattaatgacagtgactatgtatccgtggctccccatagtgcggctttaaatgtgatgcattcagaaaaggactatgtttttgcagctgttttcaacagtactatggtttattctttacctatattagtgaatatcattagtaactactatctttatcatttaaatgtgactgaaaccatccagatctggagtaccccattctttcaagaaattactgatatagtttttaaaattgagctgtattttcaagcagctttgcttggaatcattgttactgcaatgccaccttactttgccatggaaaatgcagagaatcataagatcaaagcttatactcaacttaaactttcaggtcttttgccatctgcatattggattggacaagctgttgttgatatccccttattttttatcattcttattttgatgctaggaagcttattggcatttcattatggattatatttttatactgtaaagttccttgctgtggttttttgccttattggttatgttccatcagttattctgttcacttatattgcttctttcacctttaagaaaattttaaataccaaagaattttggtcatttatctattctgtggcagcgttggcttgtattgcaatcactgaaataactttctttatgggatacacaattgcaactattcttcattatgccttttgtatcatcattccaatctatccacttctaggttgcctgatttctttcataaagatttcttggaagaatgtacgaaaaaatgtggacacctataatccatgggataggctttcagtagctgttatatcgccttacctgcagtgtgtactgtggattttcctcttacaatactatgagaaaaaatatggaggcagatcaataagaaaagatccctttttcagaaacctttcaacgaagtctaaaaataggaagcttccagaaccaccagacaatgaggatgaagatgaagatgtcaaagctgaaagactaaaggtcaaagagctgatgggttgccagtgttgtgaggagaaaccatccattatggtcagcaatttgcataaagaatatgatgacaagaaagattttcttctttcaagaaaagtaaagaaagtggcaactaaatacatctctttctgtgtgaaaaaaggagagatcttaggactattgggtccaaatggtgctggcaaaagcacaattattaatattctggttggtgatattgaaccaacttcaggccaggtatttttaggagattattcttcagagacaagtgaagatgatgattcactgaagtgtatgggttactgtcctcagataaaccctttgtggccagatactacattgcaggaacattttgaaatttatggagctgtcaaaggaatgagtgcaagtgacatgaaagaagtcataagtcgaataacacatgcacttgatttaaaagaacatcttcagaagactgtaaagaaactacctgcaggaatcaaacgaaagttgtgttttgctctaagtatgctagggaatcctcagattactttgctagatgaaccatctacaggtatggatcccaaagccaaacagcacatgtggcgagcaattcgaactgcatttaaaaacagaaagcgggctgctattctgaccactcactatatggaggaggcagaggctgtctgtgatcgagtagctatcatggtgtctgggcagttaagatgtatcggaacagtacaacatctaaagagtaaatttggaaaaggctactttttggaaattaaattgaaggactggatagaaaacctagaagtagaccgccttcaaagagaaattcagtatattttcccaaatgcaagccgtcaggaaagtttttcttctattttggcttataaaattcctaaggaagatgttcagtccctttcacaatctttttttaagctggaagaagctaaacatgcttttgccattgaagaatatagcttttctcaagcaacattggaacaggtttttgtagaactcactaaagaacaagaggaggaagataatagttgtggaactttaaacagcacactttggtgggaacgaacacaagaagatagagtagtattttgaatttgtattgttcggtctgcttactgggacttctttctttttcacttaattttaactttggtttaaaaagttttttattggaatggtaactggagaaccaagaacgcacttgaaatttttctaagctccttaattgaaatgctgtggttgtgtgttttgcttttctttaaataaaacgtatgtataattaagtgaagctgcatgtttgtattgaagtatattgaactatatagtttgtatgtcatctttttcaccattcagaaacagtgcttctgaatttgtgatttaaaggaattgtaatagaatagttttatttttaagttatctttaagtttatgccatcttcttaaataagtacgtaatgttccaatctaaataaaaaactaattcataactaatgcatagaaaagatacataaagcaatgtgaaagtttcttgcttctcctttttaatttctaaaaaagccactttgaatggaagttgtcatccgtaaaagctgaagtgtaagcactaggaaatctcaatatagagatttgaggaaagttatatccactaggtggcagtcattgatcataataagtgaaatgagcccttgttctagtacatgattttaggcttaggtaattaggtatgtgaaattacatttctttaatttaaagtaaaattcagaaggttttagttattataattaaaggaagactgtgtgtagaatcttacgtaatagtctgattctttgactctgtggctagaatgacagttatctatggaggtggtagaattaagccataccttttccttcatcactcttggaacatataaattttttgtcatcttccttgcaaagggcacatttaattttgttcttgaataaaatattttattgggtatttgtttttattggtaaactttagtgaatctcttctataaaattgtaagtagatcagtgtgtagatttatttagtaacttacctcattgactttggaacatggtaggatatgaataaactctttcaagggttaaattaagaattgtaagtgcagtgcgcctatttctttttaataagaaccagaatttcatttttgatagagttaaaggcatggctaatattttcttagaaatacttccttgtacaacccatgtattggctcaaggtataaaatagtgtaaataatgctagttgacattacatttcaaccaaatgaaagtattaacttcataaaacaaatatattgagagtgtgattattgtattagacaacaacaacagcaatgacagaaggatttggtactgaattactttaaataagcaaaacctttcagtggcattattcattctttaatgtaggcaaaatttaatgaacttttagctttattgtgtaataagacatctgtgattttaggctctagcagtggatttaaaagtgttctttctcggtacaaagtacgtggctgatattttcccccattgctgggggcagttgctatacactttcctaaagtatatataatgttcacataaatacccagggacctcttttttgggatgtgcttttgtaattatgtgtaaccttgaatacttaagtttagtaaaagcaacaaaattatatctatagtttactaaggcagtcacgaaaaagcatagttttttttagaacctgaccatcctaagaaagttatgtcatctgaagatagagcatgactaatgaagaaaattacctgcttttgcacgtagatttggtaactttcactttacatttgtgaatgtgtaattggtgcaaagtaaattttttttcctgcaaagtgaaagttgagtagtcacaatcatgttatttattttgttcatttagttactttgcttttaatgtatatgaatacatgctcttgtaaacaattttaaaagacattcaaatttttttttagtttttatatactcagaatatattttggttgttaaattaaattatgttccctttttcacagtaacaaaatctgactcaggagaaatataacttaattcttaggaaaacaagggtaagtgagctggaaagcaaaggaggcaaaaagtgaaatatatttatttacagtgtacagttcatgtttatgaacatactaattttaaaatgtcttaaattactgatctcaaaacttttttctatgtcagtacagataaataaataaatatacatattaggcaaaagcaacatcaccaaccttatatttcccattcatggtcaaattttcaaaggaaagtaaaagctgagctttactgagtgagtgtttactgactaataaggcaagaaaaaacatgatgagtgtactttacatcttacttttgtgggctcttaatttttttctctagtttgttttcagtaaagacagtgggttttctttaaaataatttttttcttttaaatttgcacaaattatcttaggtcagtattttggttttaatcattaaaacatttttagagtaatgtaatttaacaaatattttaagtgattatgtttccagaaatggattctttggagagaactcggatgactatcagttttggccctgtaagatcgtggagatctgtaagatagatacttatataacttacataaaatatatataatatattacttatataacttatataactagctattattttatataactaactataatatgacaaatcctttgctagtagtactaacaacgttttataggagcacaattaattttacttaggataagtgttgttattattgtttttattgttgttctgttagttactcaaaacttcattctaattgtgccctgagtttgttaaaataccatactgtatttttgtgtaacatgtaaataggcattaatttttgagaaatagaaatgtttatccttaatgtatttttaatttgctaacattgattttttattttctttcctgaaatagcttatttcctaaaatgaaagaatttattctcagatgaataatttttatatcagctattcttatcaggtaaaagtttaattattttttatttataatatatgtaagcaattctcaatgctgctctttaagaaaaataaatatgattatattaataataagc

SEQ ID NO: 33 - DNA, 1851 bp, HOMO SAPIENS
ggccggtcagcgtcgctgccggtctccggcggagacggactctggagtttgggcggcccgggcggccactaggtactctgatattccgtactaaacacgtctgcaagtcaagatgtcgcacccgtccccccaagccaagccctccaaccccagtaaccctcgagtcttctttgacgtggacatcggaggggagcgagttggtcgaattgtcttagaattgtttgcagatatcgtacccaaaactgcggaaaattttcgtgcactgtgtacaggagaaaaaggcattggacacacgactgggaaacctctccatttcaaaggatgcccttttcatcgaattattaagaaatttatgattcagggtggagacttctcaaatcagaatgggacaggtggagaaagtatttatggtgaaaaatttgaagatgaaaatttccattacaagcatgatcgggagggtttactgagcatggcaaatgcaggccgcaacacaaacggttctcagttttttatcacaacagttccaactcctcatttggatgggaaacatgtggtgtttggccaagtaattaaaggaataggagtggcaaggatattggaaaatgtggaagtgaaaggtgaaaaacctgctaaattgtgcgttattgcagaatgtggagaattgaaggaaggagatgacgggggaatattcccaaaagatggctctggcgacagtcatccagatttccctgaggatgcggatatagatttaaaagatgtagataaaattttattaataacagaagacttaaaaaacattggaaatacttttttcaaatcccagaactgggagatggctattaaaaaatatgcagaagttttaagatacgtggacagttcaaaggctgttattgagacagcagatagagccaagctgcaacctatagctttaagctgtgtactgaatattggtgcttgtaaactgaagatgtcaaattggcagggagcaattgacagttgtttagaggctcttgaactagacccatcaaataccaaagcattgtaccgcagagctcaaggatggcaaggattaaaagaatatgatcaagcattggctgatcttaagaaagctcaggggatagcaccagaagataaagctatccaggcagaattgctgaaagtcaaacaaaagataaaggcacagaaagataaagagaaggcagtatatgcaaaaatgtttgcttagaaaggattcagttttgcttattgtgtgttgattgtataaatgcaataagaaaatgtaaaggtttttgtctatgaatatgatccctaatgtgtttcttttgacaccttagttccttactgtttacagtttaggagtactgataggggttcatgcttaataaacatgtcacaatacagtaagtaaagtggttttgtttgtttctttgagatggagtcttgctctgtcacccaggctggagtgcggtggcgcaatctcggctcactgcatcctctgcctcccgggttcaagcaattctcctgcctcagcttcccaagtagctgggattacaggcacgtgccaccacgcccagctaatttttgtatttttagtagagatggggtttcaccatattggtcacgtcacgttggtcttgaactcctgaccttgtgatccaccccgccttggcctcccaaagtgctgggattacaggtgtgagccaccgtgcccggccaagtaaaatgttttttaaaatggttatgtgcattattcataaaaaataatggtgtccagtctttttaaacttgtaaagacacatcttattgaataaagagatgagagcttaagtttgtaaaaaaaaaaaaaaaaaa

SEQ ID NO: 34 - DNA, 1671 bp, HOMO SAPIENS
cgactgccgagctccgccctccaggcggccccacccgcctgccgtcctggggcgccgccgccccgccgccggcagtggaccgctgtgcgcgaaccctgaaccctacggtcccgacccgcgggcgaggccgggtacctgggctgggatccggagcaagcgggcgagggcagcgccctaagcaggcatccccgcaggcccggagcgatggcagccttgatgaccccgggaaccggggccccacccgcgcctggtgacttctccggggaagggagccagggacttcccgacccttcgccagagcccaagcagctcccggagctgatccgcatgaagcgagacggaggccgcctgagcgaagcggacatcaggggcttcgtggccgctgtggtgaatgggagcgcgcagggcgcacagatcggggccatgctgatggccatccgacttcggggcatggatctggaggagacctcggtgctgacccaggccctggctcagtcgggacagcagctggagtggccagaggcctggcgccagcagcttgtggacaagcattccacagggggtgtgggtgacaaggtcagcctggtcctcgcacctgccctggcggcatgtggctgcaaggtgccaatgatcagcggacgtggtctggggcacacaggaggcaccttggataagctggagtctattcctggattcaatgtcatccagagcccagagcagatgcaagtgctgctggaccaggcgggctgctgtatcgtgggtcagagtgagcagctggttcctgcggacggaatcctatatgcagccagagatgtgacagccaccgtggacagcctgccactcatcacagcctccattctcagtaagaaactcgtggaggggctgtccgctctggtggtggacgttaagttcggaggggccgccgtcttccccaaccaggagcaggcccgggagctggcaaagacgctggttggcgtgggagccagcctagggcttcgggtcgcggcagcgctgaccgccatggacaagcccctgggtcgctgcgtgggccacgccctggaggtggaggaggcgctgctctgcatggacggcgcaggcccgccagacttaagggacctggtcaccacgctcgggggcgccctgctctggctcagcggacacgcggggactcaggcccagggcgctgcccgggtggccgcggcgctggacgacggctcggcccttggccgcttcgagcggatgctggcggcgcagggcgtggatcccggtctggcccgagccctgtgctcgggaagtcccgcagaacgccggcagctgctgcctcgcgcccgggagcaggaggagctgctggcgcccgcagatggcaccgtggagctggtccgggcgctgccgctggcgctggtgctgcacgagctcggggccgggcgcagccgcgctggggagccgctccgcctgggggtgggcgcagagctgctggtcgacgtgggtcagaggctgcgccgtgggaccccctggctccgcgtgcaccgggacggccccgcgctcagcggcccgcagagccgcgccctgcaggaggcgctcgtactctccgaccgcgcgccattcgccgccccctcgcccttcgcagagctcgttctgccgccgcagcaataaagctcctttgccgcgaaa

SEQ ID NO: 35 - DNA, 2021 bp, HOMO SAPIENS
gacagcgcgcagcgcagcccagccgagcgtcgcggggccgccccccgccctgccggccgcctcgccgagcctcctggggcgcccgggcccgcgacccccgcacccagctccgcaggaccggcgggcgcgcgcgggctctggaggccacgggcatgatgcttcgggtcctggtgggggctgtcctccctgccatgctactggctgccccaccacccatcaacaagctggcactgttcccagataagagtgcctggtgcgaagccaagaacatcacccagatcgtgggccacagcggctgtgaggccaagtccatccagaacagggcgtgcctaggacagtgcttcagctacagcgtccccaacaccttcccacagtccacagagtccctggttcactgtgactcctgcatgccagcccagtccatgtgggagattgtgacgctggagtgcccgggccacgaggaggtgcccagggtggacaagctggtggagaagatcctgcactgtagctgccaggcctgcggcaaggagcctagtcacgaggggctgagcgtctatgtgcagggcgaggacgggccgggatcccagcccggcacccaccctcacccccatccccacccccatcctggcgggcagacccctgagcccgaggacccccctggggccccccacacagaggaagagggggctgaggactgaggcccccccaactcttcctcccctctcatccccctgtggaatgttgggtctcactctctggggaagtcaggggagaagctgaagcccccctttggcactggatggacttggcttcagactcggacttgaatgctgcccggttgccatggagatctgaaggggcggggttagagccaagctgcacaatttaatatattcaagagtggggggaggaagcagaggtcttcagggctctttttttggggggggtggtctcttcctgtctggcttctagagatgtgcctgtgggagggggaggaagttggctgagccattgagtgctgggggaggccatccaagatggcatgaatcgggctaaggtccctgggggtgcagatggtactgctgaggtcccgggcttagtgtgagcatcttgccagcctcaggcttgagggagggctgggctagaaagaccactggcagaaacaggaggctccggcccacaggtttccccaaggcctctcaccccacttcccatctccagggaagcgtcgccccagtggcactgaagtggccctccctcagcggaggggtttgggagtcaggcctgggcaggaccctgctgactcgtggcgcgggagctgggagccaggctctccgggcctttctctggcttccttggcttgcctggtgggggaaggggaggaggggaagaaggaaagggaagagtcttccaaggccagaaggagggggacaaccccccaagaccatccctgaagacgagcatccccctcctctccctgttagaaatgttagtgccccgcactgtgccccaagttctaggccccccagaaagctgccagagccggccgccttctcccctctcccagggatgctctttgtaaatatcggatgggtgtgggagtgaggggttacctccctcgccccaaggttccagaggccctaggcgggatgggctcgctgaacctcgaggaactccaggacgaggaggacatgggacttgcgtggacagtcagggttcacttgggctctctctagctccccaattctgcctgcctcctccctcccagctgcactttaaccctagaaggtggggacctggggggagggacagggcaggcgggcccatgaagaaagcccctcgttgcccagcactgtctgcgtctgctcttctgtgcccagggtggctgccagcccactgcctcctgcctggggtggcctggccctcctggctgttgcgacgcgggcttctggagcttgtcaccattggacagtctccctgatggaccctcagtcttctcatgaataaattccttcaacgcc

SEQ ID NO: 36 - DNA, 3212 bp, HOMO SAPIENS
taaagcacagcccagggaaacctcctcacagttttcatccagccacgggccagcatgtctgggggcaaatacgtagactcggaggtaggcatccgtgggggggcgccggctcgggcgtgcggggagtgtccgcttctgctatctgcctctccaaatatcccgactgctgccctggccccagccctctctccacttcggagcactcctctggcgttggcaccgctgaggaatgggcctgggcggggaggtgaagagaagccaggaatgttttatgttttcctaatggagagggggcctagggagcccctgagctaggaggacacggaaaaggggattggggtcctgagattgggtctgttgggcccaggacgcgttttctggatgggtctaggatgctcccttgtcgcgggacccccgcggtccggccctgcctgctgggggttcgaagaggtggagtgcagggtggaggtgttatttacccgagtcctggggacagtccccgggactctccgccaggcgcccagaccggcaggtcccgcaggcggcgcgcggtgtgtttgcactttccaaagttcttgaaccatctcaagaactccttctgcatcttggcgtctggcaggggtgttccgagagaggtagacctcccctccccaaactgccaccatcacttccaacgccctccacgcgctggagctctgcccgggtgtggaaacctcgtcttccaacacgtagctgcccttcagccacccgcccgcagcctgggagtgccctgagggtgggtcgggggagctgcgcagggacatctctacaccgttcccatccgggaacagggcaacatctacaagcccaacaacaaggccatggcagacgagctgagcgagaagcaagtgtacgacgcgcacaccaaggagatcgacctggtcaaccgcgaccctaaacacctcaacgatgacgtggtcaagattgactttgaagatgtgattgcagaaccagaagggacacacagttttgacggcatttggaaggccagcttcaccaccttcactgtgacgaaatactggttttaccgcttgctgtctgccctctttggcatcccgatggcactcatctggggcatttacttcgccattctctctttcctgcacatctgggcagttgtaccatgcattaagagcttcctgattgagattcagtgcatcagccgtgtctattccatctacgtccacaccgtctgtgacccactctttgaagctgttgggaaaatattcagcaatgtccgcatcaacttgcagaaagaaatataaatgacatttcaaggatagaagtatacctgattttttttccttttaattttcctggtgccaatttcaagttccaagttgctaatacagcaacaatttatgaattgaattatcttggttgaaaataaaaagatcactttctcagttttcataagtattatgtctcttctgagctatttcatctatttttggcagtctgaatttttaaaacccatttaaatttttttccttacctttttatttgcatgtggatcaaccatcgctttattggctgagatatgaacatattgttgaaaggtaatttgagagaaatatgaagaactgaggaggaaaaaaaaaaaaaagaaaagaaccaacaacctcaactgcctactccaaaatgttggtcattttatgttaagggaagaattccagggtatggccatggagtgtacaagtatgtgggcagattttcagcaaactcttttcccactgtttaaggagttagtggattactgccattcacttcataatccagtaggatccagtgatccttacaagttagaaaacataatcttctgccttctcatgatccaactaatgccttactcttcttgaaattttaacctatgatattttctgtgcctgaatatttgttatgtagataacaagacctcagtgccttcctgtttttcacattttccttttcaaatagggtctaactcagcaactcgctttaggtcagcagcctccctgaagaccaaaattagaatatccatgacctagttttccatgcgtgtttctgactctgagctacagagtctggtgaagctcacttctgggcttcatctggcaacatctttatccgtagtgggtatggttgacactagcccaatgaaatgaattaaagtggaccaatagggctgagctctctgtgggctggcagtcctggaagccagctttccctgcctctcatcaactgaatgaggtcagcatgtctattcagcttcgtttattttcaagaataatcacgctttcctgaatccaaactaatccatcaccggggtggtttagtggctcaacattgtgttcccatttcagctgatcagtgggcctccaaggaggggctgtaaaatggaggccattgtgtgagcctatcagagttgctgcaaacctgacccctgctcagtaaagcacttgcaaccgtctgttatgctgtgacacatggcccctccccctgccaggagctttggacctaatccaagcatccctttgcccagaaagaagatgggggaggaggcagtaataaaaagattgaagtattttgctggaataagttcaaattcttctgaactcaaactgaggaatttcacctgtaaacctgagtcgtacagaaagctgcctggtatatccaaaagctttttattcctcctgctcatattgtgattctgcctttggggacttttcttaaaccttcagttatgatttttttttcatacacttattggaactctgcttgatttttgcctcttccagtcttcctgacactttaattaccaacctgttacctactttgactttttgcatttaaaacagacactggcatggatatagttttacttttaaactgtgtacataactgaaaatgtgctatactgcatactttttaaatgtaaagatatttttatctttatatgaagaaaatcacttaggaaatggctttgtgattcaatctgtaaactgtgtattccaagacatgtctgttctacatagatgcttagtccctcatgcaaatcaattactggtccaaaagattgctgaaattttatatgcttactgatatattttacaattttttatcatgcatgtcctgtaaaggttacaagcctgcacaataaaaatgtttaacggttaaacagtcaaaaaaaaaaa

SEQ ID NO: 37 - DNA, 554 bp, HOMO SAPIENS
ctgcctttagtcagttttcatgtattaagtcattctgcattaaataaatatacacttatgattgatatgtcctcctgatgaacttttgttactatgaagaatccacattacctgatacaaaatttttctgttgcaatctattttacctgatattaatatagtcacttcaatcttttactgttttcttaaaatatgcttttcaatctatttattttcaacttacctgtgtctagtatttctctgtaaactgtacatttatttttttgggataagtctggctctgtcacccaggctggagtgcaggtcatatgagcaagaatgctatgacaaaatgcaaataaataccaaggacatctgttaaattagaaaaataaacgtgtatatgtacaaatatgtttaccgagaaatagattatagatactgatattatagctgactgaataccatttttcttgtcatgagaaactaaatatacacacacatacagatcaatccctcagacgaaggaatcttattttcaagataaatcgttgatcatgaatgcttcctgctaa

SEQ ID NO: 38 - DNA, 2761 bp, HOMO SAPIENS
cgcagccttgccagcattacccatcctcatcagaaactggcagcggcagccacagctcgggcaggcggctccagccccaggctggatttgcagaatctgtcctttgcctccaagcccagctttcagctgggagagggggaagaaggggcagtggcagcagttcttctggctctttctccctttctctctttctctttctgtgttcaagtcacattacatgggattctgttcttttgggacttcgtcatcttttccaatatgtcctgggacctccggagctgtaacggggatgctaaggacacggtcagtggattatcgtgactgtactaatgaaaggattcaagctctcctgcactgccagtaactccaaccgcagcacgccggcctgctcgcccatcctccggaagcggtctcgctcgccaaccccgcagaaccaggacggagacaccatggtggagaagggctcagatcactcctcggacaagtccccgtccacaccggagcagggcgtgcagcgcagctgctcctcccagtccggccggagcggcggcaagaattccaagaaaagccagagttggtataatgtgttaagccccacctacaagcagagaaatgaagacttcagaaagctctttaagcagcttccagacacggagcgcctcattgttgattactcatgtgcactccaaagagacattctccttcagggccgactctacctctctgaaaattggatctgcttctacagcaacatcttccgctgggaaactctgctgacagtccgtttgaaagacatctgttccatgactaaagaaaaaacagctcgcctcattcccaatgccatccaagtttgcactgattcagaaaagcacttcttcacttcgtttggggcccgggataggacatatatgatgatgttccggctctggcagaatgctctccttgaaaagcctctgtgtcccaaggagctctggcactttgttcaccagtgctatgggaacgaattgggcctgaccagtgatgacgaggactacgtgccccctgacgacgacttcaacacaatgggatactgtgaagagatccctgtggaagagaatgaagtgaatgacagctcatccaagagcagcatagagaccaagccagatgccagtccacagctgcccaagaaatccatcaccaacagcacactaacatccacagggagcagtgaggcccccgtctcgtttgatgggctgcccctggaggaagaggcgctggagggagacgggtccctggaaaaggagctcgccattgacaacatcatgggggagaagattgagatgatcgctcctgtgaactccccttcactggacttcaatgacaatgaggacatccccactgagctcagtgactcttccgacacacacgatgaaggagaggtccaggccttctatgaggacctgagtggccggcagtacgtgaatgaagtcttcaacttcagcgtggacaagctctatgacctcctcttcaccaactcgcccttccagcgggatttcatggagcagcggcgcttctctgatatcatcttccatccatggaaaaaggaggagaatggaaaccagagccgagtgattctttacaccatcacccttaccaaccctctggctcccaaaactgccactgtcagggagacacagaccatgtacaaggcgagccaggagagtgaatgttacgtgatagatgccgaagtcctcacccacgacgtgccctaccatgactacttctacacaatcaatcgctacacgctcacccgtgtggctcggaacaagagccgactcagggtctccacagagctgcgctatcgaaaacagccctgggggttagtgaaaacgttcatcgagaagaacttctggagtgggctggaggactacttccgccatttagagagcgagctggccaaaacggagagcacttatttggctgagatgcacagacaatctcccaaagagaaggccagcaagactacaacggtgcggaggaggaagcgtccccatgcccacctgcgagtccctcacctggaagaggtgatgagcccggtcaccacgcccacagatgaggatgtgggccacaggatcaaacatgtggcaggttccacacagacgcggcatatcccggaggacacccccaacggtttccacctgcagagcgtgtccaagctgctgctggttatcagctgtgtgatctgtttcagtctggtgctgctggtcatccttaacatgatgctcttctacaaactctggatgttggaatacaccacgcagaccctcactgcctggcagggtctaaggctccaagaaaggttaccccagtctcagacagaatgggcccagctcttagagtcccaacaaaagtaccacgatactgagctccaaaaatggagggaaatcatcaaatcctcagtgatgctccttgaccagatgaaggactcgctcatcaaccttcagaacggcatcaggtcccgcgactacacgtcggaaagtgaagaaaagaggaatcgctatcattgacaaggcaggaacagggtggctgcaagaggcctgtgcaatacatgtacatagaccatataaatatatatatataaatatatatatatacagaatataaatatatatattatatacagattttaaaaaagagataatgcctatgtaccagggagaaggagcgggccctcccgcgccctgtgctggccggagcagcgttttcttatggtggagcagct

SEQ ID NO: 39 - DNA, 395 bp, HOMO SAPIENS
taatacgtgcaaggcccctgacttagtggcaatgatgtttaagccgagatctgaaggataactaacaacggcgtgccagagaaaagagtagcgggtggagagaggaggccaggggaatatttctgggcttggtaagtaagccaggtccctgccagacatggactgagaagagcaaagccaggagtgacagctgatgattattttttaactgaggaaggaagatccttgagaacggaacctcttgggaccttctacccagaacaccagagcacctcactgggatcagagccaggccatcgggtggattaagcaactaaaattgattgtcctgaaccatgagtctgtctgtttatggggagagaaactttgagatgaattaatccacaggtccaatg

SEQ ID NO: 40 - DNA, 556 bp, HOMO SAPIENS
tgctggagcgagtgatgggttcccagccctcactggggaatcgaggggactccacctcagcccagccagatggaatcgtcgggaacagagtgcaccttaatttctgcgaagaccaatgcaaattagaagaagactgagatgcaggctgtttgatccaagagatgctttttaattattgtaaaacagctgtgacttactgagcaccaactgtgtacccggcctcacactgttctcatacacaacagctccacggggaaggcattctcaccgagattcagagaggggcagacctggcctcgggtcgcacagctgggaaccggacaccgggctctctccagtcagctcgggtgctgctggccccagcacctcccccatggcgtggaccagggcctccgaggctgctttaaagaaggttctttgagaacggcgcatgtaccgtgtggacactcgtgtgcgcccctgaagtttttgagccagccaccctgtcatcaatcttggttatgcagttcatttattcagtagaccccaggttcccatccacgtttggtgcacagga

SEQ ID NO: 41 - DNA, 5234 bp, HOMO SAPIENS
agcgcagcgcgaacgctgggtgcggcgcctttaagcgtcgcggtgacacgtgtgtgaggcgccggaggcccggatggtgcgcgtgctgggccgcgggccgaaggagtcgccagggctgcgtaggcttgtggcgcgcccgcggagaggccggggctctgacgcccgctctgcggcttcggtgtttgaacaggccacagtccaggagcgcttacattcaggagctccgcgtagcacctgcccaaccaaactcagccctccgttaagatcctggttccatgccgcagtaggacagcaggcccaagtctgcacatcccagtgatgcaccatgccaatagtggataagttgaaggaggccctgaaacccggccgcaaggactcggctgatgatggagaactggggaagcttcttgcctcctctgccaagaaggtccttttacagaaaatcgagttcgagccagccagcaagagcttctcctaccagctggaggccttaaagagcaaatatgtgttgctcaaccccaaaacagagggagctagtcgccacaagagtggagatgacccaccggccaggagacagggcagtgagcacacgtatgagagctgtggtgacggagtcccagccccgcagaaagtgcttttccccacggagcgactgtctctgaggtgggagcgggtcttccgcgtgggcgcaggactccacaaccttggcaacacctgctttctcaatgccaccatccagtgcttgacctacacaccacctctagccaactacctgctctccaaggagcatgctcgcagctgccaccagggaagcttctgcatgctgtgtgtcatgcagaaccacattgtccaggccttcgccaacagcggcaacgccatcaagcccgtctccttcatccgagacctgaaaaagatcgcccgacacttccgctttgggaaccaggaggacgcgcatgagttcctgcggtacaccatcgacgccatgcagaaagcctgcctgaatggctgtgccaagttggatcgtcaaacgcaggctactaccttggtccatcaaatttttggagggtatctcagatcacgcgtgaagtgctccgtgtgcaagagcgtctcggacacctacgacccctacttggacgtcgcgctggagatccggcaagctgcgaatattgtgcgtgctctggaactttttgtgaaagcagatgtcctgagtggagagaatgcctacatgtgtgctaaatgcaagaagaaggttccagccagcaagcgcttcaccatccacagaacatccaacgtcttaaccctttccctcaagcgctttgccaacttcagcggggggaagatcaccaaggatgtaggctatccggaattcctcaacatacgtccgtatatgtcccagaataatggtgatcctgtcatgtatggactctatgctgtcctggtgcactcgggctacagctgccatgccgggcactattactgctacgtgaaggcaagcaatggacagtggtaccagatgaatgattccttggtccattccagcaacgtcaaggtggttctgaaccagcaggcctacgtgctgttctatctgcgaattccaggctctaagaaaagtcccgagggcctcatctccaggacaggctcctcctcccttcccggccgcccgagtgtgattccagatcactccaagaagaacatcggcaatgggattatttcctccccactgactggaaagcgacaagactctgggacgatgaagaagccgcacaccactgaagagattggtgtgcccatatccaggaatggctccaccctgggcctgaagtcccagaacggctgcattcctccaaagctgccctcggggtccccttcccccaaactctcccagacacccacacacatgccaaccatcctagacgaccctggaaagaaggtgaagaagccagctcctccacagcacttttcccccagaactgctcaggggctgcctgggaccagcaactcgaatagcagcagatctgggagccaaaggcagggctcctgggacagcagggatgttgtcctctctacctcacctaagctcctggctacagccactgccaacgggcatgggctgaaggggaacgacgagagcgctggcctcgacaggaggggctccagcagctccagcccagagcactcggccagcagcgactccaccaaggccccccagacccccaggagtggagcggcccatctctgcgattctcaggaaacgaactgttccaccgctggccactccaaaacgccgccaagtggagcagattctaagacggtgaagctgaagtcccctgtcctgagcaacaccaccactgagcctgcaagcaccatgtctcctccaccagccaaaaaactggccctttctgccaagaaggccagcaccctgtggagggcgaccggcaatgacctccgtccacctcccccctcaccatcctccgacctcacccaccccatgaaaacctctcaccccgtcgttgcctccacttggcccgtccatagagccagggctgtgtcacctgctccccaatcatccagccgcctgcaaccccccttcagcccccaccccacattgctgtccagtacccccaagcccccagggacgtcagaaccacggagctgctcctccatctcgacggcgctgcctcaggtcaacgaggaccttgtgtctcttccacaccagttgccagaggccagtgagcccccccagagcccctctgagaagaggaaaaagacctttgtgggagagccgcagaggctgggctcagagacgcgcctcccacagcacatcagggaggccactgcggctccccacgggaagaggaagaggaagaagaagaagcgcccggaggacacagctgccagcgccctgcaggaggggcagacacagagacagcctgggagccccatgtacaggagggagggccaggcacagctgcccgctgtcagacggcaggaagatggcacacagccacaggtgaatggccagcaggtgggatgtgttacggacggccaccacgcgagcagcaggaagcggaggaggaaaggagcagaaggtcttggtgaagaaggcggcctgcaccaggacccacttcggcacagctgctctcccatgggtgatggtgatccagaggccatggaagagtctccaaggaaaaagaaaaagaaaaaaagaaagcaggagacacagcgggcagtagaagaggatgggcatctcaaatgcccaaggagtgccaagccccaagatgctgttgtccccgagtccagcagctgcgcaccatccgcgaatggctggtgtcctggggaccgcatggggctgagccaggcccctcctgtgtcttggaatggagagcgggagtctgatgtggtccaggaactgctcaaatactcatctgataaagcttacgggagaaaagttctgacctgggatggcaagatgtcggcggtcagtcaggatgctattgaagacagcagacaggcccggactgagaccgtggttgatgactgggacgaagagtttgaccgagggaaggaaaagaaaattaaaaaatttaagagagagaagaggagaaacttcaacgccttccagaaacttcagactcgacggaacttctggtctgtgactcacccagcaaaggctgccagcctcagctatcgccgctgactgtgcccctgtggaaggaggtcggttccgagggggtgggtgtaagggtgaggtgggggtgtgtgtgccgtgtatgtgtgtaggggtgtggtggggtgtggcgtgtgtgtatgatgtatgtgggctgtgtatctggcacatgtgtgttgggtggtgtgtgtggtgtgggcgcgtctgtggtgtgtgtcctagtcacttggagaagggtgtgtgtgggatgcgtgtgtataagggggtgtgtgtgggatgcgtgtgtataagggggtgtgtgtagtgtgtgttgggtgtggggtgtgtacacctggcatctgtggcatgtgttctggtcacttggagaagggcatgtgtggggtgtgtgtgggatgtgggttgtgtgtatatctggcatgtgtcccagtcacttgcagaagggtgacttcttgccagccgcatcgagatgccatgcattgggttcctaggttggactcatacccgagggtggcagtgggaagattcgggtctcgtttctctctgtcaggactaccgtggtttgttctgcagcctcctggagacaaggcgtcccttcccgggagctgtcggtctggatctgagggagctctctgtgtgggctctgctgcgctgggagcctgtcacggtaggagctctcccggtaccagtgtccacagaccgcccaacacagaggctttgaggcttctctagatcggaacctctttggtgacattcccgaccagccctgcaagagaaacgacagtgtgtgtgtgagcagaggtggccgcacacctgctggacatctttgccaggctgtgccttctcatgtttcatagacagtggtctgtgctggcagaggctgctgcccctggttggggctatcaggagagtgggggatggtggccacatgtcccccaggtggtctcccggtgcatagctggtggctctgggcaagccatcccttgcttctcggggctgacgccaccgttgtgtccgagcccgccctcccctgcttcctcagcgggaccccttcatctgttggccttacctgtcctcagaaaggaagaggtgaccccacccagccacctctcccttttatggaactcgagagggtggccctactgtgcaccccttccttgtgagtagctctcaactgtcctggagagcagaggctatttggggtcggaggagccctcgatacctgcgaatacatctgctttccaggctgctgtttattctgagacgactgtgctgtagcttcccttgcagctgcaataacccgcaggtcttcactgaggtggaggctttggggtagaattctccatttattttactacttaatacaaaacatttatttttgaccagtcctgtggcttccattagcaatatgtttcctttcccaaatatgcaaatagtggctttgtttgctcaattttgtgagtgctttggaatttaaatgattgtataactcaagaagattacttttctatgttgctcaagctgtgcctgccaacttgtaacttaataaatacaggaaatcctcagagaa

SEQ ID NO: 42 - DNA, 5263 bp, HOMO SAPIENS
cggggggggccgcgccgtgctagccgttgggcctgcctcggaggaggcgtcgccgccgccgctgccgctgccggcgccgttgccgctgccgggaaacacaaggaaagggaaccagcgcagcgtggcgatgggcgggggtagagccccgccggagaggctgggcggctgccggtgacagactgtgccctgtccacggtgcctcctgcatgtcctgctgccctgagctgtcccgagctaggtgacagcgtaccacgctgccaccatgaatgaggtgtctgtcatcaaagaaggctggctccacaagcgtggtgaatacatcaagacctggaggccacggtacttcctgctgaagagcgacggctccttcattgggtacaaggagaggcccgaggcccctgatcagactctaccccccttaaacaacttctccgtagcagaatgccagctgatgaagaccgagaggccgcgacccaacacctttgtcatacgctgcctgcagtggaccacagtcatcgagaggaccttccacgtggattctccagacgagagggaggagtggatgcgggccatccagatggtcgccaacagcctcaagcagcgggccccaggcgaggaccccatggactacaagtgtggctcccccagtgactcctccacgactgaggagatggaagtggcggtcagcaaggcacgggctaaagtgaccatgaatgacttcgactatctcaaactccttggcaagggaacctttggcaaagtcatcctggtgcgggagaaggccactggccgctactacgccatgaagatcctgcggaaggaagtcatcattgccaaggatgaagtcgctcacacagtcaccgagagccgggtcctccagaacaccaggcacccgttcctcactgcgctgaagtatgccttccagacccacgaccgcctgtgctttgtgatggagtatgccaacgggggtgagctgttcttccacctgtcccgggagcgtgtcttcacagaggagcgggcccggttttatggtgcagagattgtctcggctcttgagtacttgcactcgcgggacgtggtataccgcgacatcaagctggaaaacctcatgctggacaaagatggccacatcaagatcactgactttggcctctgcaaagagggcatcagtgacggggccaccatgaaaaccttctgtgggaccccggagtacctggcgcctgaggtgctggaggacaatgactatggccgggccgtggactggtgggggctgggtgtggtcatgtacgagatgatgtgcggccgcctgcccttctacaaccaggaccacgagcgcctcttcgagctcatcctcatggaagagatccgcttcccgcgcacgctcagccccgaggccaagtccctgcttgctgggctgcttaagaaggaccccaagcagaggcttggtggggggcccagcgatgccaaggaggtcatggagcacaggttcttcctcagcatcaactggcaggacgtggtccagaagaagctcctgccacccttcaaacctcaggtcacgtccgaggtcgacacaaggtacttcgatgatgaatttaccgcccagtccatcacaatcacaccccctgaccgctatgacagcctgggcttactggagctggaccagcggacccacttcccccagttctcctactcggccagcatccgcgagtgagcagtctgcccacgcagaggacgcacgctcgctgccatcaccgctgggtggttttttccccctaactttttacttagcctttttggtttgtgtccccacccccacctcctcaccccctttccagttcttcttcaggcccctcccagacgcaccccagcggcccctgcagcccctgcctccagcctccagcctcacctttgtgcccagactcgcatttggaagactccacctcccgcccaggcctgggctgttgggcggttggagattcaggttttaatccacacaagccccagtgaggggtgaagcatggcgcctggggcctgcctgagtttctggcctgggtgtcgtgctggtgtctgcctccgcgctgctgcatctggacgaaggctgccttctggtgggacgcgacacccggcagacagtggtgctgccttccaggccccgtggcctaggctcggagtggccaggcacggggcggtccaatcccccacccgctgtccccctatgggggcagaaaagcaataatgtccaggggcaggcaggggcccttgggagctgcagggctgggggttagggctgctccctggtgaatggagtcagatcctaggatctgtaccatggggaaccaggagtggccgggctgggtgccgcctcctggtccggcctcctccccaccaaactgtcctcaccctatggatgaggcaggaggaacatttggggccaaacctgcctgcctcccagccccgtgccttactagggcttccttccagctggccttacctcccgctggaccctgggcctggcctggccccactgggggctatgggctgggctcaccctctcctctgcgggggtggagggccaccagccttggctgttacaatcttacaccggacagtattgggccccatggacttggtcagggaggggtgggggtgggcatctctggtacctattggggtggggggcctctgaaaagggaggctcctaggcccccctcacccctccctctccccagggccccacgttctgcagccttaaggttgaacatgagtgcacgtccatgtcagtgctgtgggactcctgtgcgtgcctcggactgcgtgtgtcggcgggacgcaggcacacgtgggtgtgtgtgcatgtgtgtttgtgtgagggcagcgtgtcctccagtgtgcatggtgtgtgggcttgggccccatccctggcccgagcatttcatcctgtgggggaggggtgctgacctagtgggaggagccccactgtgatccatgagctgccctgcccacgcctcccctccctgtagcaacacctctgggtgtttggagtttagcttttgtgggtttgctctccctatcccatctcctgtactacacagttcatggcagggtggggaggggtggggttggttcgggtgggtgagggtctttttcctctgtgtgcgatgttgttatctgacagttctccgtccctactggcctttctcctcgtcttcatatttgtacggtacaagcaataaagacactcatttcagaccagggcccagcctgcactcacgccagcccaaccactctgggctttgccttggtgatggagtcagacccctgggccccagctcctcctgtactagccgttcccttcagcaaggagggcactgagctcagggtgagggcagctggggtgtgtgcaggagctcaggctggagagggtgggtggagctggtgctgtggggctgaggggtatgggaaggctccccgcatgtgggggtggggtggacagagaccactccaggccctcagtgctgcttaggctaagagaggtggggtggagggacagggctggaagatctgggtagcccagaatgaggagggtgcctgtgctgtcactgaatgagagggagtggttcattccacccggctgccgagcctcagaggggggcattcctatcctgccccacctccctgtttatgctgccacctggaagccttgaggcccccaaattccagtacagacccagtggtgtgttcatggtggcgtggttgctgtcacctgggagctcctgagcgtttggttagaaccctgttcagcttggggtcagccctcccctagtcactgccctttagcctggatgtgtctgggcccctgcacttcccgtgcttgagtcacgtggctgcatggccgggcgctggccggatggaacacctcccccagcaagggaccagggaccagagccctggcctgccctgctgagccctgctgtgcagagggcctggcacagatgaatttgagattttgccgcaaggtgttagcacttcacacccattgagtctttgagattttaagtgaatgtaagcagaaaaagtcagatccaatttacagaaatcagagttagctacagctaggactcgtttggttggggttttttagtttgtctttctaaagtcatgtggaccttaatttaattacaaaagtctaccctggtggtcataaaataggcaggcctatgaagaaaggccttttactcttccatctcatcccagccccgagttgacccacgttgctgctcctcacaccatggtgatgcaggtctcgtagtgtgggcacaggcctggctacctcatctttttagtgcctctctcctcttccacaggatggggtcccacagctgcagcagctggccccgtagttgagcatgtgtggttatcctgtagagcttttcccaagaagggtgtttgaacttagagtcttaataaaatcttaccaaataaattttgagtagaataatcgtcttttgcaatgtacattttaaaaatttcacacattcttttttgtatataaagaacagtgactgggcacagtggctcatgcctgtaatcccagcaatttgggaggccgaggcgggcgggtctcttgaggccaggggttcgagaccagcctgggcatcatagggagaccttcatctctacaaaaaatacaaaaattagctgggcatggtggtgcatgcctgcaatcccagctaacttggaaggctgaggtgaggtgggaagatcacttgagcccaggagtttgaggctgcagtgagctatgattgcggcactgcactgcagcctgggacaatgagactgtgtctctaaaaataaaaaaaaaaaaaacatgatacatgctattaaaaaagacagcaaagcaggagtataagaaaggaaattcacccgaggtcgcagggccttgagtactcattttggtgctgattacctctctgcaaatggacacggcatcataaattggtagtttcctgctctttttgtgtaatcttttccagttaatgtgaagcctctgggggctgccctcgtgcactgatggttgtgtggagtcgggggcggcagtgcgattcccttttagctgctgcatggggggaactcaggctttccagctgcttcctggggttccatggggtagacccctcaaccgcttcagctgccccgttaacaggaattgacttggtttcgtttggtgctaccagcagtcctgtaataaactagctatccatctgta

SEQ ID NO: 43 - DNA, 391 bp, HOMO SAPIENS
ttggattactgccttgtgactaataaataggactagacactttcatccccacatataagacagtcagctcacagagaaaaatgacaaggtgggtctgcaaacaacggaagcactggcgcaccaaaacttgatctacagagccatctgaaactataaacaaatatgctgatgaatattaagaagatgaaagaaagaaaccaaaggtttaaaaatatgatgctgaaaacaatgaaatgtctctaggtaattaaacagtatggcaggtaatctaatttaaaactaaaacccagctcaaactaagaaaacatattcccaccctctgcttgatttgctttctttcaagggcctttaaagcaaaacactaaccatgaagagttttacttttcccagg

SEQ ID NO: 44 - DNA, 1390 bp, HOMO SAPIENS
ccctggggcttccgcttccggttctgacggacgcttcggccgtaacgatgatcggagacatcctgctgttcgggacgttgctgatgaatgccggggcggtgctgaactttaagctgaaaaagaaggacacgcagggctttggggaggagtccagggagcccagcacaggtgacaacatccgggaattcttgctgagcctcagatactttcgaatcttcatcgccctgtggaacatcttcatgatgttctgcatgattgtgctgttcggctcttgaatcccagcgatgaaaccaggaactcactttcccgggatgccgagtctccattcctccattcctgatgacttcaagaatgtttttgaccagaaaaccgacaaccttcccagaaagtccaagctcgtggtgggtggaaaagtgttcgccgaggtgtgcatggtttcccagccacgtccctgttttcaaagatagtttcactttggtctctgaattgaaatgctgtctactgaaagggtttcaggagcgtttatgtaaggggctgtgatgaaattgcattccccatagataaaagaaaaatcatttctatccagagatctgagcagaaggattggcttgttagtttaacacagccgtatttttggacattcagtgttacttgctgagtctgacagcctctgggcccggccaggggccctgttaacaaactgctttcacatcccaacagggtctgcttggccactcagtgcagctgcgattaaccctaaaggctttaaggaacgggccacctgtaacagagacaccagccttcctgtatagacactaaattgttagcaagagtgttgagctagttcctggtgaagtgtttccacagaagacatgtggagcagttgtggggatattaagggaaactttcctctgccttgacccctttgttaaataaaatgactttgggagccattcattgtacagttgcaggaatgagagtgattttatgatgtggtacattgggaccatgttctaaaaccttgggtttctgagtctgctttttgagtaggtgattttgaggttgaaaaaccaggggccttcatctaggaaatacagcattttccagaagcttctttgaaagggaatcctggttttgttgccaaaatgaaacgcccggggttggcgctgaatcccacaactgtgtgatttgcttgttgagttttttgttgtctggtttttttgtttgtttgtttataccaataagaatgagcctgaatgttggtggtttttgaaatcctgacttggaggtaaacctggaggaaggaaaaaaagtaaatatgcaggcttttaggactgagtagccttgaaaataaacctcatttctaaaaaggaaaaaaaaaaaaaaaaaa

SEQ ID NO: 45 - DNA, 1979 bp, HOMO SAPIENS
cccttgctgccgcctctcgcctcacgcccccagagaagagtttctccaccaggcagcaggtgaaggtttttttccaagtcacatgattcaggattcagggggagaatccttcttggaacagagatgggcccagaactgaatcagatgaagagagataaggtgtgatgtggggaagactatataaagaatggacccagggctgcagcaagcactcaacggaatggcccctcctggagacacagccatgcatgtgccggcgggctccgtggccagccacctggggaccacgagccgcagctatttctatttgaccacagccactctggctctgtgccttgtcttcacggtggccactattatggtgttggtcgttcagaggacggactccattcccaactcacctgacaacgtccccctcaaaggaggaaattgctcagaagacctcttatgtatcctgaaaagggctccattcaagaagtcatgggcctacctccaagtggcaaagcatctaaacaaaaccaagttgtcttggaacaaagatggcattctccatggagtcagatatcaggatgggaatctggtgatccaattccctggtttgtacttcatcatttgccaactgcagtttcttgtacaatgcccaaataattctgtcgatctgaagttggagcttctcatcaacaagcatatcaaaaaacaggccctggtgacagtgtgtgagtctggaatgcaaacgaaacacgtataccagaatctctctcaattcttgctggattacctgcaggtcaacaccaccatatcagtcaatgtggatacattccagtacatagatacaagcacctttcctcttgagaatgtgttgtccatcttcttatacagtaattcagactgaacagtttctcttggccttcaggaagaaagcgcctctctaccatacagtatttcatccctccaaacacttgggcaaaaagaaaactttagaccaagacaaactacacagggtattaaatagtatacttctccttctgtctcttggaaagatacagctccagggttaaaaagagagtttttagtgaagtatctttcagatagcaggcagggaagcaatgtagtgtggtgggcagagccccacacagaatcagaagggatgaatggatgtcccagcccaacctctaattcactgtatggtcttgatctatttcttctgttttgagagcctccagttaaaatggggcttcagtaccagagcagctagcaactctgccctaatgggaaatgaaggggagctgggtgtgagtgtttacactgtgcccttcacgggatacttcttttatctgcagatggcctaatacttagttgtccaagtcgcgatcaaggactctctcacacaggaaacttccctatactggcagatacacttgtgactgaaccatgcccagtttatgcctgtctgactgtcactctggcactaggaggctgatcttgtactccatatgaccccacccctaggaacccccagggaaaaccaggctgggacagccccctgttcctgagatggaaagcacaaatttaatacaccaccacaatggaaaacaagttcaaagacttttacttacagatcctggacagaaagggcataatgagtctgaagggcagtcctccttctctaggttacatgaggcaggaataagaagtcagacagagacagcaagacagttaacaatgtaggtaaagaaatagggtgtggtcactctcaattcactggcaaatgcctgaatggtctgtctgaaggaagcaacagagaagtggggaatccagtctgctaggcaggaaagatgcctctaagttcttgtctctggccagaggtgtggtatagaaccagaaacccatatcaagggtgactaagcccggcttctggtatgagaaattaaacttgtatacaaaatggttgccaaggcaacataaaattataagaattc

SEQ ID NO: 46 - DNA, 2080 bp, HOMO SAPIENS
gcgggtccccagaagcctacaggtgagtatcggttctccccttcccggctttcggtccggaggaggcgggagcagcttccctgttctgatcctatcgcgggcggcgcagggccggcttggccttccgtgggacggggaggggggcgggatgtgtcacccaaataccagtggggacggtcggtggtggaaccagccgggcaggtcgggtagagtataagagccggagggagcggccgggcggcagacgcctgcagaccatcccagacgccggagcccgagccccgacgagtccccgcgcctcatccgcccgcgtccggtccgcgttcctccgccccaccatggctcggggccccggcctcgcgccgccaccgctgcggctgccgctgctgctgctggtgctggcggcggtgaccggccacacggccgcgcaggacaactgcacgtgtcccaccaacaagatgaccgtgtgcagccccgacggccccggcggccgctgccagtgccgcgcgctgggctcgggcatggcggtcgactgctccacgctgacctccaagtgtctgctgctcaaggcgcgcatgagcgcccccaagaacgcccgcacgctggtgcggccgagtgagcacgcgctcgtggacaacgatggcctctacgaccccgactgcgaccccgagggccgcttcaaggcgcgccagtgcaaccagacgtcggtgtgctggtgcgtgaactcggtgggcgtgcgccgcacggacaagggcgacctgagcctacgctgcgatgagctggtgcgcacccaccacatcctcattgacctgcgccaccgccccaccgccggcgccttcaaccactcagacctggacgccgagctgaggcggctcttccgcgagcgctatcggctgcaccccaagttcgtggcggccgtgcactacgagcagcccaccatccagatcgagctgcggcagaacacgtctcagaaggccgccggtgacgtggatatcggcgatgccgcctactacttcgagagggacatcaagggcgagtctctattccagggccgcggcggcctggacttgcgcgtgcgcggagaacccctgcaggtggagcgcacgctcatctattacctggacgagattcccccgaagttctccatgaagcgcctcaccgccggcctcatcgccgtcatcgtggtggtcgtggtggccctcgtcgccggcatggccgtcctggtgatcaccaaccggagaaagtcggggaagtacaagaaggtggagatcaaggaactgggggagttgagaaaggaaccgagcttgtaggtacccggcggggcaggggatggggtggggtaccggatttcggtatcgtcccagacccaagtgagtcacgcttcctgattcctcggcgcaaaggagacgtttatcctttcaaattcctgccttccccctcccttttgcgcacacaccaggtttaatagatcctggcctcagggtctcctttctttctcacttctgtcttgaaggaagcatttctaaaatgtatcccctttcggtccaacaacaggaaacctgactggggcagtgaaggaagggatggcatagcgttatgtgtaaaaaacaagtatctgtatgacaacccgggatcgtttgcaagtaactgaatccattgcgacattgtgaaggcttaaatgagtttagatgggaaatagcgttgttatcgccttgggtttaaattatttgatgagttccacttgtatcatggcctacccgaggagaagaggagtttgttaactgggcctatgtagtagcctcatttaccatcgtttgtattactgaccacatatgcttgtcactgggaaagaagcctgtttcagctgcctgaacgcagtttggatgtctttgaggacagacattgcccggaaactcagtctatttattcttcagcttgcccttactgccactgatattggtaatgttcttttttgtaaaatgtttgtacatatgttgtctttgataatgttgctgtaattttttaaaataaaacacgaatttaataaaatatgggaaaggcacaaaccagaaaaaaaaaa

SEQ ID NO: 47 - DNA, 2779 bp, HOMO SAPIENS
gctatcattttaggcttaactaccaccatctcctcgcgggcagtgggggcaaccgcgaagacagaatttcacaaactttcagctccagcagtttcaaggaaatgtcaaatgacaagatggaagaccgagtgtcaagagctaagacaacaaaaaggcccccaaaatttgttttcaagaaaaccaatgaaaaaagcaagcaatcagaacgtgaagtccaggatcatggatgtgcttatcttcacagtcactgctgggtcctgaagttctcctctggcccagtgccagctgcgaagccctctgccaaagggccagaggaggccggtgatatagagctctgattacccacccgtcagggcaccgctgaaggtcactgaatacttactgtgcacccgaaaaataaatcctgcgagttcacgcccgcgtagttcgccccctgattttgagcgactcctttcgcatgggatctacaaaaccgaactgccttaaagacctctttcacacggacgtgaagtcacagaactgacaaaatcccatcctgtcaaagtgcacgggtctttgaaatctaacacaaaaagccatagaaagattctctaaacaccctgtactaagaggaacacggacagggcactgcgttctgaagtagaggccagggcactggcccttagacacgtctcgctgtcaccgggctaacaacattggcaagggcggcggcagcagcactgatatttgcagcccccaagggctctggcgaaaccccctctattactctgtatcctgcctgcttccaagatgaacctgttgctgggaaagaacaggctaaattagaaaagggagtattttgtcaaagttgaaggtgagtgatagcctgcccgcctcaaataggatgggaaaaactaaggatattggggatgatgacactgtcgcctccgaattctggtccggggctctctcccagccctcaagtgtccccacgcggccgcggaccccgaacagggacagctggagacgggcttgggcagcgcgcggcctgcacccgcggccatccatcttgcagcccggcccggccaggctatcccgggcaagggctgggggaactcgctgcccccagcgccgccacggccgggcgacattctgcgccctgggaagggggataggggtgcggcgcggccccggtccccggcccgcccggatccccggcctcaccttgacgtggaagcggatgagcgccaggcggatgcagtgggccatgcagacgggcggcaggaaccagacctttggcggcggggtgcccttgttctggacatggctgacgatctgctgtgccgtctggcgctcgttgccctgccgcttgacccactcgtgcagccgggccttctcgagcgcgccgttgaagaagacgaagagctcgatgttgccgccgaagcaggccttggccagcgccgccagaaacctctgtagaggagcaggatgcaaccgacaggctgtggccggacagctgctgcccagcacatggagcctgcacgcgcacggtttggccaaagaagcccccatactcccggtgaaaaagatttccagaagctgttctgtcaataacaaagtctcaaagaaaaccacaaaaccaccaacactaagatcattcttgagtccaatttgaaaaactagggtcaagttctgcagaggcattgaaaggacaagaaaccaccctgatacccatcgtgtgagggaaaatgctctattcaccattcctcagcttctgcttctggtttcagagttctctctatattggagggtgttttaaagctagagtggtctttatccacttttattaacacatctgaatgtgaaggtcaagagaggaaagtgatatgtcctaagtcagagtagagtcaacaagaaaataagacaaacagcgactgagcccctggtgtatactgggcattggccagctactggggatatggagatgaagaaaacataacccttcttcaaggagcccaacctaccaaggtagacagacatatagacaaatagatacttgcatagaaaaaaagaggaaaaggggatcagtgtgacctgtgtaactaagtaccctataaaccctcctgcaacagatcatattgccctttatagtggggatggtaatcccatctgaattccacaggtactttgcagtcataccacacccatgtgtctgtcggtcctgactgtaccatttataaacagcttcactttcagcagttctcagccctcttaagctagggtcattgtcagtagggatactgcttcataagcaccagcagaacaccaaaggagaccatatgggtgaaagcaaccagcactgccctggcgcttcataggttcttagagtttttatcttttactttcagtctaacacagcactgcctgctttttgtttttgttgcttggtttgtttttttcttaccgtgttcaccaaacttgtgtccaaatagctttgggctgatgcaaaaatatctatgtggaagagaagagttgttctcatggagggccttcagatgagtgctatagactctctaggcaactccaagaggcttctcaagcagggtgggcagtgagagctgctatggaatcaatggacaaactgacagggactgctttgaaagacagtactcagttgagtatatatattctctcttaagggctaaaagtttataatcatcccttaaacactctgtgatgggatcttcaggatcatcttttgaagtaaactatattttacaatgtgaaaaaaaaaaaaaaa

SEQ ID NO: 48 - DNA, 3866 bp, HOMO SAPIENS
gagctcaatccctgggcagggaaaagggggtcctcggggctccccgctcgctgtcctttttctggacaggcagttccttggccacctggtagggccgcgttgcctggcaacggcggggtccttcttggctcggcggcgctcggggcctgaggggagaaaaccgccgcggagggcgctgggggtggcggcggcggtccgggaggtggtcgcgcgactgcgtggagcgccagggcgtccgacctctgcacctgagagaagatgaacacggccgaccaggcccgggtggggcccgcggacgacgggcctgcgccgtctggggaggaggagggagaggggggcggcgaggcgggcgggaaggagccagcagcggacgcggccccggggcccagcgctgcattccgcctcatggtgactcggcgggagccggccgtgaagctgcagtatgcggtgagcggcctggaaccgctggcttggtccgaggaccaccgcgtgtctgtgtccacggcccgcagcatcgctgtgctggagctcatctgcgacgtgcacaacccgggccaggacctggttatccaccgcacctcggtgcccgcaccgctcaacagctgtctcctcaaagttggctcaaaaacagaagttgctgagtgcaaggagaaattcgccgcctccaaggaccccacggtcagtcagactttcatgttggatagggtgttcaaccctgaggggaaggctttaccaccaatgagaggattcaagtacaccagctggtctcccatgggttgcgatgctaatggcaggtgcctcttggcagcactgaccatggacaatcgcctgaccatccaggcaaatctcaacagactgcagtgggtccagctggttgacctgactgagatctatggagaacgtctttatgagaccagttacaggctctctaaaaatgaggccccggaaggaaatctcggggattttgctgagtttcagaggagacacagcatgcagaccccagtcagaatggagtggtcgggcatctgtaccacccagcaggtcaagcataacaacgaatgccgggacgttggcagtgtgctcctggctgtcctctttgaaaacggtaatatcgccgtgtggcagtttcagctgccgtttgtaggaaaagaatccatctcttcatgcaacacaattgagtcaggaatcacctctcccagtgtattgttttggtgggaatatgagcacaataatcgaaaaatgagtggccttattgtggggagtgcttttggacccataaaaattcttcctgtcaatctcaaagcagtcaaaggctatttcactttaaggcagcctgttatcttgtggaaagaaatggaccagttacctgtgcacagtatcaaatgtgtgccactttatcatccttaccagaagtgtagttgcagcttagtagtggctgcaagaggctcttatgtattttggtgtcttcttctgatctccaaagcagggctgaatgttcacaattcccatgtcacaggccttcactcactgccaattgtctccatgactgcagacaaacagaatggaacagtctatacttgctccagtgacggaaaggtgaggcagctgattcccattttcacagatgttgcattgaagtttgaacaccagttgattaaactctcagatgtgtttggctcagtgaggactcacgggatagcagtgagcccctgcggtgcatacctggccatcatcaccactgagggcatgatcaacggcctccaccctgttaacaaaaactaccaggtccaatttgttactctcaaaacctttgaagaggcagctgctcagctcctggaatcttcagttcaaaacctttttaagcaggtagatttaatagacctagtacgctggaagattttaaaagataaacatatccctcaatttttacaagaagctttggaaaaaaagattgaaagcagtggagtcacctatttttggcgttttaagcttttcctcctgaggattttatatcagtcaatgcagaaaaccccttcagaagccttgtggaaacccacccatgaggactcaaaaatcttactagtggattcgcctgggatgggcaatgctgacgatgaacagcaggaagaaggcacttcttccaaacaggtggtgaagcaaggcctgcaggagaggagcaaggaaggagatgtagaggagcccactgatgactcgctccccacgactggagatgctggaggccgtgagccaatggaagagaaactcctggaaatccaagggaaaatcgaagctgtggagatgcacttgaccagggaacacatgaagcgagtcttaggagaagtgtatctgcacacctggatcacagaaaacactagcatccccacccgcggactctgtaactttttaatgtctgatgaagagtatgatgacagaactgcacgggtgctgattggacatatctcaaagaagatgaacaaacagactttccctgagcactgtagtttgtgtaaagagatcttgccattcacagatcgcaaacaggcagtctgttccaatggccacatttggctccggtgcttcttaacctaccagtcctgccagagtttgatatatagaaggtgtttgctccatgacagcattgcccggcatccagctccagaagatcccgactggattaagaggttactgcaaagcccctgccctttctgtgattctcctgtcttctaaataatcagtgacgggaagatggaagggcatgatgaactctgccatagaaaacttcctccagcctgaagagaaggatgcactggaggaagccggaccctcacgagtggagagaagtccttggtgattgtaaagagggcccctggagctcatttctgaatcgcactctccatttccagagactaaaggatgtcctttgaaatggctggactcagagagttggagtcgttttgagatgagcattagccccagctttgtaaccaatgaggaacacttacttatttttaagtatcttgacagaagcaatttgaacacagtgtcccgtcatttctagaaacagaatggtctcttctagagagcttggataaggaccttgctgggttgagttaggttttaatccttgctttggtttggaactgccttcgggctccagaacttaaattgcttggtccgtggcatctgatgtaccaacagagattaaaagtgtaaagcaacacatgggctgatgttttgttctcagaaaatagctgctggtctgcatccctccattcttgttttttatgcatatggaaaacattttcctaaaactctatattcttaagttgaagccaagactaaaatttaatgtgtcaaatgatctggtgactattataatgaataattgtgacttatttttcattctctcctgggtcatcaggtttcctgacccaactccttaatccgtataaagatgtcaaatactgtagttcacccacgccacagccctgcttcagacttaactgtggtagcctagatgagctatttgtacacagaggaaaaaaagatattttcctcttttagtaataagactttcagtatttttaatgttgacatttccagatgtttcatttagtatccaggggtctgtctggagacttctagagagggacagctcagaagtgagacccttgagctctggtgctgtaagcttgtgcaattaagttgaacagagcctgggaatttctttcctctgcacagtcccttgatatttggaatccaggttctgcccccaacccctacccacccagtggtctgttaagatgtctcagatggggctgggcttggtggctcatgcctgtactctcaacactttgggaagcaaa

SEQ ID NO: 49 - DNA, 4188 bp, HOMO SAPIENS
gctttatttttcaattcttcctagtcccggttttgcatttctaatgacagtgaactgacaaagcgtgaaagtggtctaaggagcaaaacaaagccagcaagcctgcttctggtgtgccaagattaatcaatattccagaaacctcggggtttccccctcctccctgtgcggtttccattccccactcctcctttcccgggcacagactcctccccttttcttaagttgccctgatagtaacttgcagtttcagagcacatgcacactgtcagggctagcctgcctgcttacgcgcgctgcggattgttgctccgttgtacctgctggggaattcacctcgttactgcttgatatcttccaccccttacaaaatcagaaaagttgtgttttctaataccaaagaggaggtttggctttctgtgggtgattcccagacactgaagtgcaaagaagagaccctcctagaaaagtaaaatatgactaaaagcaatggagaagagcccaagatggggggcaggatggagagattccagcagggagtccgtaaacgcacacttttggccaagaagaaagtgcagaacattacaaaggaggatgttaaaagttacctgtttcggaatgcttttgtgctgctcacagtcaccgctgtcattgtgggtacaatccttggatttaccctccgaccatacagaatgagctaccgggaagtcaagtacttctcctttcctggggaacttctgatgaggatgttacagatgctggtcttaccacttatcatctccagtcttgtcacaggaatggcggcgctagatagtaaggcatcagggaagatgggaatgcgagctgtagtctattatatgactaccaccatcattgctgtggtgattggcataatcattgtcatcatcatccatcctgggaagggcacaaaggaaaacatgcacagagaaggcaaaattgtacgagtgacagctgcagatgccttcctggacttgatcaggaacatgttccctccaaatctggtagaagcctgctttaaacagtttaaaaccaactatgagaagagaagctttaaagtgcccatccaggccaacgaaacgcttgtgggtgctgtgataaacaatgtgtctgaggccatggagactcttacccgaatcacagaggagctggtcccagttccaggatctgtgaatggagtcaatgccctgggtctagttgtcttctccatgtgcttcggttttgtgattggaaacatgaaggaacaggggcaggccctgagagagttctttgattctcttaacgaagccatcatgagactggtagcagtaataatgtggtatgcccccgtgggtattctcttcctgattgctgggaagattgtggagatggaagacatgggtgtgattggggggcagcttgccatgtacaccgtgactgtcattgttggcttactcattcacgcagtcatcgtcttgccactcctctacttcttggtaacacggaaaaacccttgggtttttattggagggttgctgcaagcactcatcaccgctctggggacctcttcaagttctgccaccctacccatcaccttcaagtgcctggaagagaacaatggcgtggacaagcgcgtcaccagattcgtgctccccgtaggagccaccattaacatggatgggactgccctctatgaggctttggctgccattttcattgctcaagttaacaactttgaactgaacttcggacaaattattacaatcagcatcacagccacagctgccagtattggggcagctggaattcctcaggcgggcctggtcactatggtcattgtgctgacatctgtcggcctgcccactgacgacatcacgctcatcatcgcggtggactggttcctggatcgcctccggaccaccaccaacgtactgggagactccctgggagctgggattgtggagcacttgtcacgacatgaactgaagaacagagatgttgaaatgggtaactcagtgattgaagagaatgaaatgaagaaaccatatcaactgattgcacaggacaatgaaactgagaaacccatcgacagtgaaaccaagatgtagactaacataaagaaacactttcttgagcaccaggtgttaaaaaccattataaaatctttccatctcattacagctcattcgctccagcaagcccgtcatcttccctttcctcccttctgataagactggaaaatagtcctccaaaacacaagggaggattttgggtggccaaagtgtacaattttcatcccacaattgaaatttttaaatcatttcatgttagtcttaccgaataaggtaccaagatcacaaatagtgttgatcagatcttacaagtttatgtggcacacaatcctataaatgtgatttttttatataagttaaagagacaaatagtaggctaaaaacattttaaaatcaacttttgaaatttaaaaatctttcagaatacaattcagttttagtttcaaaatgttaacaacttgaattacaaccggttatcagttggacagtaagattttatccctttctcttctgactggtatacctatttcattagtagctaggtgcacatatacatctagcacagctgtgaggacagacagaaggcaaagtttccatgtggccttgagcaagtcccatctcacctctaggcctcagtgtcctcatctataaaatgagggacttccctagaagtcttcatggtctcttccagcccagacatcctgtgatgtcatgaaagcacctgccctctgtttcccctcagaacaccctgtaccatccatggagcacgaggccttcagaaaagacacttcaatgggagtgaacatttctaactaaggacaggatggctgtgtgtggtggtcaccaggtcctgtgagcaaagtgcaggttatgcaagtcgccaggcaggaggccattccaggagtgggattattcatcaaactctttgcccagttcatcccaatgggggaagtattcccttctttcctactctgggaagaatgtctcctgccactcctcaactgatgatagacttcgaaaacagatgagaagactagcagctagcaagggtgcttgtggtcacactgtggaacactaaagagctaggaaagagttgagcacaggcaacattacaaacaaaggatttgaaaacaccaagagtacaggtcttctttaaggaagaataaaaaagaagaggttcatttttctggctttttttttcacctgaaacactttttctcgagtccaaaatcattccccccgtgaagtctgcttaccaaaacataagacgacttatatatttgaaagaagtcaaatgaatgagctctctaatagaagtccatgagttgagtgggtatttcttatttgaaagtgtttttctttaatcaaaagtccttagaatgagggaaacaaaatatttatttgttttggaatcccacttatcaaatcattcaaaactttcagctggagtggggtttgcttttgttttgtttgtgtccataagagaaatggtagaagatgaatcagtatgaagacactgtcaatgaggttatgagaaaaaaacagcaggggcattagtttcaggcaaggcagctcccaggtttagagattaatttttaccccctaaggaatatccagtcaaagacgctgagtgggagctgtcaggcagtagcagctgtgtttgagtttctggctgaaaatggtgaagaatggacttaattatgctaacaaactgaaaaatctagacatagatcctctgatatacaattagagatatttttatatagaccccaagcattctgtgcataaaagttaacattaggctgtggtgcagtaaccatttaatgtcgaggctctatttcggaaatacactacaaatgttaaagtacgtggctgtcctcttaagacactagtagagcaaagacttaatcatatcaacttaattctgttacacaatatgtgttttttaatatactaaccatttcttatggaaaggtcctgtggggagcccatcctctcgccaagccatcacaggctctgcatacacatgcactcagtgtggactgggaagcattactttgtagatgtattttcaataaagaaaaaaatagttttacattaaaaaaaaaaaaaaaaaaaa

SEQ ID NO: 50 - DNA, 14174 bp, HOMO SAPIENS
tgcaacggaaacttttggctccacgaacagaaaagcaagagcaaaaactcagttaaatgcgttcttcctccatctttgcctagtccaaaaggaaaaaaaaagaaacagaaaaaagaaaaactgtttggaagagtagcgttgaggtttgctttttacctgtttttcctctagaacagccaggtggattcacatgatccaattttttaattgtcttctatgtcccactccgaataacccggatgccccagcacaatcagagagatcgttttttttaaaaaaaatttcagcctccaaaggtaggaggggagtgttaggggagaaagtactttaattaaaaatcaataactcgaggtttttgggatacggtttgccatttcctaattaagaaatgggtttgacagtccctttgtacacactgctatgcaaaccccaaagggttggcggctgtccgggcgatgacactccggtcccctgcgagaccccgggccagccaggcccgtccgccgccggcctctggggtccgtccccggctcgcgcagacctctcgcttctctcggctctgtctcctgcgctcagctctgctcggggccggccgcctcaggctcgccgccaccaggtcgttgcaaataccttttccctccccggggccccagcgcgcggccacctcccagcctccccccctcccaccctggcagcggggccctttcccggctcaggaacagcagcagcccgggccgcgccggcaggaagcgaggcccatgttgctgctgttccctggcgcgcctccccgccctccgggggccgccacggctcttccgcgctcccgggcacccccctccgcgcctgcgctgtgccccacgggggcggggctcagattcctgtcagcggcggcggcggtggcggcgaccgtcagttttcgctgaggagaaacacgaaacggaccctttggctctcccccttccccttccccgtcctgaacccctctcctggtcaccgagaatcagtccccgtggagttccccctccacctcgccatcgtttcctcggtcctcggcccagtggaagtcactaccctcgaggaggaggcagcggcagccgccctcgcgtcgccgcccccggttcggtgcccgcggtcccggagaggaggtgccgccgccaccgccgctccccccctcccgctgccctcgggccgggctgggtcgagctgcgatgccctcggacttcatctcattgctcagcgcggacctagacctggaatcgcccaagtccctctactcgcgagattctctgaagttacacccatcacagaattttcatagagctggactattggaagaatctgtctatgatcttctcccaaaggagttacagttacctccatctagagaaacatctgtagcatcaatgagtcagacaagcggtggtgaggcaggctcgcctcctccagctgttgttgctgctgatgcttcttcagctccctcctcttcctccatgggcggtgcttgcagctcctttaccacctcttccagccctaccatttattctacctcagtcaccgacagcaaggctatgcaagtggagagctgctcctcagccgtgggggtaagtaacagaggggtaagtgaaaagcagttaaccagtaacacagttcagcagcatccatcaacaccgaagaggcacacagtcttgtacatctcaccaccacctgaggacttgctggataacagtcggatgtcctgccaggatgaggggtgtggattggaatctgagcagagctgcagtatgtggatggaggattccccctccaacttcagtaacatgagcaccagttcctacaatgataacactgaggtacctcgtaaatcacgaaaacgaaatccaaagcagaggccgggggtcaaacgacgagattgtgaagaatctaatatggatatatttgatgccgacagtgccaaagcacctcactatgtgctttctcagcttaccacggacaacaaaggcaactcaaaagcgggaaatggaacattggaaaaccaaaaaggaactggagtaaagaagagccctatgttgtgtggacaatatcctgttaaaagtgagggaaaggagctgaagatagttgtacaacctgagacacagcaccgagctcggtacctgactgagggcagccgtggctcagtgaaagatagaacacagcaaggctttcctacagtaaagctggaaggccataatgaacctgtagtgttgcaagtgtttgtgggcaacgactctggacgagtgaaaccacatggattttatcaggcctgcagagtaactggacgaaatacaactccttgcaaagaagtggacattgaaggcactactgttatagaagtcggccttgatcctagcaacaacatgacactggcggtggactgcgtagggatattgaaattgaggaatgctgatgtcgaagccagaataggaattgctggttccaagaagaaaagcactcgtgccagattggtttttcgagttaatatcatgaggaaagatggctccactttgacactgcaaacaccctcttctccaattttgtgtactcagccagcaggagtgccagaaatcttaaagaaaagcttgcatagctgttcagtgaaaggagaagaagaagtgtttttaatcggcaagaactttctgaaaggaactaaagttattttccaagaaaatgtttctgatgaaaactcttggaagtcagaagctgaaattgatatggaactatttcatcagaatcatcttattgtgaaggttcctccctatcatgaccaacatataactttgcctgtgtcagtgggaatatatgtagtgacaaatgctggaagatctcatgatgttcaaccattcacttacactccagacccagcagctggtgctttgaatgtaaatgtgaagaaggaaatatctagtccagcaagaccttgctcttttgaagaggccatgaaagcaatgaaaactactggatgtaatttagataaggtaaatattatccctaatgccctgatgactccactcataccaagcagtatgattaagagtgaagatgttactccaatggaagtaacagcagaaaaaagatcttccactatttttaagactacaaagtctgttggatcaactcagcaaacattagaaaacatctcaaacatagcaggaaatggctctttttcatcaccatcatcttcccacctaccttctgaaaatgaaaaacagcagcagattcagcccaaggcatacaacccagagaccctgacaactattcaaacccaggacatctcacagcctggtacttttccagcagtttctgcttctagtcagctgcccaacagcgatgcactattgcagcaggctacacagtttcagacaagagaaactcagtctagagagatattacagtcagatggtacagtggttaatttgtcacaactgactgaggcatcacaacaacagcagcagtcaccactacaagaacaagcacagactttacagcagcagatttcatcaaatatttttccatcaccaaatagtgtgagtcagcttcagaatactattcagcagctgcaagcagggagtttcacaggcagtactgctagtggcagcagtggaagtgttgacttggtccaacaagttttagaggcacagcagcagttatcttcagttttattttctgctccagatggtaatgagaatgttcaagagcagcttagtgcagatatttttcaacaagtcagtcaaattcagagtggtgtaagccctggaatgttttcctcaacagagccaacagtccataccagaccagataatttattacctggaagagctgaaagtgttcatccacagtctgaaaacacgttatctaatcaacagcagcagcagcagcagcaacagcaagtgatggaatcttcagccgcaatggtgatggagatgcaacagagtatctgccaggcagctgcccagattcagtcagagttattcccttcaactgcttcagcaaatggaaaccttcagcaatcgccagtttaccagcagacttctcacatgatgagtgcattgtctaccaatgaggatatgcaaatgcagtgtgaattgttttcttctcctcctgcagtttctggaaatgaaacttctacaactaccacacagcaggttgcaacccctggcactaccatgtttcagacatcaagttcaggagatggagaagaaactggaacacaagcaaaacagattcagaacagtgtctttcagaccatggtccaaatgcaacatagtggggacaatcaacctcaagttaaccttttttcatccacaaaaagtatgatgagtgttcagaatagtggtacccaacaacaaggtaatggtttattccagcaagggaatgagatgatgtcacttcaatctggaaattttttgcagcagtcttctcattcacaggcccaactttttcatcctcaaaatcctattgccgatgctcagaacctttcccaggaaactcaaggttctctctttcatagtccaaatcctattgtccacagtcagacttctacaacctcctctgaacaaatgcagcctccaatgtttcactctcaaagtaccattgctgtgttacagggctcttcagttcctcaagaccagcagtcaaccaacatatttctttcccagagtcccatgaataatcttcagactaacacagtagcccaagaagcattttttgcagcaccgaactcaatttctccacttcagtcaacatcaaacagtgaacaacaagctgctttccaacagcaagctccaatatcacacatccagactcctatgctttcccaagaacaggcacaacccccgcagcagggtttatttcagcctcaggtggccctgggctcccttccacctaatccaatgcctcaaagccaacaaggaaccatgttccagtcacagcactcaatagttgccatgcagagtaactctccatcccaggaacagcagcagcagcagcaacagcagcagcaacagcagcagcaacaacaacagagcattttattcagtaatcagaataccatggctacaatggcgtctccaaagcaaccaccaccaaacatgatattcaacccaaatcaaaatccaatggctaatcaggagcaacagaaccagtcaatttttcaccaacaaagtaacatggccccaatgaatcaagagcaacagcccatgcaatttcagagtcagtccacagtttcctcacttcagaacccaggtcctacccagtcggaatcatcacagacccccttgttccatagctctcctcagattcagttggtacaagggtcacctagttctcaagagcagcaagtaactctcttcttatctccagcatccatgtctgccttgcagaccagtataaatcaacaagatatgcaacagtctcctctttattcccctcagaacaacatgcctggaattcaaggagccacatcttcgcctcaaccacaggctactttatttcacaacacagcaggaggcacaatgaaccaactgcagaattctcctggctcatctcagcagacatcaggaatgttcttatttggcattcaaaataactgtagtcagcttttaacctctggaccagctacattgcctgatcagttgatggccataagtcagccaggccaaccacaaaacgagggccagccacctgtgacaacacttctttctcagcaaatgccagagaattctccactggcatcctctataaacaccaaccagaacatcgaaaagattgatttgcttgtttcattgcaaaaccaagggaacaacttgactggctccttttaactggatataaattccacgaagaaaatcctgattccaagatgtcctgagatcttgtggttccatgagaattattactttaaaaacaaaacaaaatataaaaaactgtgtttgagtaaactgatagattttactctgactgcaaaagagcacacctatgctgcttgttgcagtaactaaccaccaatgttaacatcttcatattttatattcctaataacagtgatgactgagaatctatttgagtttccagctggcagaattaattgttattattttcctaggcgcaatttccttaaacgtacagtttaaattcaaggctggaccactcagttattattgctattagaaaataatatatcatgtttacttttgttcttcattattttctttcctgcattgttttagtcaagtaatggcttttgaaaaagtaaagttcaataataactaaggctgtgatttttttcaatataaaaggcacagctgttggccaaagtgaaggaatcttttttcagttttattggagaaactgaagggtaacattctaacaagtaaactgtatgtgcagataaaagtactcttgatttaacacaaaggcagatgatacacttataaaactgggaacagctggaatgcttcttgattttattttttcagagagttgttagttctctgggtttctactaaggggtttagccataactgtgcatagaaaaataattatctgtaaaaaatgaaggggataatatatgataaattatgttctgatatcctcctacagtagtttaaattgacagaaaaatttgaatgttttcttcttaacccagtcttaggctggtattccctttttatatatatctatattacttttcacctctttttcactttactttagagaactattaatatactactggcttcatgaccctgtagcatctttggccactttaatctagggtgacctagcaatcctgcagcacagggcagagagtactgtcttaggaattattaggagttgattcctgagaaacaacacatttttccccatgaacggtgctgttctgaagtcttcaaatttttccctctaataggaaacagtataaattttaattaaaaaaaaaaggcaaactaaaatttcttgaaatatcacttctccctgatctgcagtgagtataaattcacttgtcacctcagtgctttacagtttgaagtggtcacttacctgatggttcccacaagccttaggctttacagggttgtatcattgacttaaaatgaagaattaacttgtgttacatctataaagagcaaaataacacactccagaacttggcagttgtagcattagttatacagttttgggtgttcttgccacccgtgggatgcctgcttctcactaccacctgtgtctggacacatgcttatgtctcattttccttttggcatgtggaaagctgtcaatgcagtgtaaggccaacgtgtgtgtggcttctatgtgttgagataatgttttggtatccttgtccgtttcatttattttttaagtgtacaaaaaataacctgttaattgttgaaggctacttttctgttctttttttttttttttttctatcctgtacatttagttgaactgtgcggaattgtggtgttggttttgtttacacagccagatttttccttctttttgttttgtgatgatcttcctttgttctttgaatgtgctcttttgtctttttctcttttttctcatgttttcttccctccacctccacccctttctttctttctctctctgattgagaggcattgaattacgttttcagtagtacaggcttcttgccgatatgaagggaacttttcagaaagagacctactctgggtcatttaattttgaatacagttttcaatcgttcaagttttggatggtttatatctaatgtgtgtttcatttttttggaaagctatattttgtatttaggaaatggtatactattttgctatttgtactgagtgagtacattggcataaatatagaaatttatatatatacatatatataaactattcttttttgccacacatttttgtggtaaatttgtgagtttgtctgatgttctaccacaacgtggcgtctgataacagtgagggggggtggggtttgttatgtctttattgagtatttaagtatcttttgaaacaaatgacctgttcatctgtggccattccatcaggcagttagttccttgatgtcagtagtgggctaaaggcagcttactgtgtgtttgctggagctttcactcagccaagtgttagagtcaggaaacccattgaggcaatggcgtcaaatggtgtttcacaagaatgagccattcagtctttgctcactatatatttaatattttattattgttgttattgttattattaattggctttctgtattctatgccttttatttataaagacactaagaaaacccatgtttgtaattttaataacatttttcccatcttgtaatatccagagctactttataaattctctgaaccaaaagtattttcctcagtgtatctcttctcccccagcccctattgggaaaaattacccagtatagttcaggttatgaggaggatcagccacacaatccagtgcttcagtttgaaaatgtaaaattctaaccctaaagtagggttggttgaaatttcagacaaagcaaacccagcaggtataaaaagtagtataaatacaaatctgtaagttatttttgaattttctgaacttttttctaagagattacataggagactaaagaaatctatctgttcaagttctaattaggatgattgttaatactgcactgtggatgaagtggcgactggcttgtgtgctgacttctgtggtttagcaagaggtttattgttatcaaatgctaattggcaatgccaagtcactgggaccaattttctgttttataatatctaagtttagaacagaatatatacctgaactgtagtggtttgatcggatggagacagaaaacccgatttttattctcataaattttgtggttatttatacaagggctgtgctatgctaccatattcttgttcaataataataggtttgttgttttttttacattgttaaatgttccttacccctaaaggtcaatgttaagtacaacattctgaaaatacaatttggctacgaagagtattcatcttctttgaagctcagtggttgatatttgtgctaataatgcaatttcctgattactgttacaagttatagctacatatgggagagactcagtgagccagcaaaggccatagaaacaacaatttattaaatgtatttatggcagaaggacctaaataaactgtgagccaccttttcttctttatattgttacatttaagtgttcttgctttcagcaactcacattaatgcttggagcttatctctttctctctctctctctctctctctgtgtgtgtgtgtgtatgtgtgtgtgtgtgtgtgtgtgtttccttattgtcattccattatatatccacaccaacatgggtgacgataattcaaagtcatattttgcctctaagcttgatcatgttacctttatgattaaagtatcatgttatttagccaatgcaaatctgttttaaaacaaatagtttaaaaaaagaacaagtttttaagggctttattatagaagaagtattaatgaaggactttccttcctccctccctttcctcccctccctgcctcccttcttcccttccatctccccctcctccctgccttctttgtttctccttcccttattcctccctccctcctttctcccttccttcctttcttccattcatccttccttgccttttatttttattttttgtaatatcacatgtgctgtagtttggaattttattctagtgcatttcttgctcatcagaacctcagctaatctacctaggaaaaatagtatcaaaggaaatgagaaagttgtatctgagtccctccagaactaagataattctttttgaccatttaagcctttataaatgcgttttgaccatttaagcctttataaatgcttgttttaggaaagtgaatctgttagatgcatcaacaaataatgaccaggacaaaacgatttaataattaaagtctcaaatcaccatggttatacattttcaccagaaatagtaatcttacaatttttcatttttctgatgaagatttctgttccaatatctgtttcctaatagattttttaaattaattagctttcctctgctttatgaccacaggttttatccctaaccgagacagctgtcttatatctgcatgccttagactgtgtggagggactccatgaagaaagaccataggttagaaaaataactcatagtatataccctagtaagtgggttagtagaatctcataacatgtattaaaaagaggttttcttctctgcttgtttgtgtcactagagcaaaattgtagagataatgctcataatgcagtaaatatcagaataatatctacaatatcatttgtggatggtcccaggtcccagtgctctagttactttacttctttttttttttttgagatggagtcttgctctgtctctcaggctagagcagtgtgcgatctcagctcactgcagcctccacctcccaggttcaagcgattctcctgcctcagcctcccaagtagccaggattacaggcaccctccactaggcccggctaattttttttgtatttttttagtagagatggggttttgccatgttggccaggctggtttcgaactcctaacctccagtgatccacctgcctcggcgtcccaaagtgctaggattacaggcatgagccaccacatccggcctaattacttctttaatccccatttatttttatgccattctagcctcatttattaataaaattatgtttttactttctctttcaggaaattttttaaattaatattttatatctagatctaatgctatggaaaagtgcctttttatcatttataatttcatttttcactatttccaaaaacacataaacaaatagtttcagtaggtcccagcttttactttttccatttaaaccttcttttctccatttcttccctttggcttaagaataaaagaaaaggtacattgctagaattgtttctttgggagagggtaaaagattacagaattagactgttcagcctttatataaactaaatttgtcttcatctcaaccagctaatggtaggtcttatctgaatactcatgagaattttagcatctgtgaaactccatgcaccagatgtgtgtaaatttcaggaagaaagtgttgaaagcattttctctgatgttaattagatggaaataaatcactaaaacatagtttaggtaaagcctgattatgccacttttttttaactagacagggcaaagttgtttatgttagtgtacttcttgtctatcctcagttaatttacctagacaaaaagtgtcaaaggaaatgagaaaaaggttatatctgactccctccagacctaagataattccttttgatcagatacagtcagatggagtgccttggtttttgttaattttgcctctattccagctccttaccacagcggtggtgcttaaagaaaggatcatcagcaacaggtcaggatagttctacctttgggatagggctgctttccccgtgctagtatttctgtgactgttagtggcactgaggactgcaaacttttatgcaatattcttaataccctattgatattatgcactttaatcattccaaagaagccaagaatgctgtatagtgatgattccttcctaatgaattcatcttaactatttagaatgttatgtcccttttcttttggatagccaacttggtataaatgttatatggatttttctaaaatgactatataggacttaagactttgaaatgtaatttacttataaggggaaataattatgctttagcacatcattttagaaacgtcacattttagaaacattcagcttgctaacctacatgtttgggaattcattaaaaccagttgtctatatattttgtgccatgtatataagaacattacaatatatctttttctacatatgtagtatgtgcaaccagtggttctcagagtatggttctcagcccaccagctagtatcagtatcacctgggaactagttagaaatgtaaattctttggccccatcccagacatactgagtcagaaactctggaatagggcccccgcaatctgttttcacaagccctccaggtgattctgatgcacactttaaagtttaggaaccactgggctaagactctgttgagatatagagtttttcttccactcagactgatatagttatacattgttcttcatgtaaattcagcttaacctggttatctataatcttttattggcaaaagttaattctcagtactgcctatagagatacagtgtattttatgtacatacacaattagtctaattcttgataattcagttaatttagtttggcattttcctaccacttactaaaaggtttacattaaatgactgatttaaatatataggtgcaatgttctatgtttattttaattgttatgacatttaagtagctaatataattgaccggtgctaaagtctcctgtttatccataaaatgggtacattatgggcagtgtaatacaagctttcttttcattgcctagtactttaccagcagaccacagttttgccctggctagaccaaccctcagaacaaaatcatcattccttgtatttatatttgtatctgagatagtaaacaagatggctggccaggtcaacatggcaccttaacttatttttttaataggtaaaacttcttcaaaagtagcttgctttgtataagaactaagctatcagtatagatatagctatccttggagcttatgtttcagacaagaattatttactaaaataaataataaacaagataatgcattatacaatttgggcatttctcgtttctcaagtgtatgcatcatggtaaatataaactaaccacaagataggtagattgattcatttcattttaatctccttgtgtaattcagtacctccataattgttctaatcttcttcccactgtttacaaattaccagttaattaactcgtgaaagaaaaattcacatatcagaataaaaataaatgtatactcactttataaaaatcaccactgctgtctttccttaatactagcagtggaaatgtaagtggcttactctacaaattttggtgctggcaaatacataggcaaactgttgggagctgctctagttacattcctcccttcttattccctttttctcttcctcactttattgcataacatattcctgtacccaaagcattctaccacagttctatttgactcccacttgtaataactcctttaaaaaattccatgtttaaccatatgaccctgcttgcttactcatattctccctccctctccccttcctttctctctcttccagaagtcatttgcctggtttgaaatattttgtagggattgcttattatattattttagctgatgaacctcaggacaacgtctacacacacacacatacatacacgcacacaaaatctcagctgttgaagagtgggcttggaatcagacttctgtgtccagtaaaaaactcctgcactgaagtcattgtgacttgagtagttacagactgattccagtgaacttgatctaatttcttttgatctaatgaatgtgtctgcttaccttgtttccttttaattgataagctccaagtagttgctaattttttgacaactttaaatgagtttcattcacttcttttacttaatgttttaagtatagtaccaataatttcattaacctgttctcaagtggtttagctaccattctgccatttttaatttttatttaattttatttgcttgagcacactgatcaaccactgaactgccttcttccattgtcctgcaatgatataagggttacatttttgtgtatatggctttcatagttgggatttcagagcactgataccagatattttcagtttgttctctgggggaatttcatttgcatctatgtttttagctatctgtgataacttgttaaatattaaaaagatattttgcttctattggaacatttgtatactcgcaactatatttctgtaaacagctgcagtcaaaaataaaacactgaaagttaaaaaaaaaaaaaaaaaaaa

SEQ ID NO: 51 - DNA, 2733 bp, HOMO SAPIENS
gccttccatccctgctcctgcaccggtctgcatctcccagcagaaggcgcagccatgaatccgttattcggccccaacctcttcctcctgcagcaggagcagcagggcctggccgggccactgggggactcactgggaggcgaccacttcgccgggggaggagacttgcccccggcgcctctctcgccggccggccctgctgcctactcgccgcccgggccgggcccggccccgcctgccgccatggccctccgcaatgacctgggctccaacatcaacgtgctcaagaccctgaacctccggttccgctgcttcctggccaaggtgcatgagctggagcgccggaaccggctgttggagaagcaactgcagcaagcgctggaggagggtaagcagggccggcggggcctgggtcgtcgcgaccaggcagtgcagaccggcttcgtcagccccatccggcccctggggctgcagctgggcgcccggccggccgctgtctgcagcccttcggcgcgcgtgctgggctcgcccgcgcgctccccggccggccccctcgcgccctccgcggccagcctctcgtcgtcctccacctccacctccaccacctattcctcgtcggcccgcttcatgcccggcaccatctggtcgttctcgcacgcccgccggctcgggccgggactggagcccactctggtgcaagggcctggcttgtcgtgggtgcacccggatggggtgggcgtccagatcgacaccatcacgcccgagatccgcgctctctacaacgtgctggccaaagtgaagcgggagcgggacgagtacaagcggaggtgggaagaggagtacacggtgcggatccagctgcaagaccgtgtaaatgagctccaggaggaagcccaggaggctgatgcctgccaggaggagctggcactgaaggtggaacagttgaaggctgagctggtggtcttcaaggggctcatgagtaacaacctgtcggagctggacaccaagatccaggagaaagccatgaaggtggatatggacatctgccgccgcatcgacatcaccgccaagctctgcgatgtggctcagcagcgcaactgcgaggacatgatccagatgttccagaagaagctggtcccatccatgggggggcggaagcgggagcgcaaggctgccgtcgaggaggacacctccctgtcggagagtgaggggccccgccagcccgatggggatgaggaggagagcacagccctcagcatcaacgaggagatgcagcgcatgctcaaccagctgagggagtatgattttgaggacgactgtgacagcctgacttgggaggagactgaggagaccctgctgctttgggaggatttctcaggctatgccatggcagctgcagaggcccagggagagcagcaggaagatagcctggagaaggtgattaaagatacggagtccctgttcaaaacccgggagaaggagtatcaggagaccattgaccagatagagctggagttggccacggccaagaacgacatgaaccggcacctgcacgagtacatggagatgtgcagcatgaagcgcggcctggacgtgcagatggagacctgccgccggctcatcacccagtctggagaccgaaagtctcctgctttcactgcggtcccgcttagcgacccgccgccgccgccaagcgaggctgaggactccgatcgcgatgtctcatctgacagctccatgagatagagacctgcctcccccttgcacccgaggccctcgcagcagggagctcagcgaggcagagggtggggctgcacagaggggaacatcagctgcagctctgcaccaggccggtccctggggactggggcgctcctccctcaggctttctccctcagtcttggcttctccagggctctggggtgtctggagctaggcttggccctaccattctggggccatttccaccacagttggggctctcctgccttcacgcgtgggtgtctgctacttccccatctttaaaatgctgccagagcgattgcggcccctcaccttgtccacgtatcaggaatgtgaatgtgggacctttcctccatccctgttgtccggagccagctcactgtcttccacactggtgctaactggcccaggcactggagtggaatagaatgcagctggaggctacgcatggcctctgcagcacacgcagctggagagggcttctgtccctgtcagcggcagagggcgttggggctggccggggcaccttgtccctgctatggtccacgtgctcacgctgtccacctgccaggtggagtgtatgtggctgtggccctccctcgtggaggtgccgtgctttaaagaggccttagtgcccgggatgggcacagtgttttgaagggaggtgggagctcttgctctcctggtcactgcagaatgacagagaaggtgaagctccatgcatgtgtgcgcgggtgtatgtgcgctcagggtctctgtttaagtatcagctaaagatgtgcttcctccgtgtctgtcatacactgagaccaacaggctacagtgtccctgattcttggaaaagcctggagaagctggggagatgcggttcacaatgcctcggtataggaggctgtgttgagctgacattcaaatggattctttaataataatgaaactggcgagtatttattgtgcaaaaaaaaaaaaaaaaaaaaaaaaaaaaaaaaa

SEQ ID NO: 52 - DNA, 2384 bp, HOMO SAPIENS
gtgcgacacgcaatgggcgggacttccggcgtctcgtttggtattcactttcgcgactcaggtgaactaacctgcgagaagctggttgtgcgctgaggcgaccagcgccggaaggcacggtggcgactcacgctgttctcgccgctcagaggcgggtctgaggctcggtggcggcgcccagggtggcccgggccctttcctcggtcattgtctcccctccagctctactcacaggctccgatggcggcggccgccctgagggaccccgctcaggttcctgtggctgcagacttgcttacagaccatgaggagcagggctatgtgacctttgaggatgtggctgtctacttctcccaggaggaatggagattgcttgatgacgctcagaggctcctctaccgcaatgtgatgctggagaactttacacttctggcctctctgggacttgcatcttccaagacccatgaaataacccagctggagtcatgggaggagcccttcatgcctgcttgggaagttgtgacttcagccataccgagaggttgttggcatggagccgaggctgaggaggctcctgagcagattgcttctgtaggactgctcagttcaaacattcagcaacaccagaagcagcactgtggagagaaacccttaaaaagacaagagggcagggtcccagttttgaggagttgcaaagttcacctatcagagaagtccttgcaaagcagggaggttgggaaggccctcctgatcagctcaggtgttctcaagcaccaggtgactcacacaggagagaagtcacataggagctccaaaagtagggaggcctttcatgctggaaaaaggcattacaaatgcagtgaatgtgggaaagcctttggtcagaaatatttacttgttcagcaccagagactacatgctgggaaaaagacgtatgaatgcagtgaatgtgggaagttatttagagatatgtccaacctttttatacaccaaatagttcacactggagaaaggccttacgggtgtagtaactgtggaaaatcctttagccgtaatgctcacctcattgaacaccagagagttcacactggagaaaagccttttacatgcagtgaatgtggaaaagctttcaggcataattccacacttgttcagcatcacaaaatccacactggagtaaggccttatgagtgcagtgaatgtggaaaattgtttagtttcaactccagcctcatgaaacatcagagaattcacactggagaaagaccttataagtgcagtgaatgtggaaaattctatagccacaagtccaaccttatcaaacattggcgtgttcatactggagaaaggccttacaagtgcagcgactgtgggaaattttttacccaatgctcaagcctcatgcaacatcaaaaagttcacactggagaaaagccttttaagtgcaatgaatgtgggagattctttagagagaattccaccctagttagacatcagagggttcacactggagcaaagccttatgagtgcagggaatgtgggaaattttttagccaaagctcaaccctcatgcaacatcgaaaagttcacattggagaaaagccttttaagtgcaatgaatgtgggagattgtttagagagaattccagccttgttaaacatcagagggttcacactggagcaaagccttatgagtgcagggaatgtgggaagttttttcgccacaactccagtctttttaaacatcgaaggattcacactggagaaatgcagtgattgtgtgaaatcctttagccagcgtttcaacctcattcaacaccagaaagttcacagtggaaaaaatcttgaaggtaacagatggaaatccgttagccacacctccagtctcattcaacactggacagtttacaatgtggacaatgtagtgaatatggaaaaaggtttcagccaaaggcctaaccctattcaacaccagaaagtttacactggagaaaggccttagggtgacaggttatgtactgtctctgaatcaatatgacctcacttaaaacagaaactctgaggatggcctttatgagggagctggcaattgaacatcattcatctaaatatgcacactggaggcaagatgagaattcctgacagattgtccttcctgagaagacagccctctgccttggagctccagagagagggagccctgtattcttggctgtacccgtcgaatggagttttgatctcgctgagtttggagttgggggaggaaaggagtggtcttggttcaaatgtgactcacttttgctgttcttgtgaatgttagatcttctttaataaatatttatttcccatacacccttatgaccattaaaaaaaaaaaaaaaaaa

SEQ ID NO: 53 - DNA, 3247 bp, HOMO SAPIENS
gcacagccgctgacgcgtcgggaggcggagcctagggaagcaaattctcctggcggcctccgttcagacgcggcagctgtgacccacctgcctcctccgcagagcaatggcggtgtctgccgggtccgcgcggacctcgcccagctcagataaagtacagaaagacaaggctgaactgatctcagggcccaggcaggacagccgaatagggaaactcttgggttttgagtggacagatttgtccagttggcggaggctggtgaccctgctgaatcgaccaacggaccctgcaagcttagctgtctttcgttttctttttgggttcttgatggtgctagacattccccaggagcgggggctcagctctctggaccggaaataccttgatgggctggatgtgtgccgcttccccttgctggatgccctacgcccactgccacttgactggatgtatcttgtctacaccatcatgtttctgggggcactgggcatgatgctgggcctgtgctaccggataagctgtgtgttattcctgctgccatactggtatgtgtttctcctggacaagacatcatggaacaaccactcctatctgtatgggttgttggcctttcagctaacattcatggatgcaaaccactactggtctgtggacggtctgctgaatgcccataggaggaatgcccacgtgcccctttggaactatgcagtgctccgtggccagatcttcattgtgtacttcattgcgggtgtgaaaaagctggatgcagactgggttgaaggctattccatggaatatttgtcccggcactggctcttcagtcccttcaaactgctgttgtctgaggagctgactagcctgctggtcgtgcactggggtgggctgctgcttgacctctcagctggtttcctgctcttttttgatgtctcaagatccattggcctgttctttgtgtcctacttccactgcatgaattcccagcttttcagcattggtatgttctcctacgtcatgctggccagcagccctctcttctgctcccctgagtggcctcggaagctggtgtcctactgcccccgaaggttgcaacaactgttgcccctcaaggcagcccctcagcccagtgtttcctgtgtgtataagaggagccggggcaaaagtggccagaagccagggctgcgccatcagctgggagctgccttcaccctgctctacctcctggagcagctattcctgccctattctcattttctcacccagggctataacaactggacaaatgggctgtatggctattcctgggacatgatggtgcactcccgctcccaccagcacgtgaagatcacctaccgtgatggccgcactggcgaactgggctaccttaaccctggggtatttacacagagtcggcgatggaaggatcatgcagacatgctgaagcaatatgccacttgcctgagccgcctgcttcccaagtataatgtcactgagccccagatctactttgatatttgggtctccatcaatgaccgcttccagcagaggatttttgaccctcgtgtggacatcgtgcaggccgcttggtcaccctttcagcgcacatcctgggtgcaaccactcttgatggacctgtctccctggagggccaagttacaggaaatcaagagcagcctagacaaccacactgaggtggtcttcattgcagatttccctggactgcacttggagaattttgtgagtgaagacctgggcaacactagcatccagctgctgcagggggaagtgactgtggagcttgtggcagaacagaagaaccagactcttcgagagggagaaaaaatgcagttgcctgctggtgagtaccataaggtgtatacgacatcacctagcccttcttgctacatgtacgtctatgtcaacactacagagcttgcactggagcaagacctggcatatctgcaagaattaaaggaaaaggtggagaatggaagtgaaacagggcctctacccccagagctgcagcctctgttggaaggggaagtaaaagggggccctgagccaacacctctggttcagacctttcttagacgccaacaaaggctccaggagattgaacgccggcgaaatactcctttccatgagcgattcttccgcttcttgttgcgaaagctctatgtctttcgccgcagcttcctgatgacttgtatctcacttcgaaatctgatattaggccgtccttccctggagcagctggcccaggaggtgacttatgcaaacttgagaccctttgaggcagttggagaactgaatccctcaaacacggattcttcacattctaatcctcctgagtcaaatcctgatcctgtccactcagagttctgaagggggccagatgttgggtgcagatgtagaagcagccagtcacagacccattctatgcaatggacatttatttgaaaaaaattctcaaaagttttttttttttttttgggggggcggggttctaaagctgtttttaactccgagattacaacttagaggaaccaaggaaataaagcaaataagatttaacaacccaagattaagaggccaggaagaggttagacgcaatgtgaaactgtcctcctaggataaggtttaaagtggctttttgggggctgggtgccgtggctcacgcctgtaatcccagcattttgggaggctgaggtgggcagatcacttgaggccaggagttcgagaccagcctggccaacatggcaaaaccccttctctactaaaaatacaaaaattagccagacgtggtggtgggtgcctgtaatccaactacccaggaggctgaggcatgagaatcgcttgggcccaggaggtggaggttgcagtgagccgagatcgagccactgcactcctgggcaacagagcaagacttcgtctcaaaataaataaataaagtggctcttggggaaaagcaatttaatgtaccacgatgaatagctaactgttcccaagtgtttgctatgtgcaacacaccgcgtgagcagtgttacctgcattattacattaggctgagaggtaaaataatttgcccgaagacatacagctagtgacgaatggactgatggtttgaacttaacgtctatttgacttaaggtcctgcaccctgccacttgtaattttcagaatcactgataatctgaaataatgcagcttaaaacatgttttcttaattaaaagtataattggatggtg

SEQ ID NO: 54 - DNA, 3338 bp, HOMO SAPIENS
actgtcgctccggacacttcctcctgggccgccgccgccgccgccgacttaaactttggagggggaaaaagagctactggcgcctggcgaccctccctgccccccacccaaccccgctccggcaacgcccccttcctcacggctcccgaccgaacttttctccaacttctgcgactcgtgagattcccttctacccactccggccctcgggacccctctgcccatcccctggccggtcgggtccctgcgaacccctttatctctggaatccactcggtccccgactcagagactcctgccctccacccccaaggaccccgccatcctcaggtcccctccgcctgccagatcttttctcggatccccgctctcccaccacctgctcacgagatcccgcggatctagaacccagggtcccccggggccccccggccgggtcccgggtgggctccaggcggccggtccccggcctccccccatggccaccgccccctcttatcccgccgggctccctggctctcccgggccggggtctcctccgccccccggcggcctagagctgcagtcgccgccaccgctactgccccagatcccggccccgggttccggggtctcctttcacatccagatcgggctgacccgcgagttcgtgctgttgcccgccgcctccgagctggctcatgtgaagcagctggcctgttccatcgtggaccagaagttccctgagtgtggcttctacggcctttacgacaagatcctgcttttcaaacatgaccccacgtcggccaacctcctgcagctggtgcgctcgtccggagacatccaggagggcgacctggtggaggtggtgctgtcggcctcggccaccttcgaggacttccagatccgcccgcacgccctcacggtgcactcctatcgggcgcctgccttctgtgatcactgcggggagatgctcttcggcctagtgcgccagggcctcaagtgcgatggctgcgggctgaactaccacaagcgctgtgccttcagcatccccaacaactgtagtggggcccgcaaacggcgcctgtcatccacgtctctggccagtggccactcggtgcgcctcggcacctccgagtccctgccctgcacggctgaagagctgagccgtagcaccaccgaactcctgcctcgccgtcccccgtcatcctcttcctcctcttctgcctcatcgtatacgggccgccccattgagctggacaagatgctgctctccaaggtcaaggtgccgcacaccttcctcatccacagctatacacggcccaccgtttgccaggcttgcaagaaactcctcaagggcctcttccggcagggcctgcaatgcaaagactgcaagtttaactgtcacaaacgctgcgccacccgcgtccctaatgactgcctgggggaggcccttatcaatggagatgtgccgatggaggaggccaccgatttcagcgaggctgacaagagcgccctcatggatgagtcagaggactccggtgtcatccctggctcccactcagagaatgcgctccacgccagtgaggaggaggaaggcgagggaggcaaggcccagagctccctggggtacatccccctaatgagggtggtgcaatcggtgcgacacacgacgcggaaatccagcaccacgctgcgggagggttgggtggttcattacagcaacaaggacacgctgagaaagcggcactattggcgcctggactgcaagtgtatcacgctcttccagaacaacacgaccaacagatactataaggaaattccgctgtcagaaatcctcacggtggagtccgcccagaacttcagccttgtgccgccgggcaccaacccacactgctttgagatcgtcactgccaatgccacctacttcgtgggcgagatgcctggcgggactccgggtgggccaagtgggcagggggctgaggccgcccggggctgggagacagccatccgccaggccctgatgcccgtcatccttcaggacgcacccagcgccccaggccacgcgccccacagacaagcttctctgagcatctctgtgtccaacagtcagatccaagagaatgtggacattgccactgtctaccagatcttccctgacgaagtgctgggctcagggcagtttggagtggtctatggaggaaaacaccggaagacaggccgggacgtggcagttaaggtcattgacaaactgcgcttccctaccaagcaggagagccagctccggaatgaagtggccattctgcagagcctgcggcatcccgggatcgtgaacctggagtgcatgttcgagacgcctgagaaagtgtttgtggtgatggagaagctgcatggggacatgttggagatgatcctgtccagtgagaagggccggctgcctgagcgcctcaccaagttcctcatcacccagatcctggtggctttgagacaccttcacttcaagaacattgtccactgtgacttgaaaccagaaaacgtgttgctggcatcagcagacccatttcctcaggtgaagctgtgtgactttggctttgctcgcatcatcggcgagaagtcgttccgccgctcagtggtgggcacgccggcctacctggcacccgaggtgctgctcaaccagggctacaaccgctcgctggacatgtggtcagtgggcgtgatcatgtacgtcagcctcagcggcaccttccctttcaacgaggatgaggacatcaatgaccagatccagaacgccgccttcatgtacccggccagcccctggagccacatctcagctggagccattgacctcatcaacaacctgctgcaggtgaagatgcgcaaacgctacagcgtggacaaatctctcagccacccctggttacaggagtaccagacgtggctggacctccgagagctggaggggaagatgggagagcgatacatcacgcatgagagtgacgacgcgcgctgggagcagtttgcagcagagcatccgctgcctgggtctgggctgcccacggacagggatctcggtggggcctgtccaccacaggaccacgacatgcaggggctggcggagcgcatcagtgttctctgaggtcctgtgccctcgtccagctgctgccctccacagcggttcttcacaggatcccagcaatgaactgttctagggaaagtggcttcctgcccaaactggatgggacacgtggggagtggggtggggggagctatttccaaggcccctccctgtttccccagcaattaaaacggactcatctctggccccatggccttgatctcagcaaaaaaaaaaaaaaaaa

SEQ ID NO: 55 - DNA, 2495 bp, HOMO SAPIENS
gcaaatgcgtgctacgtcactgtgcgatcgggttgtgcttagcttggggtctcctggccccttgacgcgtcaggttgctgtacccctgcatcggatgcgctgtaccctgcgctggctccgtgaaccttagggacaacaccgggacacccgcgaggccggaaaatggactcagtggcttttgaggatgtgtctgtgagcttcagccaggaggagtgggctctgctggctccttcacagaagaaactctacagagatgtgatgcaggaaacattcaagaacctggcatctataggggaaaaatgggaagacccgaatgttgaagatcaacacaaaaaccaaggacgaaatctaagaagccatacgggagagagactctgtgaaggtaaagaaggtagtcaatgtgcagaaaacttcagtcccaatctcagtgtgacgaagaagactgccggagtaaaaccatatgagtgtactatctgtggaaaagccttcatgcgtctctcatcccttactagacacatgaggtctcacactggatacgagctatttgagaagccatataaatgtaaggagtgtgagaaagcctttagttatctcaaatcctttcaaagacatgaaaggagtcacactggagaaaaaccctataaatgtaaacaatgtggaaaaaccttcatatatcaccagccctttcaaagacatgagcggactcacattggagaaaaaccctatgaatgtaagcaatgtggaaaagctcttagttgttccagttcgcttcgagttcatgaaaggattcacactggagaaaagccctatgaatgtaaacaatgtgggaaagccttcagttgttccagttctattcgagtacacgaaagaactcacactggagagaaaccctatgcatgtaaggaatgtgggaaagccttcatttcccacacaagtgttctaacacacatgataacacacaacggagatagaccttataaatgcaaagaatgtggaaaggcattcatttttcccagttttttacgagtacatgaaagaattcacactggagagaaaccctataaatgtaaacaatgtggtaaagccttcagatgttccacctccattcaaattcatgaaagaattcatactggagagaagccctataaatgtaaagaatgtgggaaatctttcagtgcacgcccagcctttcgagtacacgtgagagtgcatactggagagaaaccctataagtgtaaagaatgtgggaaagcctttagtagaatcagttactttcgaatacatgaaaggactcacactggagagaaaccctacgaatgtaaaaaatgtgggaaaactttcaattatcctctagatttgaaaatccacaagagaaatcacactggagaaaaaccctatgagtgtaaggaatgtgcaaaaaccttcatttctcttgagaactttcgaagacacatgatcacccacactggagacggaccttataaatgtagggactgtgggaaggtgttcatttttcctagtgcgttacgaacacatgaaagaactcacactggagagaaaccctatgaatgtaaacaatgtggaaaagcctttagttgttctagttacattcggatacataaaagaactcacactggggagaaaccttatgaatgtaaggaatgcgggaaggcctttatttatcccacaagctttcaaggacacatgagaatgcatactggagagaaaccctataaatgtaaagaatgtgggaaggcctttagtcttcacagttcctttcaaagacatacaagaattcacaattatgagaaacctcttgaatgtaagcaatgtggaaaagccttcagtgtgtccacatccttaaaaaaacatatgagaatgcacaatcgatagaaactctataaatgtgagaaataggagaaagttttcaattctaacagatgctttcaaagttgtgaaaattcccactgaagagagaaatcctgtcaatgtaagtaatatagaaagcgagatacaagatgattcatgtatagtcaggtaccacataatcatgtttcagtcagcaatggaccatataggttggtagccccataagattatataacacctaaaacatttctatcaaccgcaatttagtagcagtagtaacaccatagtgcagcacattatttaagtgtttatggtgctggtgtaaacgtgctgcactttcagttgtataaaagtacaagacagcggccggggacggtggctcacgcctgtaatcccagcactttgggaggccaaggcgggcggatcacgaggccaggagatcaagaccatcctggctaacacggtaaaaccccatctctactaaaaatacaaacaattagccgggcgtggtggtgggcgcctgtagtcccagctacttgggaggctgaggcaggagaatggcataaacccaggaggccgagctgacagtgagctgagatccggccaacagagcgagactctgtctc

SEQ ID NO: 56 - DNA, 3369 bp, HOMO SAPIENS
atttatgcagagcaggagctgctgccattgccactcagaatcctcgcgcgctgctcggagccggagggagcgctgggagcgagcaagcgagcgtttggagcccgggccagcagagggggcgcccggtcgctgcctgtaccgctcccgctggtcatctccgccgcgctcgggggccccgggaggagcgagaccgagtcggagagtccgggagccaagccgggcgaaacccaactgcggaggacgcccgccccactcagcctcctcctgcgtccgagccggggagcatcgccgagcgccccacgggccggagagctgggagcacaggtcccggcagccccagggatggtctaggagccggcgtaaggctcgctgctctgctccctgccggggctagccgcctcctgccgatcgcccggggctgcgagctgcggcggcccggggctgctcgccgggcggcgcaggccggagaagttagttgtgcgcgcccttagtgcgcggaaccagccagcgagcgagggagcagcgaggcgccgggaccatgggctgggggagccgctgctgctgcccgggacgtttggacctgctgtgcgtgctggcgctgctcgggggctgcctgctccccgtgtgtcggacgcgcgtctacaccaaccactgggcagtcaaaatcgccgggggcttcccggaggccaaccgtatcgccagcaagtacggattcatcaacataggacagataggggccctgaaggactactaccacttctaccatagcaggacgattaaaaggtcagttatctcgagcagagggacccacagtttcatttcaatggaaccaaaggtggaatggatccaacagcaagtggtaaaaaagcggacaaagagggattatgacttcagtcgtgcccagtctacctatttcaatgatcccaagtggcccagcatgtggtatatgcactgcagtgacaatacacatccctgccagtctgacatgaatatcgaaggagcctggaagagaggctacacgggaaagaacattgtggtcactatcctggatgacggaattgagagaacccatccagatctgatgcaaaactacgatgctctggcaagttgcgacgtgaatgggaatgacttggacccaatgcctcgttatgatgcaagcaacgagaacaagcatgggactcgctgtgctggagaagtggcagccgctgcaaacaattcgcactgcacagtcggaattgctttcaacgccaagatcggaggagtgcgaatgctggacggagatgtcacggacatggttgaagcaaaatcagttagcttcaacccccagcacgtgcacatttacagcgccagctggggcccggatgatgatggcaagactgtggacggaccagcccccctcacccggcaagcctttgaaaacggcgttagaatggggcggagaggcctcggctctgtgtttgtttgggcatctggaaatggtggaaggagcaaagaccactgctcctgtgatggctacaccaacagcatctacaccatctccatcagcagcactgcagaaagcggaaagaaaccttggtacctggaagagtgttcatccacgctggccacaacctacagcagcggggagtcctacgataagaaaatcatcactacagatctgaggcagcgttgcacggacaaccacactgggacgtcagcctcagcccccatggctgcaggcatcattgcgctggccctggaagccaatccgtttctgacctggagagacgtacagcatgttattgtcaggacttcccgtgcgggacatttgaacgctaatgactggaaaaccaatgctgctggttttaaggtgagccatctttatggatttggactgatggacgcagaagccatggtgatggaggcagagaagtggaccaccgttccccggcagcacgtgtgtgtggagagcacagaccgacaaatcaagacaatccgccctaacagtgcagtgcgctccatctacaaagcttcaggctgctcggataaccccaaccgccatgtcaactacctggagcacgtcgttgtgcgcatcaccatcacccaccccaggagaggagacctggccatctacctgacctcgccctctggaactaggtctcagcttttggccaacaggctatttgatcactccatggaaggattcaaaaactgggagttcatgaccattcattgctggggagaaagagctgctggtgactgggtccttgaagtttatgatactccctctcagctaaggaactttaagactccaggtaaattgaaagaatggtctttggtcctctacggcacctccgtgcagccatattcaccaaccaatgaatttccgaaagtggaacggttccgctatagccgagttgaagaccccacagacgactatggcacagaggattatgcaggtccctgcgaccctgagtgcagtgaggttggctgtgacgggccaggaccagaccactgcaatgactgtttgcactactactacaagctgaaaaacaataccaggatctgtgtctccagctgcccccctggccactaccacgccgacaagaagcgctgcaggaagtgtgcccccaactgtgagtcctgctttgggagccatggtgaccaatgcatgtcctgcaaatatggatactttctgaatgaagaaaccaacagctgtgttactcactgccctgatgggtcatatcaggataccaagaaaaatctttgccggaaatgcagtgaaaactgcaagacatgtactgaattccataactgtacagaatgtagggatgggttaagcctgcagggatcccggtgctctgtctcctgtgaagatggacggtatttcaacggccaggactgccagccctgccaccgcttctgcgccacttgtgctggggcaggagctgatgggtgcattaactgcacagagggctacttcatggaggatgggagatgcgtgcagagctgtagtatcagctattactttgaccactcttcagagaatggatacaaatcctgcaaaaaatgtgatatcagttgtttgacgtgcaatggcccaggattcaagaactgtacaagctgccctagtgggtatctcttagacttaggaatgtgtcaaatgggagccatttgcaaggatgcaacggaagagtcctgggcggaaggaggcttctgtatgcttgtgaaaaagaacaatctgtgccaacggaaggttcttcaacaactttgctgcaaaacatgtacatttcaaggctgagcagccatcttagatttctttgttcctgtagacttatagattattccatattattaaaaagaaaaaagccaaaaagaaaaaaaaaaaaa

SEQ ID NO: 57 - DNA, 521 bp, HOMO SAPIENS
gtgctagtgttttcacagtttctatctaacttacaaaataactgaaagaggaagaaaaatattctattccatatgtattagaaaactatcctttaagttctaaagttggcttatgatctcctgaattgcacaatatttatctgcaaaccttgaaactatttaatcagagacttctgaccccaaaatgccaacattactcttggtggtctttcaaggtaattcccccttgtttttagtgtatccattgaaacactaaatggaaatatttagtgccctgatgctaagggaatattccaactagcggcactgattccactccaggttattaattaaacagtagcaatcagcccatctgatctttaatattctattgctgctgactgatgcccagacatcagacattttgtaatctaatacaaaattgctctgtgcttaggactaaagaaaaacaacacataatttatactatgttttatctttattttcaagttccagaggatacgctggttgtgtctttcaat

SEQ ID NO: 58 - DNA, 7498 bp, HOMO SAPIENS
gagcagccgccgaagagcgcttggcgccattttgaagcggagaggaggaggaacggcagggctggctgcggaaggggagggggggggagaaggcgattggatgcggcggcggcggcggatcccggagagccccggagtgagcggagtagcgagtcggcaacccggaggggtagaaatatttctgtcatggctcattcaaagactaggaccaatgatggaaaaattacatatccgcctggggtcaaggaaatatcagataaaatatctaaagaggagatggtgagacgattaaagatggttgtgaaaacttttatggatatggaccaggactctgaagaagaaaaggagctttatttaaacctagctttacatcttgcttcagatttttttctcaagcatcctgataaagatgttcgcttactggtagcctgctgccttgctgatattttcaggatttatgctcctgaagctccttacacatcccctgataaactaaaggatatatttatgtttataacaagacagttgaaggggctagaggatacaaagagcccacaattcaataggtatttttatttacttgagaacattgcttgggtcaagtcatataacatatgctttgagttagaagatagcaatgaaattttcacccagctatacagaaccttattttcagttataaacaatggccacaatcagaaagtccatatgcacatggtagaccttatgagctctattatttgtgaaggtgatacagtgtctcaggagcttttggatacggttttagtaaatctggtacctgctcataagaatttaaacaagcaagcatatgatttggcaaaggctttactgaagaggacagctcaagctattgagccatatattaccaatttttttaatcaggttctgatgcttgggaaaacatctatcagcgatttgtcagagcatgtctttgacttaattttggagctctacaatattgatagtcatttgctgctctctgttttaccccagcttgaatttaaattaaagagcaatgataatgaggagcgcctacaagttgttaaactactggcaaaaatgtttggggcaaaggattcagaattggcttctcaaaacaagccactttggcagtgctacttgggcaggtttaatgatatccatgtaccaatccgcctggaatgtgtgaaatttgctagccattgtctcatgaaccatcctgatttagcaaaagacttaacagagtatcttaaagtgaggtcacatgaccctgaggaagctattagacatgatgttattgtgtcaatagttacagctgctaaaaaggatattcttctggtcaatgatcacttacttaattttgtgagagagagaacattagacaaacgatggagagtacgcaaagaagccatgatgggacttgcccaaatttataagaaatatgctttacagtcagcagctggaaaagatgctgcaaaacagatagcatggatcaaagacaaattgctacatatatattatcaaaatagtattgatgatcgactacttgttgaacggatctttgctcaatacatggttcctcacaatttagaaactacagaacggatgaaatgcttatattacttgtatgccacactggatttaaatgctgtgaaagcattgaatgaaatgtggaaatgtcaaaatctgctccgacatcaagtaaaggatttgcttgacttgattaagcaacccaaaacagatgccagtgtcaaggccatattttcaaaagtgatggttattacaagaaatttacctgatcctggtaaggctcaggatttcatgaagaaattcacacaggtgttagaagatgatgagaaaataagaaagcagttagaagtacttgttagtccaacatgctcctgcaagcaggctgaaggttgtgtgcgtgaaataactaagaagttgggcaaccccaaacagcctacaaatcctttcctggaaatgatcaagtttctcttggagaggatagcacctgtgcacatagataccgaatctatcagtgctcttattaaacaagtgaacaaatcaatagatggaacagcagatgatgaagatgagggtgttccaactgatcaagccatcagagcaggtcttgaactgcttaaggtactctcatttacacatcccatctcatttcattctgctgaaacatttgaatcattactggcttgtctgaaaatggatgatgaaaaagtagcagaagctgcactacaaattttcaaaaacacaggaagcaaaattgaagaggattttccacacatcagatcagccttgcttcctgttttacatcacaaatctaaaaaaggacccccccgtcaagccaaatatgccattcattgtatccatgcgatattttctagtaaagagacccagtttgcacagatatttgagcctctgcataagagcctagatccaagcaacctggaacatctcataacaccattggttactattggtcatattgctctccttgcacctgatcaatttgctgctcctttgaaatctttggtagctactttcattgtgaaagatcttctcatgaatgatcggcttccagggaaaaagacaactaaactttgggttccagatgaagaagtatctcctgagacaatggtcaaaattcaggctattaaaatgatggttcgatggctacttggaatgaaaaataatcacagtaaatcaggaacttctaccttaagattgctaacaacaatattgcatagtgatggagacttgacagaacaggggaaaattagtaaaccagatatgtcacgtctgagacttgctgctgggagtgctattgtgaagctggcacaagaaccctgttaccatgaaatcatcacattagaacaatatcagctatgtgcattagctatcaacgatgaatgctatcaagtaagacaagtgtttgcccagaaacttcacaaaggcctttcccgtttacggcttccacttgagtatatggcaatctgtgccctttgtgcaaaagatcctgtaaaggagagaagagctcatgctaggcaatgtttggtgaaaaatataaatgtaaggcgggagtatctgaagcagcatgcagctgttagtgaaaaattattgtctcttctaccagagtatgttgttccatatacaattcaccttttggcacatgacccagattatgtcaaagtacaggatattgaacaacttaaagatgttaaagaatgtctttggtttgttctggaaatattaatggctaaaaatgaaaataacagtcacgcttttatcagaaagatggtagaaaatattaaacaaacaaaagatgcccaaggaccagatgatgcaaaaatgaatgaaaaactgtacactgtgtgtgatgttgccatgaatatcatcatgtcaaagagtactacatacagtttggaatctcctaaagacccggtactaccagctcgtttcttcactcaacctgacaagaatttcagtaacaccaaaaattatctgcctcctgaaatgaaatcatttttcactcctggaaaacctaaaacaaccaatgttctaggagctgttaacaagccactttcatcagcaggcaagcaatctcagaccaaatcatcacgaatggaaactgtaagcaatgcaagcagcagctcaaatccaagctctcctggaagaataaaggggaggcttgatagttctgaaatggatcacagtgaaaatgaagattacacaatgtcttcacctttgccggggaaaaaaagtgacaagagagacgactctgatcttgtaaggtctgaattggagaagcctagaggcaggaaaaaaacgcccgtcacagaacaggaggagaaattaggtatggatgacttgactaagttggtacaggaacagaaacctaaaggcagtcagcgaagtcggaaaagaggccatacggcttcagaatctgatgaacagcagtggcctgaggaaaagaggctcaaagaagatatattagaaaatgaagatgaacagaatagtccgccaaaaaagggtaaaagaggccgaccaccaaaacctcttggtggaggtacaccaaaagaagagccaacaatgaaaacttctaaaaaaggaagcaaaaaaaaatctggacctccagcaccagaggaggaggaagaagaagaaagacaaagtggaaatacggaacagaagtccaaaagcaaacagcaccgagtgtcaaggagagcacagcagagagcagaatctcctgaatctagtgcaattgaatccacacagtccacaccacagaaaggacgaggaagaccatcaaaaacgccatcaccatcacaaccaaaaaaaaatgtccgtgtaggacgctccaaacaagcagctactaaggaaaatgattcaagtgaagaagtagatgtgtttcagggtagctctcctgtcgatgatattccacaggaagaaacagaggaggaggaagtttctacagtaaatgtacggcggcgaagtgctaaaagggaacggcgatgaacaaatgtaattaataactttctctgtgaaagctttggaaaaatctttttttttttttttggtcaagcttgaggctgaataaagcctttgatgcacaaaatgggactgctgaagagtggacagttggaccttactttggtgaccccatacatttgtggtcacatgctttagccatacacatggtaacattgactatggagtcttgtgaaagtgtaatgtgcgatggctatgtagacataaagaagaaacttgtaaatatcttttttcttttttttaatgtttctgatttctgaagtgcttgtatagcttttatctgcggctttaaactgacagtacccgactgtttattggatctattgatttgaaaagaatttgttaggatagatcttaagcagtaatctgtcagtgtttgtatttgtattctctgcaattttactgtgaaaaaaaatttgttttcaacaattggtgtcattttcttgatgtcactatttgttggagagttaaatggtctcttccctttgtgtatcttacctagtgtttactcctgggcacccttaatcttcagaggtgctaaattgtctgccattacaccagaaggatgcctctgataggaggacaaccatgcaaattgtgaaatagtcctgaagttcttggattactttacacctcagtattgatttgtcccagaattttctggcctttcatggcaatgaaaattttaagaagaaagatttaaagtattttaattttaaagagtgtgttataaaataatgtactgaattctttatcccattttatcatcctttcagtttttattaatctactgtatcaataaaattctgtaatttgaatgagtttttaatagtctagaatgttattgtgtatagatatttcctcttgaacgttatgttcagaaaatgcaaattacactataatataaaacctgatatatacacattagaaatattccagttctccgtaacagtgtaaagttaatcagaaagaaaaaattttattgatgcagtgtgtctttataaagctgttcttgaaagccaagtgttttgtattttatagtgagttgcatgtttttgaaaaaaagtgctgaaaatgggatgtgctgttttctgtaaattcatatttagccatagtatatgatagattgccccataacatagtttttcatcaagagtttattattgtactttattttggagccaaaaaattgattctggggggtgggggcagcgtagaagtggtatatccaagtatatcagctactgtagttgtcacagtcttgtgaactttgaatgaaattccactttgtccagattgggagaagtggaaatttatttggatttagagcaggtctttttttttcttcattgtaatctgcaaaatgtagaaataaattacttaaggcagtatcctttatacagttgtataaactgtattttgaaccaaaacatataggttactacttaatgcttacctaatttcattttagtattttaggtgctgttatgttttttcatggttaacaccagaggggaaaaaatcatattctaacttattaaatttatcacattgaatagtggaacattttcatatgatacaccattatgtttaagatatatttccaagattggttataatagatggggcatataataaagaagctactattttggaaaatgacattttactatttgccaatgtatattgcaattgatgtgattatttttcttttaaagatttgtttgtgtttatgaaacagccatttattttttaaaaagtgttttgaattgtgtcttaatctctccatattcaactattcttcatttacaacaatagtgacaccagtaattatgagaggctgtcatatatcaaagcagctcaggtgggatcaacatacattggttttgaaatgtttccttagctcggttctcccaaacacataatttctgtttcagcagtacaaaggcatgttttaaaatctataacataaagaataaggaatagctttgtatttttgtcattgattaaattgcaccagaaatgtttatggaaatattaagaacattttataaaacatacgaaaaagtgattgtgaaggatttttatttgcatgattatagttaagcaaatttcatttcacatttttgtaatgctgtacagcagttcacaaaaaaatgttcattgtagattttgttatgttcaatgccaatgagtctgtaattttacgacctgtctgttctttttttgggtggattacgatgtaaatttttcttttctttctttctttttttttttttttgtgtagaaaaataggtgcaataatgatcaaagttttgatgtcttgagtctccatcttaggggattatcttacgtttaagcttaacatttcatgtagtaagatttggagagccacatactttacagtaaaattaagtgtgtataaaacattaattgctaacaattgttagcaaactatttcagtgataatgttcattttgaaaatatgtactgtataacattaagaaaatatttaactccctgtaacaagttccattatgaaaatcttattcctcagtgaggttatcttgctgcactctgtagcaaatttgtttaatctacattataataaaatttcttgctgcagtgcaacaggaggctttttcagtgatcttcactgtatatgtaaattacaaatgtggctgtaaaacttattccaggtattaaaggttaaattgctttctatatcttcttataacttgtaagtctgatttttaagatttccttttgtccacttgtaagaatgtcaggaatttaagaatttgtttaaattaggcatatctctgccatcacatagtattatgtcaccataatgaacaattgctatttaaatagataaccaattttcagacacatttttggatttctgtgaagttgaataaacataaaagctaat

SEQ ID NO: 59 - DNA, 290 bp, HOMO SAPIENS
gaaaatatgctcaatctcacttacaattaaagaaatgcaaaccacattatcatgtgtcaccaactagacagacaaagatgaaaaagtcggctaacagtgttggcaacggcacggggaaataaggtctccacaccccactggttagagcagaaggggcacagcctcttcaggagaactggcaatagctatggaagcttaaagcaaagcctttgagccagctgctccatttctagaaattgatcgcaacaaacacacaggtgtaggtagaaggatgttcattccaagaaaat

SEQ ID NO: 60 - DNA, 651 bp, HOMO SAPIENS
gacggaaggagcggcggcgacggaggaggaggatggaggcggtggtgttcgtcttctctctcctcgattgttgcgcgctcatcttcctctcggtctacttcataattacattgtctgatttagaatgtgattacattaatgctagatcatgttgctcaaaattaaacaagtgggtaattccagaattgattggccataccattgtcactgtattactgctcatgtcattgcactggttcatcttccttctcaacttacctgttgccacttggaatatatatcgatacattatggtgccgagtggtaacatgggagtgtttgatccaacagaaatacacaatcgagggcagctgaagtcacacatgaaagaagccatgatcaagcttggtttccacttgctctgcttcttcatgtatctttatagtatgatcttagctttgataaatgactgaagctggagaagccgtggttgaagtcagcctacactacagtgcacagttgaggagccagagacttcttaaatcatccttagaaccgtgaccatagcagtatatattttcctcttggaacaaaaaactatttttgctgtatttttaccatataaagtatttaaaaaacaggaaaaaaaaaaaaaaaaaaaaaaaaaaaaaa

SEQ ID NO: 61 - DNA, 3597 bp, HOMO SAPIENS
ggcgcgggcagggagcggctggctgtcagctgagccgcgctgggcggggtcgccaggccgcgcatcagccctaggcaccccagtcccggctgccccctccgccaccgccgccgcccgccggcaggttccctggtcagcgtcccatcccggtcgggagttctctccaggcggcacgatgccgaggaaacagtgaccctgagcgaagccaagccgggcggcaggtgtggctttgatagctggtggtgccacttcctggccttggatgagccgtacgcctctgtaaacccaacttcctcacctttgaaacagctgcctggttcagcattaatgaagattagtcagtgacaggcctggtgtgctgagtccgcacatagaagaatcaaaaatgtccaaaatgtaactggagagaaagtgggcaacttttggagtgacttttccacaggaacttctgcaatgtcccatcaacctctcagctgcctcactgaaaaggaggacagccccagtgaaagcacaggaaatggacccccccacctggcccacccaaacctggacacgtttaccccggaggagctgctgcagcagatgaaagagctcctgaccgagaaccaccagctgaaagaagccatgaagctaaataatcaagccatgaaagggagatttgaggagctttcggcctggacagagaaacagaaggaagaacgccagttttttgagatacagagcaaagaagcaaaagagcgtctaatggccttgagtcatgagaatgagaaattgaaggaagagcttggaaaactaaaagggaaatcagaaaggtcatctgaggaccccactgatgactccaggcttcccagggccgaagcggagcaggaaaaggaccagctcaggacccaggtggtgaggctacaagcagagaaggcagacctgttgggcatcgtgtctgaactgcagctcaagctgaactccagcggctcctcagaagattcctttgttgaaattaggatggctgaaggagaagcagaagggtcagtaaaagaaatcaagcatagtcctgggcccacgagaacagtctccactggcacggcattgtctaaatataggagcagatctgcagatggggccaagaattacttcgaacatgaggagttaactgtgagccagctcctgctgtgcctaagggaagggaatcagaaggtggagagacttgaagttgcactcaaggaggccaaagaaagagtttcagattttgaaaagaaaacaagtaatcgttctgagattgaaacccagacagaggggagcacagagaaagagaatgatgaagagaaaggcccggagactgttggaagcgaagtggaagcactgaacctccaggtgacatctctgtttaaggagcttcaagaggctcatacaaaactcagcgaagctgagctaatgaagaagagacttcaagaaaagtgtcaggcccttgaaaggaaaaattctgcaattccatcagagttgaatgaaaagcaagagcttgtttatactaacaaaaagttagagctacaagtggaaagcatgctatcagaaatcaaaatggaacaggctaaaacagaggatgaaaagtccaaattaactgtgctacagatgacacacaacaagcttcttcaagaacataataatgcattgaaaacaattgaggaactaacaagaaaagagtcagaaaaagtggacagggcagtgctgaaggaactgagtgaaaaactggaactggcagagaaggctctggcttccaaacagctgcaaatggatgaaatgaagcaaaccattgccaagcaggaagaggacctggaaaccatgaccatcctcagggctcagatggaagtttactgttctgattttcatgctgaaagagcagcgagagagaaaattcatgaggaaaaggagcaactggcattgcagctggcagttctgctgaaagagaatgatgctttcgaagacggaggcaggcagtccttgatggagatgcagagtcgtcatggggcgagaacaagtgactctgaccagcaggcttaccttgttcaaagaggagctgaggacagggactggcggcaacagcggaatattccgattcattcctgccccaagtgtggagaggttctgcctgacatagacacgttacagattcacgtgatggattgcatcatttaagtgttgatgtatcacctccccaaaactgttggtaaatgtcagattttttcctccaagagttgtgcttttgtgttatttgttttcactcaaatattttgcctcattattcttgttttaaaagaaagaaaacaggccgggcacagtggctcatgcctgtaatcccagcactttgggaggtcgaggtgggtggatcacttggggtcagggtttgagaccagcctggccaacatggcggaaccctgtctctaccaaaattacaaaaattagccgagcatggtggcgcatgcctgtagtcgcagctactcgcgaggttgaggcaggagaattgcttgaacccaggaagtggcagttgcagtgagccgagacgacaccactgcactccagcctgggtgacagagggagactctgtctcgaaagaaagaaagaaaaaaaggaaggaaggagaaggaaggaaggagaagaaaaggtacctgttctacgtagaacacctttggtggagttccatcaactcgcaaagtagaatccttacctactactcttctgataataattttaatattttttatgtttggttgatgcgagcagctgcactgctcatgcagttagctagcatgtgacatcatgtgacaaagttcatgtaattagatggaagaaacctcactgattaattttaagaaccttttagggatgcaggaacaatgaagtggccacagtatgtgctgtttttgaagcatttttaaaaacgaattgtagttgtttttcttcatttaaaatggatctgttggaggttatgtgtgtatgttgtagttttattgcagccacaataattttaccaaagttttcacataggcagttagcctttacttaatatcaagacaagtgaaaaaatattggcatcgatgaaaccgataacattggcctcattggatttctttacccattcacagtgtaaagaagttaccttcatgctttcattgtacctgcaggcctgtgggcttgtacagtagataattaatttctaaaaagaacagctgcctattttcttcctaggttaggttatatcttcataatcacaagaattagtgatggcaaaataaaattttgcttatgaatcttttacattgtttatatatgattaatatcatcatatatattttctgtattaagctcatttggcttcatttaagctgtatacttagtcatatatctttcattagttctatggatatgagcagatccctttactggagcccagtatgtgctgtgtgagttagaagtcattcttgctgagaaggtgaataggtagggatttgccttgttttgtaagtctacaatttgccaagagtaaataacactggaccagctgtaaaagtaaacagtgtgtttatgcattgagatactaaagcattt

SEQ ID NO: 62 - DNA, 1943 bp, HOMO SAPIENS
gtagctgccgctgcggccgccgcggaataataagccgggtacagtggctggggtcagggtcgtgtctaggggacggccgagggcctcggagggcgagtattgaggaacggggtcctctaagaaggccggactggaggatctaccatacccattgactaactatggaagattataccaaaatagagaaaattggagaaggtacctatggagttgtgtataagggtagacacaaaactacaggtcaagtggtagccatgaaaaaaatcagactagaaagtgaagaggaaggggttcctagtactgcaattcgggaaatttctctattaaaggaacttcgtcatccaaatatagtcagtcttcaggatgtgcttatgcaggattccaggttatatctcatctttgagtttctttccatggatctgaagaaatacttggattctatccctcctggtcagtacatggattcttcacttgttaagagttatttataccaaatcctacaggggattgtgttttgtcactctagaagagttcttcacagagacttaaaacctcaaaatctcttgattgatgacaaaggaacaattaaactggctgattttggccttgccagagcttttggaatacctatcagagtatatacacatgaggcaataacactctggtacagatctccagaagtattgctggggtcagctcgttactcaactccagttgacatttggagtataggcaccatatttgctgaactagcaactaagaaaccacttttccatggggattcagaaattgatcaactcttcaggattttcagagctttgggcactcccaataatgaagtgtggccagaagtggaatctttacaggactataagaatacatttcccaaatggaaaccaggaagcctagcatcccatgtcaaaaacttggatgaaaatggcttggatttgctctcgaaaatgttaatctatgatccagccaaacgaatttctggcaaaatggcactgaatcatccatattttaatgatttggacaatcagattaagaagatgtagctttctgacaaaaagtttccatatgttatatcaacagatagttgtgtttttattgttaactcttgtctatttttgtcttatatatatttctttgttatcaaacttcagctgtacttcgtcttctaatttcaaaaatataacttaaaaatgtaaatattctatatgaatttaaatataattctgtaaatgtgtgtaggtctcactgtaacaactatttgttactataataaaactataatattgatgtcaggaatcaggaaaaaatttgagttggcttaaatcatctcagtccttatggcagttttattttcctgtagttggaactactaaaatttaggaaaatgctaagttcaagtttcgtaatgctttgaagtatttttatgctctgaatgtttaaatgttctcatcagtttcttgccatgttgttaactatacaacctggctaaagatgaatatttttctactggtattttaatttttgacctaaatgtttaagcattcggaatgagaaaactatacagatttgagaaatgatgctaaatttataggagttttcagtaacttaaaaagctaacatgagagcatgccaaaatttgctaagtcttacaaagatcaagggctgtccgcaacagggaagaacagttttgaaaatttatgaactatcttatttttaggtaggttttgaaagctttttgtctaagtgaattcttatgccttggtcagagtaataactgaaggagttgcttatcttggctttcgagtctgagtttaaaactacacattttgacatagtgtttattagcagccatctaaaaaggctctaatgtatatttaactaaaattactagctttgggaattaaactgtttaacaaataaaaaaaaaaaaa

SEQ ID NO: 63 - DNA, 1339 bp, HOMO SAPIENS
tcttcattacagatgtgcagcaccatgagggccctggtgcttctgctgtccctgttcctgctgggtggccaggcccagcatgtgtctgactggacctactcagaaggggcactggacgaagcgcactggccacagcactaccccgcctgtgggggccagagacagtcgcctatcaacctacagaggacgaaggtgcggtacaacccctccttgaaggggctcaatatgacaggctatgagacccaggcaggggagttccccatggtcaacaatggccacacagtgcagatcagcctgccctccaccatgcgcatgacagtggctgacggcactgtatacatagcccagcagatgcactttcactggggaggtgcgtcctcggagatcagcggctctgagcacaccgtggacgggatcagacatgtgatcgagattcacattgttcactacaattctaaatacaagagctatgatatagcccaagatgcgccggatggtttggctgtactggcagccttcgttgaggtgaagaattaccctgaaaacacttattacagcaacttcatttctcatctggccaacatcaagtacccaggacaaagaacaaccctgactggccttgacgttcaggacatgctgcccaggaacctccagcactactacacctaccatggctcactcaccacgcctccctgcactgagaacgtccactggtttgtgctggcagattttgtcaagctctccaggacacaggtttggaagctggagaattccttactggatcaccgcaacaagaccatccacaacgattaccgcaggacccagcccctgaaccacagagtggtggaatccaacttcccgaatcaggaatacactctaggctctgaattccagttttacctacataagattgaggaaattcttgactacttaagaagagcattgaactgaggaaagctaagaggaagattcaatattaactagcttgaagcctgacctagccagaagtgcctgtccgctgcagccgcaccctaccttgtctaagaaaccatgtgtgtctggaacacgctgctccccctggggcagctgttgggattctgattaaaagaggggaaacgatcatcctggacaggaagtgagatggcttcagttcatgagacgggatctgagttagacatcaccagtggaaattgattggaatagaaacttaaaggaaatggaaccctaactattctcccatcaaatcatatatgttgacctgtctgaattataaaccagcctgacctttcctttagcattagatgtaataaaataactttggaaatttgtcatttaaaaa

SEQ ID NO: 64 - DNA, 516 bp, HOMO SAPIENS
caacctgtcctgttttgtcagttcccagcttcttcgtttagaataaattagaccaaaagaagaaacgtgcttgtctctgtatacccgcagaatgaagttactgttgttaaaactggattttttcattttactaggttccgaagagtccagatgcttggtagatgttcaatacgtgattttttttttaattgaatgtgttcatttaaaatcctccttaacatttctagaaagacttctttcaataaataatggaatcttagaggaaaagtggttttttaaaagctagggaactcctccactaaaagtaaccattggaaacctcgaatgagggctaaagttttaatcataagagaaaaggcagcataatgaaatgtgtacacatacatagtcagtggtccattttaggaagccagtggcgtctgataaagaaatgttaagagtagtgaggttgaggaaggaaattgtggggatttgaaatattctctttatgttgtttctcttctgagtcatggtaaa

SEQ ID NO: 65 - DNA, 2220 bp, HOMO SAPIENS
aaccggaaggggggctgtgaggacgtgttccgaggaagccagagccggagccgtggcctgcggggccggcgacatggatcccctgttccagcaaacgcacaagcaggtccacgagatccagtcttgcatgggacgcctggagacggcagacaagcagtctgtgcacatagtagaaaacgaaatccaagcaagcatagaccagatattcagccgtctagaacgtctggagattttgtccagcaaggagccccctaacaaaaggcaaaatgccagacttcgggttgaccagttaaagtatgatgtccagcacctgcagactgcgctcagaaacttccagcatcggcgccatgcaagggagcagcaggagagacagcgagaagagcttctgtctcgaaccttcaccactaacgactctgacaccaccataccaatggacgaatcactgcagtttaactcctccctccagaaagttcacaacggcatggatgacctcattttagatgggcacaatattttagatggactgaggacccagagactgaccttgaaggtggggtccctgctgggggacagagagaaggcctcttgttttagcctcatccaacagtttagtaactgtgtttatattttgattacgtgtcctcaaattgtgatattttgatgacaagacagagcccttgagtttgggatcctttctgttggagttgagttattgtgagcctgaaagtacccagttcctttgccagtgcttgaaacaaaccatgaagtggcctctcttaggatccaggtcttttcccatttactgaacttatcatgaaagtgagtgctactacgaggggtccaatcacaggctgagaaattgtgttacagaatctactcttggaagaatgaagacgtggctgtcctttggtacctcgctttaaggtggctttcccttaggacccctactgtggactgccttataactaaaaccttttgtattttagtaactgaatccccactgtgcagtgttagggctgcctggttgtttgcagtagattagagctttagaagcttctagagcttctaaagcccgtgctggtgatcccagcgactcttcactccctagccttaggtattcctagaagccctgaccagttggcactgctgagactccagcccctgggagtggtttacagaaacattacacagactctgatgtcagtcatgatgtttcagcctctgcccttttcctgtatcaaccctgatggataatagggcgtgggttctgtctgttatcagggtgtggtcccctgtgaatgaagcactcccagccactgagctgtgagaaacagtcactcggaagtgtgagctttatcttagtttttgttggatcatgttgagtctgtcagctccacaggacttcagtacgtttctgaacagtccctgccatctctacgggggagagggtcaggcaagctgcaagtgacactcacctcctgctgacagttgcagtgtctcagatggcctggaagggtggtctccagcagcctgctgggcgctcccctttcatgagagccacctgcagtgacctgaactgatacatgttgattagtctgccctttctttagaaaactgctactctccttttcatatctcagaaaaacagtagaggccttttaggaccaaactccatgtcacactgatgaagagccagtgggggttagagcgtcctgttaaggcacatgctaacttcccactcaagtctggcagcgctggggcatcagcacacctcttgccacccacactgataccagaggggaaggctgtgaggtggctgggggttgagacttgaggtttctaactttcctctgcacacctgtggctacctggtgtttgtctcttgattccctccacctgcctcacaccctgcctccgtcgggattttccacctacaccattcaaaaggaacataggagagggcatgaaggggctaggctgaagcactctgatgactggggccaatttgtggctgaaaatgaatacattttttgaaatttatggtcattttcaagtgatttagaaggttgatccttagcctcatacagtgatgaaataatctgtgtgttcagagccaagcaggactttagcaagagtctgattgtattgtcactatctcggggaaaaaaaaatacaaatacatttctctgatctctgatggcaatgaagtttgacttgtaa

SEQ ID NO: 66 - DNA, 2277 bp, HOMO SAPIENS
ggcggggcgcgcgcggcggccgttgagggaccgttggggcgggaggcggcggcggcggcggcgcgcgctgcgggcagtgagtgtggaggcgcggacgcgcggcggagctggaactgctgcagctgctgccgccgccggaggaaccttgatccccgtgctccggacaccccgggcctcgccatggctgaccagctgactgaggagcagattgcagagttcaaggaggccttctccctctttgacaaggatggagatggcactatcaccaccaaggagttggggacagtgatgagatccctgggacagaaccccactgaagcagagctgcaggatatgatcaatgaggtggatgcagatgggaacgggaccattgacttcccggagttcctgaccatgatggccagaaagatgaaggacacagacagtgaggaggagatccgagaggcgttccgtgtctttgacaaggatgggaatggctacatcagcgccgcagagctgcgtcacgtaatgacgaacctgggggagaagctgaccgatgaggaggtggatgagatgatcagggaggctgacatcgatggagatggccaggtcaattatgaagagtttgtacagatgatgactgcaaagtgaaggccccccgggcagctggcgatgcccgttctcttgatctctctcttctcgcgcgcgcactctctcttcaacactcccctgcgtaccccggttctagcaaacaccaattgattgactgagaatctgataaagcaacaaaagatttgtcccaagctgcatgattgctctttctccttcttccctgagtctctctccatgcccctcatctcttccttttgccctcgcctcttccatccatgtcttccaaggcctgatgcattcataagttgaagccctccccagatccccttggggagcctctgccctcctccagcccggatggctctcctccattttggtttgtttcctcttgtttgtcatcttattttgggtgctggggtggctgccagccctgtcccgggacctgctgggagggacaagaggccctcccccaggcagaagagcatgccctttgccgttgcatgcaaccagccctgtgattccacgtgcagatcccagcagcctgttggggcaggggtgccaagagaggcattccagaaggactgagggggcgttgaggaattgtggcgttgactggatgtggcccaggagggggtcgagggggccaactcacagaaggggactgacagtgggcaacactcacatcccactggctgctgttctgaaaccatctgattggctttctgaggtttggctgggtggggactgctcatttggccactctgcaaattggacttgcccgcgttcctgaagcgctctcgagctgttctgtaaatacctggtgctaacatcccatgccgctccctcctcacgatgcacccaccgccctgagggcccgtcctaggaatggatgtggggatggtcgctttgtaatgtgctggttctctttttttttctttcccctctatggcccttaagactttcattttgttcagaaccatgctgggctagctaaagggtggggagagggaagatgggccccaccacgctctcaagagaacgcacctgcaataaaacagtcttgtcggccagctgcccaggggacggcagctacagcagcctctgcgtcctggtccgccagcacctcccgcttctccgtggtgacttggcgccgcttcctcacatctgtgctccgtgccctcttccctgcctcttccctcgcccacctgcctgcccccatactcccccagcggagagcatgatccgtgcccttgcttctgactttcgcctctgggacaagtaagtcaatgtgggcagttcagtcgtctgggttttttccccttttctgttcatttcatctggctccccccaccacctccccaccccaccccccaccccctgcttcccctcactgcccaggtcgatcaagtggcttttcctgggacctgcccagctttgagaatctcttctcatccaccctctggcacccagcctctgagggaaggagggatggggcatagtgggagacccagccaagagctgagggtaagggcaggtaggcgtgaggctgtggacattttcggaatgttttggttttgttttttttaaaccgggcaatattgtgttcagttcaagctgtgaagaaaaatatatatcaatgttttccaataaaatacagtgactacctgaaaaaaaaaaaaaaaaaaa

SEQ ID NO: 67 - DNA, 538 bp, HOMO SAPIENS
cacacaaccccaataacagcattctcacaataataacaatgaaaaacgaaaaaccaaacagctgaatgtacatattttggaattccatctatgttccctttcaatttagcaaaataaatgctacattaccatttaaacagatgtctaataaatgcatattggaacctattgcacaaaagcataaaaaatgctcttcatccacataaaaacatacaaattaaaagctactcaaagtaaaaagaagcttgcaaaacatctcacaatttcattttatatgcctgtaaataaagctggaccactgaaaccaaacaattggatgggaaaatatgatagaaggcttaaaatagaataaataattttataaagttaagttttcttttttaaccccccaaatcttaaattcaatattatatattctatttgaattttctatgtccatgaaaactgcatcggtgagaccgtattccgggtaattagccccactgctgttgaaaacgacgcataaggtgatttaacagcatttgttttaccagcataa

SEQ ID NO: 68 - DNA, 3897 bp, HOMO SAPIENS
ataaggctacggatgggcgggacggagcagcccaccgcaaagtggcggtctacttgaggcggttaccttagtactccgagtagactgagtctgtggcgagctgcgggccgattcctggccagtgccatctcagccggagcaggcctcggggcctcagaagcaggcttttatctggcccgaggctcccagccgttcagcgcgtcttcccataacctataccgattattgggactctcggctgcagacacaggagtcacagatgctgggaagtatggcccgaaagaaacctcgaaatacctcaaggttgcccctggctttaaaccccctgaagagcaaggacgtgttggcagtgctggctgagaggaacgaggctatagtaccagttggggcatgggtggaacctgcctcaccaggtagttcggaaatcccagcatatacatcagcatatttaattgaagaagaactaaaggaacagctaagaaaaaaacaagaagctttgaaacattttcagaaacaagttaaataccgagtaaatcaacaaattaggttgagaaaaaagcaacagcttcagaagtcttatgaaagagcacaaaaagaaggctccatagccatgcagtcttcagcaacacacttaacttccaaaaggacaagtgtttttccaaacaatttgaatgttgctattggaagttctaggttacctccttccctgatgcctggggatggaatagaggatgaagagaatcagaacgaattattccaacaacaagcccaggctcttagtgaaactatgaaacaggcacgtcaccggctagcatcctttaaaaccgtgattaaaaaaaagggatcagtgtttccagatgatggaaggaaaagctttcttaccagagaggaagtgctttccaggaaaccagcatccactgggataaatacaggaataagaggagagttgcccattaaggtccatcaaggtcttttagctgctgtaccttaccagaattatatggaaaatcaggaacttgactatgaggaacctgactatgaggaatcttcatctcttgtaactgatgagaaagggaaagaagatttgtttgggagaggccagcaggaccagcaggctatccattctgaagataagaacaaacctttcagcagagttcagaaagtaaaattcaaaaatccattatttgttctgatggaagaggaagaacaaaagcagttacattttgagggccttcaggatattctgccagaagcccaggattattttctagaagcccaaggtgatttgctggaaacccagggtgatttgacaggaatccagagtgttaagccagatacccaggctgttgaaatgaaggttcaggttactgagccagaaggccaggccattgagccagaaggccagcctattaagacagaaactcagggtattatgctgaaagcccagagtattgagctagaagaagggagtattgtgttgaaaacccaggattttctacccacaaatcaggctcttctaacgaaaaaccaggatgttttactcaaagaccactgtgttctccctaaagaccagagtattctactcaaatatcaggaccaggacttcctacccagagaccagcatgttctccacaaagaccaagatattctgccaaaatatcaggaccagaattttctacctaaggaccagaattttttatctagagaccagcatgttctccccaaagaccaagatattctgccaaaatatcaggaccagaattttctacctaaggaccagaattttttgtctagagaccagcatgttctccccaaagaccagaatattctacctaaatatcaaggccaggattttctacctaaagaccaggactttttatctagagaccagcatgttctccccaaagactggaatattctacccaaatgtcaggaccaggattttctacccagagaccaaggtgttcttcccaaagaccaaaatattctacccatatgtcaggaccaggattttctacccagagaccaaggttatcttcctaaagaccaaaatattctacccatatgtcaggaccgggattttctacccagagacctgcatgttctctccaacgaccagaatattctacccaaatgtcaggaccaagattttctaccaaaatatcagaaagtacactttaaggagccatactctgatatgacagatgagaaagggagagaagacttttctctggcagactatcagtgtttgcctcccaaatcccaggaccaggatgacatcaaaaatcagcaacctgcatcttttatgagagaagaaagagtgagagaagaattgcctctggactatcatcaatatgttgtacctaaaatccaggaccaagactcccctagagaacagaacaagcatatcaaactaccctcatcttttgagaaatgggagattgcaagaggaaatactcctggagtgcccttggcttatgataggtatcaatcaggattgagcactgaattccaagctccactggcatttcagtctgacgtggataaagaagaagataagaaagagcgtcaaaagcagtacctgagacatagacgacttttcatggatattgagagagaacaagttaaagaacaacaaaggcaaaaagaacaaaagaagaaaattgaaaaaattaagaaaaagagagagcaagaatgttatgctgcagagcagaggatcctaagaatgaactttcatgaagatccatattcaggagagaagttgagtgagatattagcccagttacaacttcaagaaataaaaggaaccagagaaaaacaacagagagaaaaagaatacctgagatatgtagaagctttacgagcccaaatccaggagaaaatgcagctgtataatattactttacctccactatgctgttgtggtcctgatttttgggatgctcatcctgatacctgtgccaacaactgtattttctataaaaaccacagagcatatactcgggcactacattcattcatcaattcctgtgatgtccctgggggtaattcaactcttcgagtcgcaattcataattttgcttctgcacacaggcggactttgaaaaatctataataagaatctgaaattaactggtagtattttggcttttacttaaaatcatccctgagagagtatttaagaaaagctgttcaagttataaaatatataatctgggaagaaatactgtctcatataataattagattgtaatcattgttttaatctctgtctgggaaccaagattgaaagctgacttacttctctcttctgtcttgtgaaccatacggagcctattattttaaaatatgatcagacaagtaaggcttctcttactttgctctgctctgatcagaagagctcatgtgaagtctttgagattctcttatttatcatctttctaaaactgtgtttttgagcttgacagtactgaaaatgtctggatgaagcagaaaagaaagtgatgaaatgtgtttctgagcatcagagaccatctatattgccattaccttttctagttgtatataagaattcaagattagaagaatttagatttgttgcacatttttttcctcagcattttttcctcttgttttttaaaatgtattgcctctttccccattcagtgacactggacataggaatttttaattgtgtaattttctgttgcaaaaagggtaaataaatcctttgtcttttgaatatcttctatgtgaaataattgtgagtgacatttgaaaaagtgaatctgaagtcaaagtgagtaaattccttatttccctattttttaaaaacctggtatatgacatggctacagggcaaatgaaataaaaattgccatagttggtatgaaaaaa

SEQ ID NO: 69 - DNA, 3169 bp, HOMO SAPIENS
ctttccacttcacccttccgagcgcctgcgtgcgcatgcgcggagcgcggcgcgcgcggcggttgggccgttggctgttcggccctgggatccgccgccactccgcgatcagaccgctctgtgccgcgagccgccgtgagcactcggattcaagccggcgccaacgagtccgggggcatcgcccgcagcggccaagctcatggccggctgagcgggacgccgcctccgcctcagccaccgccgccgccgccgcctcctcctcctcagccggcggcggcccgggcccagcaaccatggctgaagactactgggacgggcgcctgcggcgaacaggaggagaaggaggtcgcgcggcctcatcccgggccgccgccccaggcgccgccgcgccggccccgcggctctgaggttgctcgcgcgcccccgccgatcgccatggatcggatgaagaagatcaaacggcagctgtcaatgacactccgaggtggccgaggcatagacaagaccaatggtgcccctgagcagataggcctggatgagagtggtggtggtggcggcagtgaccctggagaggcccccacacgtgctgctcctggggaacttcgttctgcacggggcccactcagctctgcaccagagattgtgcacgaggacttgaagatggggtctgatggggagagtgaccaggcttcagccacgtcctcggatgaggtgcagtctccagtgagagtgcgtatgcgcaaccatcccccacgcaagatctccactgaggacatcaacaagcgcctatcactaccagctgacatccggctgcctgagggctacctggagaagctgaccctcaatagccccatctttgacaagcccctcagccgccgcctccgtcgtgtcagcctatctgagattggctttgggaaactggagacctacattaagctggacaaactgggcgagggtacctatgccaccgtctacaaaggcaaaagcaagctcacagacaaccttgtggcactcaaggagatcagactggaacatgaagagggggcaccctgcaccgccatccgggaagtgtccctgctcaaggacctcaaacacgccaacatcgttacgctacatgacattatccacacggagaagtccctcacccttgtctttgagtacctggacaaggacctgaagcagtacctggatgactgtgggaacatcatcaacatgcacaacgtgaaactgttcctgttccagctgctccgtggcctggcctactgccaccggcagaaggtgctacaccgagacctcaagccccagaacctgctcatcaacgagaggggagagctcaagctggctgactttggcctggcccgagccaagtcaatcccaacaaagacatactccaatgaggtggtgacactgtggtaccggccccctgacatcctgcttgggtccacggactactccactcagattgacatgtggggtgtgggctgcatcttctatgagatggccacaggccgtcccctctttccgggctccacggtggaggaacagctacacttcatcttccgtatcttaggaaccccaactgaggagacgtggccaggcatcctgtccaacgaggagttcaagacatacaactaccccaagtaccgagccgaggcccttttgagccacgcaccccgacttgatagcgacggggccgacctcctcaccaagctgttgcagtttgagggtcgaaatcggatctccgcagaggatgccatgaaacatccattcttcctcagtctgggggagcggatccacaaacttcctgacactacttccatatttgcactaaaggagattcagctacaaaaggaggccagccttcggtcttcgtcgatgcctgactcaggcaggccagctttccgcgtggtggacaccgagttctaagccacagaccgaggccccagcaggcagcggctggagggatgccacacccctcacagggcagcccccaactacatcttccctgcttactctctgcctacctgcctgagccatgttcacctgcccacttgtcccctgctgcctgcccaaacaccccaccattggcctgtcaacccacccattggcctgtctgctgggtgctaacaaagctctcatcactccttcacttggtctgtctgtctctgtcttggtagttgccggtggacagcatggccgtgccagcctcccacactgaggccaggtctaccccccatcataccagcccccaggaccactaccccacggccagccaggggtccagagctagcccaggctggggatctcgactcagacaagatggtgacaatgccttgagtctgaggcatcctctgcctgctttcctgcctgccccacctgcctcatattgtgtgggcctttttttgtttgtttcattcattgtttttttttttttaattattttaaatgagatttttgttttttttaaatgcaatatctctgtatacagactggctgggccccaccccctgcgtgtggccctcccacagtattttgtgcaatgaagccctgctcccagcctttcagagacagggacacagcccctatttggaaccctgatcatcaccagaccctgggattggctatgggaaagcatgccacagccactcgccttcctacccccgcccgccatccccagttgcagggggatctggggactaccagagactctgggaaatggacaaggtggggggccccactctttctctcctgcagtcccgtagctggggcctccttccttctcagggtctccccagcccagtccccttgctcccatcccactcggtgctgttgggtaggggccctgccaggaactgaccagctcagcgaggagccataatgtgcatatgtgcacaagcagggttgggggaggggggtgtgaggggttgtgcccaggtgttgccccctatctcctggggagggtgaggcagggcagggacagtctccagggtcagtccctggatgggtggttacctccccttcctccaccctaagccctggggccctgaaatggggtgggagggcaggggtgggagccctcctagtgggtttggggggttgggttcctgaatgcaccataatcgctgtatgaaatattaaaaagtctaaagtgaaaaaaaaaaaaaaaaaa

SEQ ID NO: 70 - DNA, 5645 bp, HOMO SAPIENS
agaagaggaagattagaagattttttttttctttgagagaaagcccagcggagataaacgaatgtcccctcatctccaaagaaaagttcatcggatttttattctagagagctcatcttcaggatgtcagtgaacatttctactgcaggaaaaggtgtggatccaaatacagttgatacttatgacagtggcgatgattgggaaatcggggttggaaatttaataattgatttggacgctgatttggagaaggacagacagaaatttgagatgaataattccaccaccaccactagtagcagcaactccaaggattgtggaggtccggcctccagtggggctggtgctaccgcagccttagctgatggcctaaaatttgcttctgttcaggcctctgctccccaggggaattcacacaaagagaccagcaaatcaaaagtgaaaaggagtaaaacttctaaggatgctaataaatctctgccttctgctgccttgtatgggattcccgagatcagcagcactggcaagaggcaggaagtccaagggcgccctggagaggcaactggcatgaattcagcgctgggtcaaagtgtgagcagcggcggcagcggcaacccaaacagcaatagtaccagcaccagcacctctgccgccaccgcgggggcaggctcctgtgggaaaagcaaagaggagaagccaggtaaaagccagagcagccgaggcgccaagcgggataaggatgcggggaaatccaggaaggacaagcacgacctgcttcagggccaccagaatggcagtggcagccaggccccttccggggggcacctctatggctttggggccaagagcaatggaggtggcgcgagccccttccactgcgggggcactgggagtggcagcgtcgccgctgcaggggaagttagcaaaagtgccccggattcagggctcatgggaaactctatgttggtaaagaaggaagaggaggaggaggagagccacaggcgaatcaagaaactgaaaactgagaaggttgaccccctgtttacagtgccagcgccaccaccgccgatttccagcagtctcacgcctcagattctaccctcctacttttccccatcttcatccaatattgcagcaccggttgaacagcttttggttcggactcgttctgtgggtgtcaatacatgtgaagttggagtagtgacagagccagagtgtcttgggccctgtgaacctgggaccagtgtgaatttggaagggatcgtgtggcatgaaacagaagaaggtgtcctagtggtcaatgtcacgtggaggaacaaaacgtacgtgggaaccctactggactgcaccaagcacgactgggcccctcccaggttttgtgagtcaccgacaagtgacctggagatgagagggggccggggcagagggaagagagcgaggtctgctgctgctgccccgggctccgaggccagcttcacagagtccagagggctgcagaataagaacagagggggggccaatgggaaagggaggcggggcagcctcaatgccagcggacgaaggacacccccaaattgtgctgctgaggatatcaaagccagcccttcctccaccaacaaaaggaaaaacaagcctccaatggagctggacctgaactccagctctgaggacaataagcctggaaagcgtgtccgcacaaattccagaagcactcccactacccctcaagggaaaccagagactacttttttggaccaaggctgctcttctccagtgttaatcgactgtccccacccaaactgcaacaaaaagtacaagcacattaacggcctgaggtaccaccaggctcatgcacacttagacccagaaaacaagctggagttcgagcctgacagtgaggacaagatctcggactgtgaggaaggattgagtaatgtggcacttgaatgcagtgagccaagcacaagtgtatctgcttatgaccagttgaaggcaccggcatcccctggtgctggaaacccacctgggaccccaaagggaaagagagagctgatgagcaatggcccaggttccattattggtgctaaagctgggaagaattctggcaaaaagaagggccttaacaatgaactgaacaaccttccagtaatctccaacatgacggctgcgttagacagttgctcggcagcagacggcagtttggctgctgagatgcctaaactggaagcagaaggattaattgacaagaaaaatttaggagataaagaaaagggcaaaaaagctaccaactgcaaaacggacaaaaacctctctaaactgaaaagtgcccggcccattgcccctgccccagcccccactcccccgcagctaatcgctatacccactgcaacctttacaacgaccaccactgggacaatacccggactgccctccctcacaacaactgttgttcaggctacaccaaagagtcctccgttaaaacccattcaaccaaagcccacaattatgggagagcccatcaccgtgaacccagctctggtgtcactcaaagacaaaaagaaaaaggagaagcgaaagctaaaggacaaagaagggaaagagacgggaagcccaaaaatggatgccaagctggggaaactagaggactccaagggggccagcaaagatttacctgggcattttttaaaggatcatctcaacaagaatgaagggctggcaaatggactgtcggagtctcaggagagccgcatggccagtatcaaagctgaggccgataaggtttacactttcacagacaacgctcccagcccttccatagggagcgcctcgaggctggaatgcagcactttggtgaacgggcaggcaccaatggcacctctgcatgtgttgacccagaatggggcagagagttcagctgcaaagacaagcagcccggcctattcagacatatctgatgctgctgacgatggtggttctgacagcaggtcggagggtatgagatcaaaggccagttccccatcagatattatttctagtaaggacagtgttgtaaaagggcattcttcaactacagcacaatcatctcaactgaaagagtcccattctccctattaccacagctatgatccttattattctccaagttacatgcaccctgggcaggtcggtgcccctgcagctggaaatagtgggagcacgcagggaatgaagatcaagaaggagtctgaggaagatgctgaaaagaaagacaaggcagagcagttagattctaagaaagtggaccacaattctgcatccttacagcctcagcaccagtcggtgatcacacaaagacatcctgccctggctcagtcactttattatggccagtatgcatatgggctctatatggaccagaagtctctgatggccaccagccctgcctatagacagcagtatgagaagtactatgaggaccagaggctggcagagcagaaaatggcccagactgggagaggagactgtgaaaggaaaagtgagctccccttgaaagagctgggcaaggaggaaactaaacagaaaaatatgccatcggccacaatctcaaaagctccctctactccggagcctaacaaaaaccattctaaactagggccatcagtgcctaataaaactgaggagacaggtaaatcgcagcttctctccaatcaccagcagcagcttcaggccgacagcttcaaagctaagcagatggaaaaccaccagcttattaaggaggctgtagaaatgaagtctgtcatggactctatgaagcagacaggtgtagacccaacctcgagatttaaacaagacccagattcaagaacatggcatcattatgtataccagcccaaatatctggatcagcaaaagtcagaagaacttgatagagagaagaaattaaaagaggatagtccgaggaaaactcctaataaagagagtggtgtgcccagccttcctgtatcgttaacaagcattaaagaggagcccaaagaggccaagcatcctgattctcaatcaatggaggagagcaagctgaaaaatgatgatcgaaagactcctgtgaactggaaggactctcggggaacaagagtggctgtctcctcacccatgagtcagcatcagtcatacatacagtacttgcatgcttatccttacccacagatgtacgaccccagccatcctgcataccgggctgtttctcccgtcctaatgcacagttatcctggggcatatctctctccaggatttcattatcctgtttatgggaagatgtcagggagagaagagacagagaaagtcaataccagccctagcgtcaacacgaaaacaaccactgaatctaaagcactggatttgctccagcagcatgctaaccaataccgcagcaagtctcctgctcctgtggaaaaggctacagctgagcgggaacgggaggcagaaagggaaagggatcgccactcccccttcggccagcggcacctgcacacgcaccaccacacccacgttggcatgggttacccgctaatcccgggtcaatatgacccttttcaaggcttgacctctgctgcccttgttgcctctcagcaggtggctgcccaggcatctgcatctggaatgtttcctggacaaagaagagaataacaagattggacatgtacattgtcatgtgactggatcacatggggaagcgctttatacagacatcagttccatggtgttaatttgaaatgccttaatggcaggcaaaaaccagtcatttcatttttgtaaattacagattttatcacagagtaacaaatgttgctgtaattaaacttctgttttatatatatatacgtatacatatctgtatatatacatatatatatatataaatataaatatattctttactttttgtatcagtaaccaggctcgcacacacagggtctgctgccacgtcgcaaaccactcagtaaaggaaattaaaaatgtatttgtcatgttaaaaagtgttagccacaaaaggctacttactttcttttccttttcctttaaaattgtaaataaataatgttatgtatcagtgtgcctgaaccttgcatatccttcacatatttcccataagcccctcagaaaggctaactgtgatgatgacactttggtacaatttagatgtctatttggtggctcctgttaaagacgcaccagtgtaaaatgttcctgtagtcactgtttgtacttgtgtattgtggaaaaagtacttttggaaggcatggggttgccagtaccacaaaaactgtgttgtatataatgtaaagattaaaatggggaaataatgagcatctgtgaataatgaggtgtcattttttgataatcttgaatggcaaataacccaatagcctgcgtaccagagacatctgtgattgttctattacttgaatagttctacagtctttttttttttttaatgtttacaattatccagttttagaagagagagactttaacgccattgcctggttacttgttttatgctgtaatctagtttattttatgtaaaatgtatattgaatgctttccttttttatacctgccttaaataatttggcaatcagaattaaaaagtttttttttttttaaat

SEQ ID NO: 71 - DNA, 8519 bp, HOMO SAPIENS
cggcggcggagccaggacccagacatctgggactgttgttctctcgcggcgcgaccgcctcagtcacttcgcccagagacccggacctggtccgctggggagcaggcggccataaaccccctctctcccggttccctgacgccgcggcaggagctgttacaaacaccctgcggttggtctccgatgcccttcagtgaggtggggacgcctggaccctggtgagcgaaccccaagccaccccccaccccaactcagtgtcttcgccggcccccggcccgtacgcctgtctggtcgccatggctgaaaacacagagggggatctgaactccaacctgctccacgccccctaccacaccggggaccctcagctggacacggccatcgggcagtggctccgctgggataagaatcccaaaacaaaagagcagattgaaaacctgttacggaatgggatgaacaaggagctgcgagatcgtctttgttgccgaatgacttttgggactgcaggacttcgttctgccatgggggcagggttttgctatattaatgaccttacagtaatacagtcaacacaggggatgtacaaataccttgagagatgtttctcagacttcaagcagagaggctttgtggttgggtatgacactcggggtcaagtaactagcagctgcagcagccagaggcttgctaaactcactgctgcagtcttgctggccaaagatgttcctgtgtaccttttttcaagatatgttcctacaccttttgtaccatatgcagttcagaagctcaaagcagttgcaggtgtgatgattactgcctctcacaaccgcaaggaagacaatggatacaaggtttactgggaaactggtgctcagatcacatctcctcatgataaagaaattctaaaatgtatagaagaatgtgtggaaccctggaatggttcctggaatgataatttagtggataccagcccgctgaagagagaccctctgcaggacatttgcaggagatacatggaagatctgaaaaagatctgtttttacagggagttaaactcgaagaccaccttgaaatttgtgcacacatcttttcatggggtcggacatgactatgtgcagttggcttttaaagtgtttggttttaagcctccaattccagtaccagaacaaaaagatcctgatccagacttttctaccgttaaatgtccaaatcctgaagaaggagaatctgtgctggaactttccttgagactggcagagaaagaaaatgcccgggtagtgctagccacagatcctgatgcagacagactggcagcagcagaacttcaggagaatggttgttggaaagttttcacagggaatgagttggcagctttgtttggatggtggatgtttgattgctggaagaaaaataaatcaagaaatgctgatgtgaagaacgtttatatgttagccaccacagtctcttctaaaattctgaaggcaattgcacttaaagaaggatttcattttgaagaaacattaccaggttttaaatggattggaagtaggataatagacctcctggaaaatgggaaagaagtcctttttgcatttgaagagtctattggttttctctgtggaacttcagttttggataaagatggggtgagtgcagctgttgtggttgctgagatggcatcttacctggaaaccatgaatataacattgaaacagcaactggttaaggtttatgaaaaatatggttatcatatttcaaaaacttcctatttcttgtgttatgaaccacctaccatcaaaagtatatttgaaaggcttcgtaattttgattctccaaaagaatatccaaaattttgtggaacatttgctatattgcatgtacgggacgttaccactggatatgacagtagccagcctaataagaaatcagtgctgcctgtgagtaaaaacagccaaatgattacatttacttttcaaaatggctgtgttgctacccttcggacaagtggaacagaaccaaagataaagtattatgcagagatgtgtgcgtcacctgaccagagtgacactgctttactggaggaagaactgaagaaactcattgatgctctgatagagaattttcttcagcctagtaagaatggactgatctggcgttctgtttaggggtacaccaatatgtcatgacactgtgtgggcatatggaacagagcaaccgagaactgcatacattgaaccttgtgttagcattctctctctatctcatctggccgagtatctttttccttttattttctttctttttggtcaactggctagactaaacaaagtataagtttgaaatgaaatggtctagagggaaatgattcaaattttttcataattcaaacaaaagttattacactaaaagtattatagtaacgtattgtccttccgttaacagaaacatcacaattcaaaagtgagttttcttattatagtgtgattaagcctagttctgtatctcgtaattgtgtatagcatggtaaaagaaaaaaaaaaagacaggtaaatgttatataattgtagggttagttaaggaaattagtccataaaattggcaagaaaatggtactttccttgattgttatgaaaaagtgtcattgtgacatcacaggtattaatttacaaattagagtatttgaaataggatatttagcatttctgtagtttagaacagatgttacagtgtgtggttttggcatgtctgtttcaggtgcccttggtgcagtataaatttactgtatgtatttaaaattctgatgtttactgaacataaaacaatagtggcaacactcctattggctttgttcttatcaaatttctcagtgccttctcagggtctggtatgaacagaaaaaacagtgttcctgcatttaccataatttaatcagtcaatttgcagatagctaaggaaaatcttccaaaatctgtaggtgcttcctctatatcaagtgagtttgctgattttaaaatcttaggaatataaataaagatcttaataaaagcaagcttaatgtagttaaggatcttcatattagaattgtgtcatttatcaaaccttttattacagaaaaaaatctgaactgagaaaggagctctgaatttatttgacagtctaacttttgaattacatttttgtaagtagatttattcttttattttatgaagtaatgttaattttactaagaataaaacatccaaattttaagtattatgaaatactaaaactacatgttttaaaacagaggtccagtttattctaacatcttgctgacttctgtagaatttctgattgcatgactattatttatcttcttttagtgtagaaaataattttttacaaaaagtcacttttgggctgggcgcagtggctcacgcctgtaatcccagcactttgggaggctgaggcaggtggatcacaatgtcaggagtttgagactagcctggccaatatggtgaaaccctgtctctactaaaaatacaaaaattagccgggtgtggtggtgggcacctgtagtcccagctactcgggaggctgaggcaggagaattgcttgaacctaggaggctgagattgcagtgagccgaaatcacgccactacactccagcctgggcaacagagggagactccatctcaaaaaaaaaaaaagtcacttttggctaatcatgcagtcttctgaaaaggtttaatagagaaatgctgtttaggctgggcttggtggctcacatctgtaataccagcgctttgggaggctgaggcaggaggattgcttgaggccaggagtttaagttacagaactatgatcacactgccgcactgaagcctggatgacagagtgagaccttatctcaaaaaaaaaaaaaaaaagagagagagagagaaaaagaaatgctgtgtttaatcttcttaaaatgtatcttgtcctacatagttctcagaatacatatggggtatagttaggagataacaataacaagacctaaacaaattgcttatgggagatagcactgtaattagagaatttatttcatataaaataataatataaagtttgaactgattagaatgttccttaaatcatggtttcgtttgttgcagctgtcagctaacatttggttgagctcatataatccaaacctaattgtccaactattgtattgccactattgttaatttgttccttccttactttcttattgttggatcttatatgactgtatgactgtagataatagacagctagctaaatgtagagcaccatttttctcaatgagtttgttttcaaaggctttgcactggagaagatatgtgtagaatttttgttttatttttaaaatgtgtaaaacatcttttgttttatatgcttttaagaatgtagattgtaatttaggaaatggcatatattctgcaaagtggtataatgttgtatatatgaaaaacaggtatatttggtttagttctgtgtttcagtgactgataaacaaaaatgaagctaaaatgaatcaacggctcattcatagttactaaagccatgtcatgactgtcattctattatgaagaaaacagttttatttgagtgctttaatataatgcaacatttaagtcatcttaaggtgaaaagttattgaagtgttcttctctcaagttaacaaaattttacaaatgttcctgaagtgtatcgattgagggaattattttattctagcctgtcatgagtctgtctgagcatgatacttaacatgaacttgatgtagtaggtgcacatttgcctaacaggataaattcagtgatagcccaagctggtcaggagagacagaagtgctggctaggaggtctcagcctcgggcactacaatgtttatctttttctttttgaacaatattgtgaaaatgattgcattctcattgagcatgaaagtcaaaactggaattttctaaagctttggagaaaaggagagaattagtagggcaagatcaaagcatacattggaaataaacagtagaaataagcaaacaatataaagagacacgggaaatgcttctcgtgaagggcaaatgtaacaccataacagtagggaataaactgtgtcccacctgtttacttgtgtttatttgttgttatgatgagtatgcacctaccattttcctttattgtgatcactaaaatgaggccaaggtttaggaggtgagaaaaagtatcccttttacggattcagttcctgctaggatgttgtatcagaatcatgtgagaactcaggaagaggtagagcagaaataaaaaggaagaaaatgtagattagaaaataagacttctgagaaaaagttcaaggaataaagattgtttgactctggagaggagaaagctgttgagatagtttgctaagtttgctaataaagctttattgagtcttttattgaagggttcaaagtaagaaatactatgccatagtgttctccatctctagtgaagacagaaccagagggaataaggatcttttttttaaagacagcatggaaagtttaagatttaggaacttcttgagaaatcttcataatatcttctattcaaaatcttttttttatttttaagggaataaaaattttaaaaattaagagatatacagatgactttttaagggtccttctttccagcacattttttttaaaaactcaggttagaataaaaatgtcataaagggcactaaaagtaacatttgggtttcactccatatctagaagaatttagctcacaaaacaatttttgtgtgttttgagtaactgatgcataagtgcaatgaataattttcctgcttcactgttatttttaatttaacctggcaaattaagtgagacttgaacaaaattttgttcatcttgaagaatgtatagtggcttaggttatttgaggttttcgttttgaatatatatgttgttattttgatgtagatacgttagcagatggagaggttctaagagattggatactttggaatgtctttatataggaaatagacctcccatttcttaagcaagttgcttctggaattgatgcaacagggatattagctgtagtttaatggataagttgttctatgagctgctgctatcagtacttttttccacattttccattgatatttgtgatgcttgaaaaatccaaacttcacttggatacatttaattttatgcctttttctctctacctcccacttttcctaggcacccttgcacattttgttactgtgaaggactattgccctgttacctcactgataagaaatctcaactgtattcattcagaatgctttaagcttagtcataaactacatttgcctatggacctttggttattttgttaatgttgtcattatatttaagacttattgtaggaagtaattttaaatctatttcataacctgttttgatctgtctgcatactgctatatgttaatttattacggccttttacaattcacttgtcatctgagattgttctagaaactgatgaggaaagagtcgtactaaccaaaatgaatgggcaattgacataacattctatttcaggtttccttgtacttggggagccaaagcacaagatctaaggaaatcttattcacatttgtccctcagagcatcttaccctaagccatagaggtataaatagtaagatgagaattgctcattgtctgactccttgcacagcatgaatttaattctagttggaaacaaagttagtgttgactactggttaccttaaagtattcaccatactatatatttattagaccatctttcctctttgtttattcaagactatgtacttataaaagagaacctataagaatgtgtagagtgaccaaatagggacaaagtgacatacctagagtttgctgctcaaatttttccactagcgtaaccctaaagcagaggggcatgatgaagggggaaggggttctgagagcaaaatcagaatcagcctaccactgacatgaagtgtgttctgtctttaaaatgtaagtgaattttgcattctttataataaaacttttaatataaaaatgatatgtttaatctttactgaaacttatgccaccacaaaggagcaccatgttcatcacgtggctgctcagttttctcccccagtgccctcacccccagtggaggcaagtccttgagctacacacactggctgtagtgcaagatatataaacataggccgggctcggtggctcatgcctgtaatcctagcactttgggaggccgaagcaggtggatcatctgaggtcgggagattgagactagcctgaccgacatggagaaaccctgtgtccactaaaaatacaaaattagccgggtgtggtggcacatgcctgtaatcccagctactcgggaggctgaggcaggagaatcacttgaacccaggaggtggaggttgtggtgagccaagatcgcgccgttgcactccagcctgggcaacaagagtgaaactccatctcaaaaaaaaaaaaaaaagatatataaacatagaacatatccagactatttcctgcccttggaatctgaccttcagaaggattaatgccaaactaaactgacctgaaacagttttgttactattggcattccttgactaaaaaggaccacctgatgctcagtcccgagagtaggaatcgtggtttattatttttcatatccataccacctagttcagtacctgttatagagtgtttaattgctgatactaggaattaagggattttttaaaagtagcaaatagtttaaggaacaatcaaaaaatgaattttctaattcagttttttcaatgaagtcccatcactgaactttataatgtaatgtttattaagcagacatccccttaaatactcagtttctttggagagagcaaagcatatctctctgtggaaattatatataatgcctggtattttacactcaaagcaaggtgttggccaggaaggtaaagaaatggtgtctatgtagacttaatatcactagtctaagtgtcattttgagcctagtagcactaccttccaagtgagtcacaacaaatttgatcctatttggtatgtttttgtccactgttatgattcatcatgtatcttacaagagccactcaagcaagactctgcttctatgtatggtgaggccttgttgttctaggctagaataaactctttgtatgcctcattgaatatgccaggtaaaatatatgcagtcaagaatgaattatttttctgactaaagtgtgtagcagtagttcaaaattgtgcccttgttttaacagtttctgtcaacatcttctcatttttccctacaaaaacaccagggtgtattataagtactgcctgtgagaatttgcactttatgtatttgtgtgtggatttcttgtggttttagccaaatgaagtgttatcagtaataaacaggtctcttcataggaaaaaaaaaaaaaaaaaa

SEQ ID NO: 72 - DNA, 441 bp, HOMO SAPIENS
actattgcttagacttcctacatcaagacattgaattatgggttaaggtgtatgcctatatttcaaagggagagaagttgcaaagatgaaaaagattaaccctttaaaaattatcttaattaacctagggtgtatttctaattatcttaatcaacctagggtgcgtactaaacagctactaattgtacatctagcctcaggtatcttttgcagcttagacattttccattggcaaattcagacaagggcgatcttaatcaggaatatgagggtaaaagaaaagccaactgtttatctttgaaaacatattatttcttgtttcagttttccatcctcaagtaggcgctagattgtaataagtaagcagaagaagttgtgttaatcctggaactctatgcagatctggaaggcaaatagagtgactgcaaagtaggacgttct

SEQ ID NO: 73 - DNA, 426 bp, HOMO SAPIENS
  misc_feature (195)..(195): n is a, c, g, or t
gagtgtagccggatttggagggactggacactcagtgtgaacaagacgaaggcctcaggaggcagtaaaagctgacaagaggagagaaaatgaagcgcctacgggtgcatactggactagcgggcgaaaggccatgactccttagtttggagaaagaactggggccgagattggggaagtttcccagtgcaattnaaaaaaaaaaaaaaaaaagaactagaagaattacccaggtctggcttctttcgtgtagcctggggctgagtcgcaggctgagaaatccagtctggccagtagggggctccaccaagcgcagtctcagaatgcccaagagctccaccgtcgcccggggtctccaccaagcgcagtctcagaatgcccaagagccccaccgtcgcccggggtctccaagaggagtgggtcgtg

SEQ ID NO: 74 - DNA, 10238 bp, HOMO SAPIENS
ggattcctccagtccctccctcggccgcctctcctcccggagcgagcgcgcagccctgcgcagcagcgcccactggtcccgtcctgtgagccccggccccagccgcggacagacccgcggagtcgcctcccggcccacccgcccggccgccgaggagcgggaggaggacgggaccccggcgcccccaccccatccccgggagaactctaagaaggagctgatgtggaggagcagctgagacagttcaagatgacgaccacagtagccacagactatgacaacattgagatccagcagcagtacagtgatgtcaacaaccgctgggatgtcgacgactgggacaatgagaacagctctgcgcggctttttgagcggtcccgcatcaaggctctggcagatgagcgtgaagccgtgcagaagaagaccttcaccaagtgggtcaattcccaccttgcccgtgtgtcctgccggatcacagacctgtacactgaccttcgagatggacggatgctcatcaagctgctggaggtcctctctggagagaggctgcctaaacccaccaagggacgaatgcgcatccactgcttagagaatgtggacaaggcccttcagttcctgaaggagcagagagtccatcttgagaacatggggtcccatgacatcgtggatggaaaccaccggctgacccttggcctcatctggaccatcatcctgcgcttccagatccaggatatcagtgtggaaactgaagacaacaaagagaagaaatctgccaaggatgcattgctgttgtggtgccagatgaagacagctgggtaccccaatgtcaacattcacaatttcaccactagctggagggacggcatggccttcaatgcactgatacacaaacaccggcctgacctgatagattttgacaaactaaagaaatctaacgcacactacaacctgcagaatgcatttaatctggcagaacagcacctcggcctcactaaactgttggaccccgaagacatcagcgtggaccatcctgatgagaagtccataatcacttatgtggtgacttattaccactacttctctaagatgaaggccttagctgttgaaggaaaacgaattggaaaggtgcttgacaatgctattgaaacagaaaaaatgattgaaaagtatgaatcacttgcctctgaccttctggaatggattgaacaaaccatcatcattctgaacaatcgcaaatttgccaattcactggtcggggttcaacagcagcttcaggcattcaacacttaccgcactgtggagaaaccacccaaatttactgagaaggggaacttggaagtgctgctcttcaccattcagagcaagatgagggccaacaaccagaaggtctacatgccccgggaggggaagctcatctctgacatcaacaaggcctgggaaagactggaaaaagcggaacacgaaagagaactggctttgcggaatgagctcataagacaggagaaactggaacagctcgcccgcagatttgatcgcaaggcagctatgagggagacttggctgagcgaaaaccagcgtctggtgtctcaggacaactttgggtttgaccttcctgcagttgaggccgccacaaaaaagcacgaggccattgagacagacattgccgcatacgaggagcgtgtgcaggctgtggtagccgtggccagggagctcgaggccgagaattaccacgacatcaagcgcatcacagcgaggaaggacaatgtcatccggctctgggaatacctactggaactgctcagggcccggagacagcggctcgagatgaacctggggctgcagaagatattccaggaaatgctctacattatggactggatggatgaaatgaaggtgctagtattgtctcaagactatggcaaacacttacttggtgtggaagacctgttacagaagcacaccctggttgaagcagacattggcatccaggcagagcgggtgagaggtgtcaatgcctccgcccagaagttcgcaacagacggggaaggttacaagccctgtgacccccaggtgatccgagaccgcgtggcccacatggagttctgttatcaagagctttgccagctggcggctgagcgcagggcccgtctggaagagtcccgccgcctctggaagttcttctgggagatggcagaagaggaaggctggatacgggagaaggagaagatcctgtcctcggacgattacgggaaagacctgaccagcgtcatgcgcctgctcagcaagcaccgggcgttcgaggacgagatgagcggccgcagtggccactttgagcaggccatcaaggaaggcgaagacatgatcgcggaggagcacttcgggtcggagaagatccgtgagaggatcatttacatccgggagcagtgggccaacctagagcagctctcggccattcggaagaagcgcctggaggaggcctccctgctgcaccagttccaggcagatgctgatgacattgatgcctggatgctggacatcctcaagattgtctccagcagcgacgtgggccacgatgagtattccacacagtctctggtcaagaaacacaaggacgtggcggaagagatcgccaattacaggcccacccttgacacgctgcacgaacaagccagcgccctcccccaggagcatgccgagtctccagacgtgaggggcaggctgtcgggcatcgaggagcggtataaggaggtggcagagctgacgcggctgcggaagcaggcactccaggacactctggccctgtacaagatgttcagcgaggctgatgcctgtgagctctggatcgacgagaaggagcagtggctcaacaacatgcagatcccagagaagctggaggatctggaggtcatccagcacagatttgagagcctagaaccagaaatgaacaaccaggcttcccgggttgcagtggtgaaccagattgcacgccagctgatgcacagcggccacccaagtgagaaggaaatcaaagcccagcaggacaaactcaacacaaggtggagccagttcagagaactggttgacaggaagaaggatgccctcctgtctgccctgagcatccagaactaccacctcgagtgcaatgaaaccaaatcctggattcgggaaaagaccaaggtcatcgagtccacccaggacctgggcaatgacctggctggcgtcatggccctgcagcgcaagctgaccggcatggagcgggacttggtggccattgaggcaaagctgagtgacctgcagaaggaggcggagaagctggagtccgagcaccccgaccaggcccaggccatcctgtctcggctggccgagatcagcgacgtgtgggaggagatgaagaccaccctgaaaaaccgagaggcctccctgggagaggccagcaagctgcagcagttcctacgggacttggacgacttccagtcctggctctctaggacccagacagcgatcgcctcggaggacatgccaaacaccctgaccgaggctgagaagctgctcacgcagcacgagaacatcaagaacgagatcgacaactacgaggaggactaccagaagatgagggacatgggcgagatggtcacccaggggcagaccgatgcccagtacatgtttctgcggcagcggctgcaggccctggacactggatggaacgagctccacaagatgtgggagaacagacaaaatctcctatcccagtcacatgcctaccagcagttcctcagagacacgaagcaagccgaagcctttcttaacaaccaggagtatgttctggctcacactgaaatgcctaccaccttggaaggagctgaagcagcaattaaaaagcaagaggacttcatgaccaccatggacgccaatgaggagaagatcaatgctgtggtggagactggccggaggctggtgagcgatgggaacatcaactcagatcgcatccaggagaaggtggactctattgatgacagacataggaagaatcgtgagacagccagtgaacttttgatgaggttgaaggacaacagggatctacagaaattcctgcaagattgtcaagagctgtctctctggatcaatgagaagatgctcacagcccaggacatgtcttacgatgaagccagaaatctgcacagtaaatggttgaagcatcaagcatttatggcagaacttgcatccaacaaagaatggcttgacaaaatcgagaaggaaggaatgcagctcatttcagaaaagcctgagacggaagctgtggtgaaggagaaactcactggtttacataaaatgtgggaagtccttgaatccactacccagacaaaggcccagcggctctttgatgcaaacaaggccgaacttttcacccagagctgtgcagatctagacaaatggctgcacggcctggagagtcagattcagtctgatgactatggcaaagacctgaccagtgtcaatatcctgctgaaaaagcaacagatgctggagaatcagatggaagtgcggaagaaggagatcgaagagctccaaagccaagcccaggccctgagtcaggaagggaagagcaccgacgaggtagacagcaagcgcctcaccgtgcagaccaagttcatggagttgctggagcccttgaacgagaggaagcataacctgctggcctccaaagagatccatcagttcaacagggatgtggaggacgagatcttgtgggttggagagaggatgcctttggcaacttccacggatcatggccacaacctccagactgtgcagctgttaataaagaaaaatcagaccctccagaaagaaatccaggggcaccagcctcgcattgacgacatctttgagaggagccaaaacatcgtcactgacagcagcagcctcagcgctgaggccatcagacagaggcttgccgacctgaagcagctgtggggtctcctcattgaggagacagagaaacgccacaggcggctggaggaggcgcacagggcccagcagtactactttgacgctgctgaggccgaagcctggatgagcgagcaggagctgtacatgatgtcagaggagaaggccaaggatgagcagagtgctgtctccatgttgaagaagcaccagatcttagaacaagctgtggaggactatgcagagaccgtgcatcagctctccaagaccagccgggccctggtggccgacagccatcctgaaagtgagcgcattagcatgcggcagtccaaagtggataaactgtacgctggtctgaaagaccttgctgaagagagaagaggcaagctggatgagagacacaggttattccagctcaaccgggaggtggacgacctggagcagtggatcgctgagagggaggtggtcgcagggtcccatgaactgggacaggactatgagcatgtcacgatgttacaagaacgattccgggagtttgcccgagacaccgggaacattgggcaggagcgcgtggacacggtcaatcacctggcagatgagctcatcaactctggacattcagatgccgccaccatcgctgaatggaaggatggcctcaatgaagcctgggccgacctcctggagctcattgacacaagaacacagattcttgccgcttcctatgaactgcacaagttttaccacgatgccaaggagatctttgggcgtatacaggacaaacacaagaaactccctgaggagcttgggagagatcagaacacagtggagaccttacagagaatgcacactacatttgagcatgacatccaggctctgggcacacaggtgaggcagctgcaggaggatgcagcccgcctccaggcggcctatgcgggtgacaaggccgacgatatccagaagcgcgagaacgaggtcctggaagcctggaagtccctcctggacgcctgtgagagccgcagggtgcggctggtggacacaggggacaagttccgcttcttcagcatggtgcgcgacctcatgctctggatggaggatgtcatccggcagatcgaggcccaggagaagccaagggatgtatcatctgttgaactcttaatgaataatcatcaaggcatcaaagctgaaattgatgcacgtaatgacagtttcacaacctgcattgaacttgggaaatccctgttggcgagaaaacactatgcatctgaggagatcaaggaaaaattactgcagttgacggaaaagaggaaagaaatgatcgacaagtgggaagaccgatgggaatggttaagactgattctggaggtccatcagttctcaagagacgccagtgtggccgaggcctggctgcttggacaggagccgtacctatccagccgagagataggccagagcgtggacgaggtggagaagctcatcaagcgccacgaggcatttgaaaagtctgcagcaacctgggatgagaggttctctgccctggaaaggctgactacattggagttactggaagtgcgcagacagcaagaggaagaggagaggaagaggcggccgccttctcccgagccgagcacgaaggtttcagaggaagccgagtcccagcagcagtgggatacttcaaaaggagaacaagtttcccaaaacggtttgccagctgaacagggatctccacggatggcagaaacggtggacacaagcgaaatggtcaacggcgctacagaacaaaggacgagctctaaagagtccagccccatcccctccccgacctctgatcgtaaagccaagactgccctcccagcccagagtgccgccaccttaccagccagaacccaggagacaccttcggcccagatggaaggcttcctcaatcggaaacacgagtgggaggcccacaataagaaagcctcaagcaggtcctggcacaatgtttattgtgtcataaataaccaagaaatgggtttctacaaagatgcaaagactgctgcttctggaattccctaccacagcgaggtccctgtgagtttgaaagaagctgtctgcgaagtggcccttgattacaaaaagaagaaacacgtattcaagctaagactaaatgatggcaatgagtacctcttccaagccaaagacgatgaggaaatgaacacatggatccaggctatctcttccgccatctcctctgataaacacgaggtgtctgccagcacccagagcacgccagcatccagccgcgcgcagaccctccccaccagcgtcgtcaccatcaccagcgagtccagtcccggcaagcgggaaaaggacaaagagaaagacaaagagaagcggttcagcctttttggcaaaaagaaatgaactcctttccttcacctcctgcccttctcttaccttttcagtgaaattccagcatgcaagctcagaaccaacacattactctctgtgcctaatgttcctcaatgtggttgatttttttttttttttaatttatagagcatttcggggggggtgggggaaacacacctaaacactttatctccaagttacaaaagtttgaggtgcagagggaaggccagattttttttttaatgaaattatatagattagatctcagtatttaaactgttcctcaattttgtgaggctgtgttggaaataacccgcctctagtgctgttggtatgcaaggcagcggtgcttaatcaatatttcctgtgctcaccagaggcaaaatgtaccaatatcctgacaccattctctctccatttacttctggtggttaccctgactcttgactcttagaagtgcccgagatggggctaacctttattaaacagatcgcatattatgatcttgctgcagccacagtgcagctccacattaactctacagaccaaaccatttgtatctggcatcacttactaacacacgacatgcggcttttctgcatcaactgctatgacggttaagaatgtcagtatacaagaaggaatagaaaactgatactgttttaaataatctgtaatttcaattttttttttttgctgaaatacattatattgtacgtttgagataattctagtacaaagtataataaaactagatgtataataaaccctttaaatcattggtaagtgtacaagtggtggaactgaagcatttactggacaaagtaatgttactctaatggttacttgctcgtgcgttgccacactgtgttataatttgcttcatttccttgctatttgatacatagtgtgcatttctctgtcactgtaactattgtaatgacaaattttcatcttactgcacaatcaaaatgacattgataggaatgaactccagaggctgggcctgaacagggaggtggtcgctcaggcctggtgctcagtcgtacgacctgtacctctcaacttttgccctatctgttaaatatatgctatgtcattaaatgcttttaaatctagcacggtgactagttgttgttcttcctctgctgcgtgtgcatgcccagtagggaaactgcaaagggagaaatgacaaacaagaaacattttacaaccagtctgggctcacttttgcattttttatgcatgtctggtgcacaagctttgaaaactacagcaaacagtaataaatgtgactgttttgtagttatacattcaggctttatcttttatttatgaaaaagttaccagagcacttgtgaaacctgaactctgagataggggttggcaaatttgttctgtaaagggacagagatagtaaatattttaggctttgtaggccgtaactgtctctgttgctcaattctgctgttgcgtaatacaaaggcagccattgacggtatgtgaatgcctgggcatggctgtgttccagtaaaactatttaaggacataaatttgaatttcatataactttgacatgccatacaatattttgattttcttaatgatttcaaaatgtaaagtctattttatacagatcagaccaaaaagaagaaaaaaaaaaaacaggcaagaggttaggtttggcccatgggccatagtttgctgacttcagcatagagtcgtgggttatttacaagtgacatacttttcctgggttatctgggtatgttgactccatgccacttgcataaagcagcaatggatattagtattatggatgtccagtaagttattccacaaagaccatgcctaaggtggcatcagccctgggctccacagctgcgtggcatcaaagctttctcttaactctcttacctctaggcaaactgagacctcaccatcctctcccctgcttcccacgacagtcctttgcccttgccatgctcagggttggaatcaagttgttctattctcaacagaccaaaatgtttagttaaggcaaagtatcttggaaacaattgtgattaattacagtcttgtactcttgacaaagctgtgcagatggcaataagttcataccagcaatcctggagtcccataataaatacgtacatgtggaacatcgtgcacataatttcaacagttcgcagatctgtagttatgaagccagggtttggtggtatttgctctctcttggtgcatttgataaggatccactgaggcctgaatgtggaagatgatgggcagcgagaggagcgtcagaagaccccagtcaagacgtgttcgccatcagaggttacaggccgcacagcctgatgagcttcaagcctggcagggtaaatagtttttgggttttttgttttttttttattcttccactatcatgttttttgaggattttgcatatttcttgttgccataatgctgtgctattttaccctgattttcagtgatacaatatgggtgacaatactggcccctccataaatctgaagagtaagaagtagtgaaaataaggcttaggatatgaaatggcgttgtcacttgaatcaaggccactttttgtcctacttgagcatctcaagttgggatgcatcttctgatggcacttccggaactggctgtggtttttttgggtgtaccgagagtgccagtgactgtgcttcttacaattcctggcatcttgagtaggtgaaacactgtatcagactgggtgatgggcacattgtcatttcaccaagttcctggaactgttagaattgcttgtgtatggggatcctatgttagttcccctggatacattgttttatcagtcggaattcttaaataaagacatacttcccttcaaaaaaaaaaaaaaaaaa

SEQ ID NO: 75 - DNA, 2787 bp, HOMO SAPIENS
gcacagacgagatctcgatcgaaggcgagatggcggacgtgctagatcttcacgaggctgggggcgaagatttcgccatggatgaggatggggacgagagcattcacaaactgaaagaaaaagcgaagaaacggaagggtcgcggctttggctccgaagaggggtcccgagcgcggatgcgtgaggattatgacagcgtggagcaggatggcgatgaacccggaccacaacgctctgttgaaggctggattctctttgtaactggagtccatgaggaagccaccgaagaagacatacacgacaaattcgcagaatatggggaaattaaaaacattcatctcaacctcgacaggcgaacaggatatctgaaggggtatactctagttgaatatgaaacatacaaggaagcccaggctgctatggagggactcaatggccaggatttgatgggacagcccatcagcgttgactggtgttttgttcggggtccaccaaaaggcaagaggagaggtggccgaagacgcagcagaagtccagaccggagacgtcgctgacaggtcctctgttgtccaggtgttctcttcaagattccatttgaccatgcagccttggacaaataggactggggtggaacttgctgtgtttatatttaatctcttaccgtatatgcgtagtatttgagttgcgaataaatgttccatttttgttttctacatttaatgttactttcctgtcctaaaattgaaagttctaaagcatagcaaggctgtatggatcattgtgaagatacttctagggactgaactctatgtatttcttttttttcttttttttgagatagagtcttgctgtgttacccagggtggattgcagctgatcatagctcactgcagcttcaaactcttgggctcaagccatccttctgcctcactgtccctagtagttgggattacaggcacatgccaccatgcccagctaaatttttaatatttttgtagagatggggtcttgctgtgttacctgggctagttatgtgagtttctatattagacatagtctcaagtttcaggtagggtttaaagtagagacactggtcagtatttcttttttggggggaactaggagagcaggagtagaagtgagatgttaagatcttatggcactaaagacttactattctgttcctacatactctgttaggatcagatagatgttatagaaatgccttttgtttctcctgcccttcttgatgtcacagttttttgtacttccagctgtctaaaggcatgaatctcctcttggagcattctcccagacccttctttagaagagtctatactaagttcttggtgccctcttcggcagccaagggtgaaggccccatagaggagaggatccaaaggagcattgaggaggcccaagaggaaaaggatgtggctcaggctgggagggacttcagttagcatggtgggggagaaccagtaccacatacccagtaggtaataaggtgtccagcagaggatgaaggtcagcaagataagcagggccagtctcagggcccggagacgaacacggggacaattgtcaaaggagcgggggagggcaaattcaccagcaggggctaggaatttagaaaatatactgtaattcagacactcagcttctgatctgagtatagggtgaattgatggaggggcatagctagtgagacagagctcgcctcctacaaggaggagaatgttgcaaaccgttttccccttcccaacctgggactatatgatttcttacccccagggattatgatagaaatatgaagccaccaagtctagacttgatggtgttcaagaataaataatactgattgcctccctagtccttgtccagctaactcagctgtttataattgaagggattcaacaaaattatctctagcatcaggtgctagacatggttagaatctcaccatggtttagtgactggtagatagctattaggtaggtagataaataaatgatgctagaggcaacaggtctagggttaaggattaaggcctgggaattggagtctcaccatggctccccttccttgtctggggcctggacacactgaggacaatgcggctatagcagatggccatggcagtcagtggcagcagaaagaggcagcagaaggtgaagaggttataggtggtctcttgccattgagccttgaagctgcctttggtgacacactgagtgaaagggactgggccagctcagtggaccgtgtggaacaggaacagctggagtggagttgaggactattagaactggttcccctcaccacccaacctacccacctatgtcatactgtctcctcccaattcatccttaattccaagtgaagcagcacagtgctgagaaacagttcatccatggtgccatgttaaagaagttggaaatatatcttgaaaatcctatcttccttttaggcttgaatatgatgctgaacagtaagtttgttaaatcttggaacttaaaacaatcctgctttctcaagtactattctaacattgcgctttataagggatgatatttctaccacctcactcatatttttagctgaaatgattttcctggtatgtctgttattttgtggaaaaagaaatattgtgtaaaatgggtgctgccaaaattccaggccattttgcagggactctgaagtgacctttagtagtaatagtcttatgtgcagtaactataatggtaaagaatgttaaataataaaatttaacattttccaaatgct

SEQ ID NO: 76 - DNA, 1679 bp, HOMO SAPIENS
gccagaggcggagccgccgccctgccgcgactttcagactccgaccatggcctcgcgctggtggcggtggcggcgcggctgctcctggaagccggcggcgcggagccccgggcccggctcccccggccgtgcgggaccgttggggccgagcgccgctgccgaagtccgcgcgcaggttcataggcggaagggacttgacttgtctcagataccctatattaatcttgtgaagcatttaacatctgcctgtccaaatgtatgtcgtatatcacggtttcatcacacaaccccagacagtaaaacacacagtggtgaaaaatacaccgatcctttcaaactcggttggagagacttgaaaggtctgtatgaggacattagaaaggaactgcttatatcaacatcagaacttaaggaaatgtctgagtactactttgatgggaaagggaaagcctttcgaccaattattgtggcgctaatggcccgagcatgcaatattcatcataacaactcccgacatgtgcaagccagccagcgcgccatagccttaattgcagaaatgatccacactgctagtctggttcacgatgacgttattgacgatgcaagttctcgaagaggaaaacacacagttaataagatctggggtgaaaagaaggctgttcttgctggagatttaattctttctgcagcatctatagctctggcacgaattggaaatacaactgttatatctattttaacccaagttattgaagatttggtgcgtggtgaatttcttcagctcgggtcaaaagaaaatgagaatgaaagatttgcacactaccttgagaagacattcaagaagaccgccagcctgatagccaacagttgtaaagcagtctctgttctaggatgtcccgacccagtggtgcatgagatcgcctatcagtacggaaaaaatgtaggaatagcttttcagctaatagatgatgtattggacttcacctcgtgttctgaccagatgggcaaaccaacatcagctgatctgaagctcgggttagccactggtcctgtcctgtttgcctgtcagcagttcccagaaatgaatgctatgatcatgcgacggttcagtttgcctggagatgtagacagagctcgacagtatgtactacagagtgatggtgtgcaacaaacaacctacctcgcccagcagtactgccatgaagcaataagagagatcagtaaacttcgaccatccccagaaagagatgccctcattcagctttcagaaattgtactcacaagagataaatgacaactctttctgttctttctggcagctatcttaccagactgtgcctaaagaattttgtggaatacactttgtttgcttcatgtgcagataaccaaaaatcattttaaaagatatcaaacttattgatgggcaatttatttttttttattgcaaaagttttttcagaaaactttttaaatgtaattaataaaccacctgaatctgtcattctagtcctataaattataatcaaggtatcttgatggttatatgtggtattgtttacactgttaatatccacatgtaaggccattacacaaataaataaccaatgttaaaattcaaaaaaaaaaaaaaaaaaaaaaaaaaaaaaaaaaaaaaaaaaaaaaaaaaaaaaaaaaaaaaa

SEQ ID NO: 77 - DNA, 5166 bp, HOMO SAPIENS
ccggacccaagtctgcagcggcgccattggcgtgtggaaaatgccaccagatggcgggttaggattgcagctccgttgaaggcgcggcccccgctcccgaacccccggcgaccaccccgtaacaacccccccacatcgggaataacacaccggagacttttggggggaaactaggtcgatggtcggcggcgcccggatgggcagctgaggattgcctttgaggttattttaaaagttttgagttgtacagcacttgattattttgctgcattgtgaaaggacctctccagcaatgattacttcagaattaccagtgttacaggattcaactaatgaaactactgcccattccgatgctggcagcgagcttgaagaaacagaggtcaaaggaaaaagaaaaaggggtcgtcctggccggcctccatctacaaataagaaacctcgaaaatctccaggtgagaagagcagaattgaagctggaattagaggagcaggccgtggaagagctaatggacaccctcaacagaatggggaaggggagcctgtcacattatttgaggtggtgaaactggggaaaagtgcaatgcagtccgtggtggatgactggattgaatcatataaacaagacagggacatcgcacttctggatttaatcaacttttttatccagtgttcaggatgtcgaggtactgtgagaatagagatgtttcgaaatatgcagaatgcagaaatcatcagaaaaatgactgaagaatttgatgaggacagtggtgattatcctcttaccatgcctggacctcagtggaaaaaatttcgttcaaacttttgtgaatttattggagtcctgattcgacagtgtcagtatagcataatttatgatgagtatatgatggacacagtaatctcccttttgacgggtttgtcagactcccaggtcagagcttttaggcatacaagtaccctggctgccatgaagctcatgactgctctggtgaatgttgccttaaacctcagtattcatcaggataatacccagagacaatatgaagccgagagaaataaaatgattgggaagagagccaatgaaaggttggagttactacttcagaaacgcaaagagctgcaagaaaatcaggatgaaatcgaaaatatgatgaactctatttttaagggtatatttgttcatagataccgtgatgctattgctgagattagagccatttgtattgaagaaattggagtatggatgaaaatgtatagtgatgccttcctaaatgacagttacctaaaatatgttggctggactcttcatgacaggcaaggggaagtcaggctgaagtgtttgaaagctctgcagagtctatataccaatagagaattattccccaaattggaactattcactaaccgattcaaggatcgcattgtatcaatgacacttgataaagaatatgatgttgctgtggaagctattcgattggttactctgatacttcatggaagtgaagaagctctttccaatgaagactgtgaaaatgtttaccacttggtgtactcggcacatcgccctgttgctgtggcagctggagagttccttcacaaaaagctatttagcagacatgacccacaagcagaagaagcattagcaaagaggaggggaagaaacagcccgaatggaaacctcattaggatgctggttcttttctttcttgaaagtgagttacatgaacatgcagcctacttggtggacagtttatgggagagctctcaagaactgttgaaagactgggaatgtatgacagagttgctattagaagaacctgttcaaggagaggaagcaatgtctgatcgtcaagagagtgctcttatagagctaatggtttgtacaattcgtcaagctgctgaggcacatcctccagtgggaaggggtaccggcaagagagtgctaactgccaaagaaaggaaaactcaaattgatgatagaaacaaattgactgaacattttattattacacttcctatgttactgtcaaagtattctgcagatgcagagaaggtagcaaacttgctacaaatcccacagtattttgatttagaaatctacagcacaggtagaatggaaaagcatctggatgctttattaaaacagattaagtttgttgtggagaaacacgtagaatcagatgttctagaagcctgcagtaaaacctatagtatcttatgcagtgaagaatataccatccagaacagagttgacatagctcgaagccagctgattgatgagtttgtagatcgattcaatcattctgtggaagacctattgcaagagggagaagaagctgatgatgatgacatttacaatgttctttctacattaaagcggttaacttcttttcacaatgcacatgatctcacaaaatgggatctctttggtaattgctacagattattgaagactggaattgaacatggagccatgccagaacagatagtcgtgcaagcactgcagtgttcccattattcgattctttggcagttggtgaaaattactgatggctctccttccaaagaggatttgttggtattgaggaaaacggtgaaatcctttttggctgtttgccagcagtgcctgtctaatgttaatactccagtgaaagaacaggctttcatgttactctgtgatcttctgatgattttcagccaccaattaatgacaggtggcagagagggccttcagcctttggtgttcaatccagatactggactccaatctgaactcctcagttttgtgatggatcacgtttttattgaccaagacgaggagaaccagagcatggagggtgatgaagaagatgaagctaataaaattgaggccttacataaaagaaggaatctacttgctgctttcagcaaacttatcatttatgacattgttgacatgcatgcagctgcagacatcttcaaacactacatgaagtattacaatgactatggtgatattattaaggaaacactgagtaaaaccaggcagattgataaaattcagtgtgccaagactctcattctcagtttgcaacagttatttaatgaacttgttcaagagcaaggtcccaacctagataggacatctgcccatgtcagtggcattaaagaactggcacgtcgctttgcccttacatttggattggaccagattaagacacgagaagcagttgccacacttcacaaggatggcatagagtttgcatttaaataccaaaatcagaaaggacaagagtatccacctcctaatctggcttttcttgaagtactaagtgaattttcttctaaacttcttcgacaggacaaaaagacagttcattcatacctagagaaattccttaccgagcagatgatggaaaggagggaggatgtatggcttccactcatctcctatagaaattcattagtcactgggggtgaagatgatagaatgtctgtgaacagtggaagtagcagcagcaaaacctcatcagtaaggaataagaaaggacgacctccacttcataaaaaacgagtagaagatgagagtctggataacacatggctaaacaggactgacaccatgattcagactcctggccccctgccagcaccacaactcacatccactgtactgcgggagaacagtcggcccatgggagaccagattcaagaacctgagtctgaacatggttctgaaccagactttttacacaatcctcagatgcagatctcttggttaggccagccgaagttagaagacttaaatcggaaggacagaacaggaatgaactacatgaaagtgagaactggagtgaggcatgctgttcggggtctaatggaggaagatgctgagcccatctttgaagatgtgatgatgtcatcccgaagccagttagaagatatgaatgaagaatttgaggacaccatggttattgatctgcctccatcaagaaatcggcgagagagagctgagctaaggccagacttctttgactctgcagctatcatagaagatgattcaggatttggaatgcctatgttctgaagtctgaagaaaatttacaaatctggaactctattatttagagctagaggcctatatactgtgatagcttgtatggggaaaaacacttttgatgtgatctgatttgttttttaatcaaatgattaaggtcaatccctttttgcagtgacagaagaggagcatgtaaattacccaagggaatgttggtgaatgtcaactcagaaagactgacctgaaaatcatttgtgtcctactattggacttatcccaatacagatgtgtgtgtttttctggagggaggaagaaattttaaatttttaaaacagctgtcaagataaacactgttatacacctgttttatgaaaactcaacattgagtaaaaaaaaacatatttttaactttattttcctgttgtacaatttaaaaaccgttttaacattttgcctttttatgttttaaaagctaaccatttttattaaacctatgagtaagcagctcatcctaattgcgaagagtgttttggagttcactggatttggttgacctttgtggaacacaaataatgaaggagcagaacattgacaagctaagatgaaattctgacatagtacatctctgccaaaaaccacacaccctctgtggatatggatatgaattcccagattttatatactcttgaataaaaggtttatttttatttataagtgggcataaaataagaaatgtccatgcagccatttttccaacagatgctgtacaccgttcattttatatagactagggagattcaaatacagtgcattttctattggtatttgttctgtgcatttttagcaacttctaccagcaaataaagtattctcagtaaaacgaaaatgattctcaagttatcagtttgctgtttttaccacttatttcatgccctgccaaattcaagttacacagacttccattttcttaagataatcaatcatgaagaaatcctttatcaatcattcaaaagtaattttaagtgtaacataactgtgtttacttcccatgcacttaatacccttatgcgctaattttgtgaattaagtttactgattatagaagtatgtgctgcatagaagtctgt

SEQ ID NO: 78 - DNA, 4611 bp, HOMO SAPIENS
gtgtcgctcgctttctgtcagcctctctccctctccctctcccctctccttcctctcgcttcctctctcgcacctgagcgtacgcacctgcccgggcccggctccctcctcctctcccctccctctttccccgcccggccgcgggagcctcgtggctgcgtcaccgccgcccccccagacaagatggacaccgcggaggaagacatatgtagagtgtgtcggtcagaaggaacacctgagaaaccgctttatcatccttgtgtatgtactggcagtattaagtttatccatcaagaatgcttagttcaatggctgaaacacagtcgaaaagaatactgtgaattatgcaagcacagatttgcttttacaccaatttattctccagatatgccttcacggcttccaattcaagacatatttgctggactggttacaagtattggcactgcaatacgatattggtttcattatacacttgtggcctttgcatggttgggagttgttcctcttacagcatgccgcatctacaagtgcttgtttactggctccgtgagctcactactgacgctgccattagatatgctgtcaacggaaaatttgttggcagattgtttgcagggttgttttgtggtgacgtgcacactgtgtgcattcatcagcctggtgtggttgagagagcagatagtccatgggggagcaccaatttggttggagcatgctgccccaccgttcaatgctgcggggcatcaccaaaatgaggctccagcaggaggaaatggtgcagaaaatgttgctgctgatcagcctgctaacccaccagctgagaacgcagtggtgggggaaaaccctgatgcccaggatgaccaggcagaagaggaggaggaggacaatgaggaggaagatgacgctggtgtggaggatgcggcagatgctaataacggagcccaggatgacatgaattggaatgctttagaatgggaccgagctgctgaagagcttacatgggaaagaatgctaggacttgatggatcactagtttttctggaacatgtcttctgggtggtatctttaaatacactgttcattcttgtttttgcattttgcccttaccatattggtcatttctcccttgttggtttgggatttgaagaacacgtccaagcatctcattttgaaggcctaatcacaaccatagttgggtatatacttttagcaataacactgataatttgtcatggcttggcaactcttgtgaaatttcatagatctcgtcgcttactgggagtctgctatattgttgttaaggtctctttgttagtggtggtagaaattggagtattccctctcatttgtggttggtggctggatatctgttccttggaaatgtttgatgctactctgaaagatcgagaactgagctttcagtcggctccaggtactaccatgtttctgcattggctagtgggaatggtatatgtcttctactttgcctccttcattctactactgagagaggtacttcgacctggtgtcctgtggtttctaaggaatttgaatgatccagatttcaatccagtacaggaaatgatccatttgccaatatataggcatctccgaagatttattttgtcagtgattgtctttggctccattgtcctcctgatgctttggcttcctatacgtataattaagagtgtgctgcctaattttcttccatacaatgtcatgctctacagtgatgctccagtgagtgaactgtccctcgagctgcttctgcttcaggttgtcttgccagcattactcgaacagggacacacgaggcagtggctgaaggggctggtgcgagcgtggactgtgaccgccggatacttgctggatcttcattcttatttattgggagaccaggaagaaaatgaaaacagtgcaaatcaacaagttaacaataatcagcatgctcgaaataacaacgctattcctgtggtgggagaaggccttcatgcagcccaccaagccatactccagcagggagggcctgttggctttcagccttaccgccgacctttaaattttccactcaggatatttctgttgattgtcttcatgtgtataacattactgattgccagcctcatctgccttactttaccagtatttgctggccgttggttaatgtcgttttggacggggactgccaaaatccatgagctctacacagctgcttgtggtctctatgtttgctggctaaccataagggctgtgacggtgatggtggcatggatgcctcagggacgcagagtgatcttccagaaggttaaagagtggtctctcatgatcatgaagactttgatagttgcggtgctgttggctggagttgtccctctccttctggggctcctgtttgagctggtcattgtggctcccctgagggttcccttggatcagactcctcttttttatccatggcaggactgggcacttggagtcctgcatgccaaaatcattgcagctataacattgatgggtcctcagtggtggttgaaaactgtaattgaacaggtttacgcaaatggcatccggaacattgaccttcactatattgttcgtaaactggcagctcccgtgatctctgtgctgttgctttccctgtgtgtaccttatgtcatagcttctggtgttgttcctttactaggtgttactgcggaaatgcaaaacttagtccatcggcggatttatccatttttactgatggtcgtggtattgatggcaattttgtccttccaagtccgccagtttaagcgcctttatgaacatattaaaaatgacaagtaccttgtgggtcaacgactcgtgaactacgaacggaaatctggcaaacaaggctcatctccaccacctccacagtcatcccaagaataaagtagttgtctcaacaacttgaccttcccctttacatgtccttttttgtggacttctctctttggagatttttcccagtgatctctcagcgttgtttttaagttaaatgtatttgacttgtgttctcagcattcagagagcagcggtgtaagattctgctgttctccctggatcttctgacattactgctgtctgagatttgtatatgtgtaaatacaagttccttgataccctaaaaccttggattaaacagaatgtgcattgtacatctttaaacaaaatgtatattaatttattaaatctagttgtcactttattttggacctgctgtgatctcgacaggaaacgtgccacagagcagtagtgcgcaggcaagacttttcagtgacgccttgtggaacgcagttcatgatgtcctagcagctctcactaagggaactgtacattctttctttcttggctattcagaccttaccaagaacgttaaaggaaacaagtagaaatcagcagtggagtgtctgtggtaagaaaacatgaactttatgcttcactgttagttgtttgtggaagttattttgtataacaccaaagctgttgtacatttcctactgcctgatttttttcatgtgtctgtgtttgtaatattgtatagtatcttgtgctaggtgaggaaattatttttaattttgataatttaatattcctagtgtgatcagcattgggagttgggtttcagtggggcatgtctatacttagagaaaaaaagtccaaatgaagattttcatgagtcagcccccccgcccgcccccaccccacacccacatcctctcttttccacacacaactatctgtttattttttgtagcagtggccgaaagtcctgcaaggtcataaatctttcagagtgacatcaccaactgtactgcatcttactggatttaggacttctgagatgcttgtgaagtatagatgtggttgtggtcttagattgacagcattagagaagactggttagaacatctggtctcgctggttagtgcctcgttggctgaggactaggtgtgcatttctcctagcttttcatcaggaaatcccaaagtttccaaagctttttgtttacagaataaaacttcaaataaaaccaattcattatttgtccagaaggaagcttggctgagctggccttttaacataggaatgtatttcgttggaaacattctgaaaaatctcagagaactgaacccttacaaactttgttttccctcataaccaaagcttcaggttagaagtttagaaaaatagaatggttgggtacatgatctaaatgtttaatgctaaaggtatatcgtaagggtagtgtttgtttttgaacgataatttagaagttctcatagaaagcgtataacataggtcttcagaaactataaaagaattttcatatagtattaaaatccatagactaaaatctgagaattttttaacatatgcaagtcagccaaacataagctaccaaaataaagagcaatgtgttctggctgttttatacttcaacaattttttccctaagtggtaagcaattactttaaaacatatttttaaaaacatcggtatcgggagctgcggtggctccggccggttgtcctggcacacaaggaggcgaggctatgcgttcgaggccaacctaggcaaaattgg

SEQ ID NO: 79 - DNA, 556 bp, HOMO SAPIENS
  misc_feature (334)..(334): n is a, c, g, or t
gaaggcttcgctttgtgatttgaaacaaggtaatttttttaaattggctttggtgatgtgtattggaacaccattgttttcagcataattacgcatttcacagcttaattcagccattacacgtgatgcagtgtttagacatagcaataattacaaattgtacatgtttacagatagatataccgctgatcaaaataaaacagtggcagcaagaatgatgttctgtccatgtaagaaatcaatgaaatataattaagaacgaactgtatctcattgactcaaaacattgcatctgcctttctgtcccatctgttttctaaacaaaaatcttccngtgctgcgtggttgtttttatttgtatcctagaaccatcctctcgagttccacaccgttgtattttctacacctaagcttggtgtgttctgcacaggaaatgtttcttggatgttttatcctcataccaagtgggaatttaaaatttaagagattacccacactctttgcctttctgtacatgtgatgaagaaagagtgggtgtaacccagcactctaaaat

SEQ ID NO: 80 - DNA, 9727 bp, HOMO SAPIENS
gcgcaagaggatcagggatagcctctgagctcgggttcccagggttcgtagcttccaacggctgcgcgcgcacttcggtcgcgggcggtgaggtgctgttgctgaaacgctgccgctgagggtggactcgatttcccagggtcccgccgcgggagtctccggcgggcgggcgcgcgcgagccaccgagcgaggtgatagaggcggcggcccaggcgtctgggtcctgctggtcttcgcctttcttctccgcttctaccccgtcggccgctgccactggggtccctggccccaccgacatggcggcggtgttgcagcaagtcctggagcgcacggagctgaacaagctgcccaagtctgtccagaacaaacttgaaaagttccttgctgatcagcaatccgagatcgatggcctgaaggggcggcatgagaaatttaaggtggagagcgaacaacagtattttgaaatagaaaagaggttgtcccacagtcaggagagacttgtgaatgaaacccgagagtgtcaaagcttgcggcttgagctagagaaactcaacaatcaactgaaggcactaactgagaaaaacaaagaacttgaaattgctcaggatcgcaatattgccattcagagccaatttacaagaacaaaggaagaattagaagctgagaaaagagacttaattagaaccaatgagagactatctcaagaacttgaatacttaacagaggatgttaaacgtctgaatgaaaaacttaaagaaagcaatacaacaaagggtgaacttcagttaaaattggatgaacttcaagcttctgatgtttctgttaagtatcgagaaaaacgcttggagcaagaaaaggaattgctacatagtcagaatacatggctgaatacagagttgaaaaccaaaactgatgaacttctggctcttggaagagaaaaagggaatgagattctagagcttaaatgtaatcttgaaaataaaaaagaagaggtttctagactggaagaacaaatgaatggcttaaaaacatcaaatgaacatcttcaaaagcatgtggaggatctgttgaccaaattaaaagaggccaaggaacaacaggccagtatggaagagaaattccacaatgaattaaatgcccacataaaactttctaatttgtacaagagtgccgctgatgactcagaagcaaagagcaatgaactaacccgggcagtagaggaactacacaaacttttgaaagaagctggtgaagccaacaaagcaatacaagatcatcttctagaggtggagcaatccaaagatcaaatggaaaaagaaatgcttgagaaaatagggagattggagaaggaattagagaatgcaaatgaccttctttctgccacaaaacgtaaaggagccatattgtctgaagaagagcttgccgccatgtctcctactgcagcagctgtagctaagatagtgaaacctgggatgaaactaactgagctctataatgcttatgtggaaactcaggatcagttgcttttggagaaactagagaacaaaagaattaataagtacctagatgaaatagtgaaagaagtggaagccaaagcaccaattttgaaacgccagcgtgaggaatatgaacgtgcacagaaagctgtagcaagtttatctgttaagcttgaacaagctatgaaggagattcagcgattgcaggaggacactgataaagccaacaagcaatcatctgtacttgagagagataatcgaagaatggaaatacaagtaaaagatctttcacaacagattagagtgcttttgatggaacttgaagaagcaaggggtaaccacgtaattcgtgatgaggaagtaagctctgctgatataagtagttcatctgaggtaatatcacagcatctagtatcttacagaaatattgaagagcttcaacaacaaaatcaacgtctcttagtggcccttagagagcttggggaaaccagagaaagagaagaacaagaaacaacttcatccaaaatcactgagcttcagctcaaacttgagagtgcccttactgaactagaacaactccgcaaatcacgacagcatcaaatgcagcttgttgattccatagttcgtcagcgtgatatgtaccgtattttattgtcacaaacaacaggagttgccattccattacatgcttcaagcttagatgatgtttctcttgcatcaactccaaaacgtccaagtacatcacagactgtttccactcctgctccagtacctgttattgaatcaacagaggctatagaggctaaggctgcccttaaacagttgcaggaaatttttgagaactacaaaaaagaaaaagcagaaaatgaaaaaatacaaaatgagcagcttgagaaacttcaagaacaagttacagatttgcgatcacaaaataccaaaatttctacccagctagattttgcttctaaacgttatgaaatgctgcaagataatgttgaaggatatcgtcgagaaataacatcacttcatgagagaaatcagaaactcactgccacaactcaaaagcaagaacagattatcaatacgatgactcaagatttgagaggagcaaatgagaagctagctgtcgcagaagtaagagcagaaaatttgaagaaggaaaaggaaatgcttaaattgtctgaagttcgtctttctcagcaaagagagtctttgttagctgaacaaagggggcaaaacttactgctaactaatctgcaaacaattcagggaatactggagcgatctgaaacagaaaccaaacaaaggcttagtagccagatagaaaaactggaacatgagatctctcatctaaagaagaagttggaaaatgaggtggaacaaaggcatacacttactagaaatctagatgttcaacttttagatacaaagagacaactggatacagagacaaatcttcatcttaacacaaaagaactattaaaaaatgctcaaaaagaaattgccacattgaaacagcacctcagtaatatggaagtccaagttgcttctcagtcttcacagagaactggtaaaggtcagcctagcaacaaagaagatgtggatgatcttgtgagtcagctaagacagacagaagagcaggtgaatgacttaaaggagagactcaaaacaagtacgagcaatgtggaacaatatcaagcaatggttactagtttagaagaatccctgaacaaggaaaaacaggtgacagaagaagtgcgtaagaatattgaagttcgtttaaaagagtcagctgaatttcagacacagttggaaaagaagttgatggaagtagagaaggaaaaacaagaacttcaggatgataaaagaagagccatagagagcatggaacaacagttatctgaattgaagaaaacactttctagtgttcagaatgaagtacaagaagctcttcagagagcaagcacagctttaagtaatgagcagcaagccagacgtgactgtcaggaacaagctaaaatagctgtggaagctcagaataagtatgagagagaattgatgctgcatgctgctgatgttgaagctctacaagctgcgaaggagcaggtttcaaaaatggcatcagtccgtcagcatttggaagaaacaacacagaaagcagaatcacagttgttggagtgtaaagcatcttgggaggaaagagagagaatgttaaaggatgaagtttccaaatgtgtatgtcgctgtgaagatctggagaaacaaaacagattacttcatgatcagatcgaaaaattaagtgacaaggtcgttgcctctgtgaaggaaggtgtacaaggtccactgaatgtatctctcagtgaagaaggaaaatctcaagaacaaattttggaaattctcagatttatacgacgagaaaaagaaattgctgaaactaggtttgaggtggctcaggttgagagtctgcgttatcgacaaagggttgaacttttagaaagagagctgcaggaactgcaagatagtctaaatgctgaaagggagaaagtccaggtaactgcaaaaacaatggctcagcatgaagaactgatgaagaaaactgaaacaatgaatgtagttatggagaccaataaaatgctaagagaagagaaggagagactagaacaggatctacagcaaatgcaagcaaaggtgaggaaactggagttagatattttacccttacaagaagcaaatgctgagctgagtgagaaaagcggtatgttgcaggcagagaagaagctcttagaagaggatgtcaaacgttggaaagcacgtaaccagcatctagtaagtcaacagaaagatccagatacagaagaatatcggaagctcctttctgaaaaggaagttcatactaagcgtattcaacaattgacagaagaaattggtagacttaaagctgaaattgcaagatcaaatgcatctttgactaacaaccagaacttaattcagagtctgaaggaagatctaaataaagtaagaactgaaaaggaaaccatccagaaggacttagatgccaaaataattgatatccaagaaaaagtcaaaactattactcaagttaagaaaattggacgtaggtacaagactcaatatgaagaacttaaagcacaacaggataaggttatggagacatcggctcagtcctctggagaccatcaggagcagcatgtttcagtccaggaaatgcaggaactcaaagaaacgctcaaccaagctgaaacaaaatcaaaatcacttgaaagtcaagtagagaatctgcagaagacattatctgaaaaagagacagaagcaagaaatctccaggaacagactgtgcaacttcagtctgaactttcacgacttcgtcaggatcttcaagatagaaccacacaggaggagcagctccgacaacagataactgaaaaggaagaaaaaaccagaaaggctattgtagcagcaaagtcaaaaattgcacacttagctggtgtaaaagatcagctaactaaagaaaatgaggagcttaaacaaaggaatggagccttagatcagcagaaagatgaattggatgttcgcattactgcgctaaagtcccaatatgaaggtcgaattagtcgcttggaaagagaactcagggagcatcaagagagacaccttgagcagagagatgagcctcaagaaccttctaataaggtccctgaacagcagagacagatcacattgaaaacaactccagcttctggtgaaagaggaattgccagcacatcagacccaccaacagccaatatcaagccaactcctgttgtgtctactccaagtaaagtgacagctgcagctatggctggaaataagtcaacacccagggctagtatccgcccaatggttacacctgcaactgttacaaatcccactactaccccaacagctacagtgatgcccactacacaagtggaatcacaggaagctatgcagtcagaagggcctgtggaacatgttccagtttttggaagcacaagtggatccgttcgttctactagtcctaatgtccagccttctatctctcaacctattttaactgttcagcaacaaacacaggctacagcttttgtgcaacccactcaacagagtcatcctcagattgagcctgccaatcaagagttatcttcaaacatagtagaggttgttcagagttcaccagttgagcggccttctacttccacagcagtatttggcacagtttcggctacccccagttcttctttgccaaagcgtacacgtgaagaggaagaggatagcaccatagaagcatcagaccaagtctctgatgatacagtggaaatgcctcttccaaagaagttgaaaagtgtcacacctgtaggaactgaggaagaagttatggcagaagaaagtactgatggagaggtagagactcaggtatacaaccaggattctcaagattccattggagaaggagttacccagggagattatacacctatggaagacagtgaagaaacctctcagtctctacaaatagatcttgggccacttcaatcagatcagcagacgacaacttcatcccaggatggtcaaggcaaaggagatgatgtcattgtaattgacagtgatgatgaagaagaggatgatgatgaaaatgatggagaacatgaggattatgaagaggatgaggaagatgatgatgatgatgaagatgacacagggatgggagatgagggtgaagatagtaatgaaggaactggtagtgccgatggcaatgatggttatgaagctgatgatgctgagggtggtgatgggactgatccaggtacagaaacagaagaaagtatgggtggaggtgaaggtaatcacagagctgctgattctcaaaacagtggtgaaggaaatacaggtgctgcagaatcttctttttctcaggaggtttctagagaacaacagccatcatcagcatctgaaagacaggcccctcgagcacctcagtcaccgagacgcccaccacatccacttcccccaagactgaccattcatgccccacctcaggagttgggaccaccagttcagagaattcagatgacccgaaggcagtctgtaggacgtggccttcagttgactccaggaataggtggcatgcaacagcatttttttgatgatgaagacagaacagttccaagtactccaactcttgtggtgccacatcgtactgatggatttgctgaagcaattcattcgccgcaggttgctggtgtccctagattccggtttgggccacctgaagatatgccacaaacaagttctagtcactctgatcttggccagcttgcttctcaaggaggtttaggaatgtatgaaacacccctgttcctagctcatgaagaagagtcaggtggccgaagtgttcccactactccactacaagtagcagccccagtgactgtatttactgagagcaccacctctgatgcttcggaacatgcctctcaatctgttccaatggtgactacatccactggcactttatctacaacaaatgaaacagcaacaggtgatgatggagatgaagtatttgtggaggcagaatctgaaggtattagttcagaagcaggcctagaaattgatagccagcaggaagaagagccggttcaagcatctgatgagtcagatctcccctccaccagccaggatcctccttctagctcatctgtagatactagtagtagtcaaccaaagcctttcagacgagtaagacttcagacaacattgagacaaggtgtccgtggtcgtcagtttaacagacagagaggtgtgagccatgcaatgggagggagaggaggaataaacagaggaaatattaattaaatggtctgtaaacaataacaactgtgaataagattatcaaatctgttttagtgtaatgattgtcaagtttaaaaacatttttatatataaactggtatactcatgtcaatattctttattaataaaatgtttttcagtgtcaaaatttattattcatttcttcattagttgactcctcctttgctcatcagtctaaggacagttgtaccagactttggataaggtctgcccagaacgagtagtaattgctcttgctgttctactaggcacatcaatgttatagtattgatctaaatggaagagaaaacatttttttagttaaaaagaaaacaatgcccaaactaaaaaataacttatgttgactattatgctcaaagacaatgtttatcattttaatagagatgtttttactaattaatttgaactttataacaaaaagaaaaacaattgcctagacttttcagcttttttgatgtttcaaaagattgacatttcaccatctttttgtaaaatcaggttcagctctcctttatgaagtaaacattaaagagtaaccaagtttgaaaaataatttacttggggttattccttttaaaaaatacatgccaatgtcattcatattatgaaattacaggcagaataacttagatttctgggcatttcaaagaaaagcatcctgagtaatataatttaattaataaaattagtttctcaggaacttctttctgatcttacagactctgcagtgatgcaaatcattataaccttgtgccaaacaaggtatctgttaaatgccacaaatgatagaagtaaaatactattgtcagtagcaagtttactctagtaactggatgttttatcgtaatctcatgaaggttagagcagaattgaattgcagtgccatcattttaattgaaattaaagcaaaagtcttaactcttttccacagcaattagaataagtaccgtagtgtaacttctcacattcagtcatcattgcagccagcatttttactttatcttcatgttttcacaaatgatatcacctccttgggaaactgttagttaataccttacctttagaaaaggcatagtaatcatagccgtcaggttttctgatgttgggcagtgatatagctgaggtaaccacatttggaagtcctctccacagtatactcactttaacttcattatgaaggacacctgtaagtggcatgtttaataaaagataccagattaaaaggcaatgtactatcttggaaagagccagacatctgagttttaatctcagttttagccctctgatgtagaactattgagggttatagactggtatataatgttcttggtaagaagtacttgataaatagtattggttataactaacaaacctgaacaaactgctttacttacccacaaggaaaaagaaagtattggtctttggttattcactaaggcaagtggatgagtttttcatcagtaagcttaaattattagggctgtttgatcagtatccatatttcataagccttactgtataagaaactgtattacatctacttatgtttaaggatttttttaacacaataaaaatgttacctttgtcttgataagccagtctggcaggtgaatattgaattctgatggtgtgtgtttgagaaggtcctatagcacgttcaaagcgacgtctcctaacctgtgtcgtttctccatacactggataatttagagcaggccttcttccagggcacttctgtacaggttcctgtttataaatatactgctgaatgctgccacctgttatgtattagaatatcacatggaaaatgaaaattaattttaataccctcagaaaaggtggaaaacaacttttacaatgtataggaaacagttttgttctcatttttcatataatatattgatattaataatggctattagtcaagggtattataaaaataattattaaactgaaatacttgttgaatgaatagatgcagcaaattacatagttatatatttaatttcaattgaaagtgacaagtgctcagtttggcagcacatatactaaaactggaatgatacagagattagcatggcccttgtgcaaggatgacatgcacatttgtgaagcgaaagtaaatgacattctatcagtgacctgaaaactcaaatgaattgtgacttgcctgtgaagaaatgaaaataaaaattgagggcaataagaatactaccctcaatattgatttttttcactgaaaatatttgatttcagccattaaagatatcttttgacagtaaagtcaataataaatgaaaaaaaaaaaaaaaaaaaaaaa

SEQ ID NO: 81 - DNA, 419 bp, HOMO SAPIENS
  misc_feature (185)..(185): n is a, c, g, or t
gccagcttatagacatgcaggaaccaattgttagttgacgtgttgatggcttcaaaccagtcagtgaaagtatttacattatggaaatcaggaacttttttcctcacaaagaaagattgttgttaaaaatttacctgctcaccactggatttgggacgtctgagggtatgaggcatttggttggnggaatcatgctactacatccttttgcactcttggcttgggtgtgtgtcttttcatttcatcagctgtcctaaattctggaagaaacctgtcagggtaaagtgtgtattctgtctttggctcaaaaaattataggaatgctgaccccagttacacatgattctctatcagcctaatacctaaacaggaaatgctttaaagtatcctaagttccagctcaaccttctttttagcta

SEQ ID NO: 82 - DNA, 1677 bp, HOMO SAPIENS
aggttctcttacatcgaccgcctaagagtcgcgctgtaagaagcaacaacctctcctcttcgtctccgccatcagctcggcagtcgcgaagcagcaaccatgcgtgagtgcatctccatccacgttggccaggctggtgtccagattggcaatgcctgctgggagctctactgcctggaacacggcatccagcccgatggccagatgccaagtgacaagaccattgggggaggagatgattccttcaacaccttcttcagtgagacgggggctggcaagcatgtgccccgggcagtgtttgtagacttggaacccacagtcattgatgaagttcgcactggcacctaccgccagctcttccaccctgagcaacttatcacaggcaaagaagatgctgccaataactatgcccgagggcactacaccattggcaaggagatcattgacctcgtgttggaccgaattcgcaagctggccgaccagtgcacgggtctccagggcttcttggttttccacagctttggtgggggaactggttctgggttcacctcgctgctcatggaacgtctctcagttgattatggcaagaagtccaagctggagttctctatttacccggcgccccaggtttccacagctgtagttgagccctacaactccatcctcaccacccacaccaccctggagcactctgattgtgccttcatggtagacaatgaggccatctatgacatctgtcgtagaaacctcgatattgagcgtccaacctatactaacctgaataggttaataggtcaaattgtgtcctccatcactgcttccctgagatttgatggagccctgaatgttgacctgacagaattccagaccaacctggtgccctatccccgcatccacttccctctggccacatatgcccctgtcatctctgctgagaaagcctaccatgaacagctttctgtagcagagatcaccaatgcttgctttgagccagccaaccagatggtgaaatgtgaccctcgccatggtaaatacatggcttgctgcctgttgtaccgtggtgacgtggttcccaaagatgtcaatgctgccattgccaccatcaagaccaagcgtaccatccagtttgtggattggtgccccactggcttcaaggttggcatcaactaccagcctcccactgtggtgcctggtggagacctggccaaggtacagagagctgtgtgcatgctgagcaacaccacagccattgctgaggcctgggctcgcctggaccacaagtttgacctgatgtatgccaaacgtgcctttgttcactggtacgttggggaggggatggaggaaggtgagttttcagaggcccgtgaggacatggctgcccttgagaaggattatgaggaggttggtgtggattctgttgaaggagagggtgaggaagaaggagaggaatactaaagttaaaacgtcacaaaggtgctgcttttacagggaagcttattctgttttaaacattgaaaagttgtggtctgatcagttaatttgtatgtagcagtgtatgctctcatatacaattactgacctatgctctaaaacatgaatgctttgttacagacccaagctgtccatttctgtgatgggttttgaataaagtattccctgtcttaaaaaaaaaaaaaa

SEQ ID NO: 83 - DNA, 1104 bp, HOMO SAPIENS
atgacagctcgcctggtcctctcccccactggactttgcttcttcctgagcacctatgggtgctccagtggtcggatcctcctggtgactggaggacggcatcttgggtctgcctctcccatgagtgccaagtccaggccgaggtgtggcccgttccctaggagtcatcctccacgggccgggggagaagctgagcccagtgaggccaaccgccctgctgggctggctgtgttccaggagcccaccgctgagcgtgcacacagcgtcgacccccgggacgcctggatgctcttcgtcaggcagagtgacaagggtgtcaatggcaagaagaggagcaggggcaaggccaagaagctgaagttcggcttgccagggccccctgggcctcccggtccccagggccccccaggccccatcatcccacccgaggcgctgctgaaggagttccagctgctgctgaaaggtgcggtgcggcagcgggagcgcgcggagcccgaaccctgtacgtgtggccccgccgggccggtcgctgcgagcctcgccccggtctcggccaccgccggggaggacgacgacgacgtggtgggggacgtgctggcactgctggccgcgcccctggccccggggccgcgggcgccgcgcgtggaggccgctttcctctgccgcctgcgccgggacgcgttggtggagcggcgcgcgctgcacgagcttggcgtctactacctgcccgacgccgagggtgccttccgccgcggcccgggcctgaacttgaccagcggccagtacagggcgcccgtggctggcttctacgctctcgccgccacgctgcacgtggcgctcggggagccgccgaggagggggccgccgcgcccccgggaccacctgcgcctgctcatctgcatccagtcccggtgccagcgcaacgcctccctggaggccatcatgggcctggagagcagcagtgagctcttcaccatctctgtgaatggcgtcctgtacctgcagatggggcagtggacctccgtgttcttggacaacgccagcggctgctccctcacagtgcgcagtggctcccacttcagtgctgtcctcctgggcgtgtga

SEQ ID NO: 84 - DNA, 3809 bp, HOMO SAPIENS
ctccttcaccaccctcccggaagtggagccgccctcgcgcccaccagcggctaccccctgcggcaggccccgcccacacaggctccgccccccggcgctccgccccctcctcttgtagtggcgccggcttgcatcccaggtcgtggcggttttggtgcctgaagcagggagcgcggagtcgttcccgagagaggcggccaggctatgctcgccggtttccggcgttccgctccggccagccagagtctctgtctcaacctgtgtccgtgctccagcagtctcctcagcccggccccgcggcgcggttggcggcggcgccccaggcgcgccccctcctccgatggcggcggagatccagcccaagcctctgacccgcaagccgatcctgctgcagcggatggaggggtcccaggaggtggtgaatatggccgtgatcgtgcccaaagaggagggcgtcatcagcgtctccgaggacaggacagttcgtgtttggttaaagagagacagtggacagtattggccaagcgtataccatgcaatgccttctccatgttcatgcatgtcttttaacccggaaacaagaagactgtccataggtctagacaatggtacaatctcagagtttatattgtcagaagattataacaagatgactcctgtgaaaaactatcaagcgcatcagagcagagtgacgatgatcctgtttgtcctggagctggagtgggtgctgagcacaggacaggacaagcaatttgcctggcactgctctgagagtgggcagcgcctgggaggttatcggaccagtgctgtggcctcaggcctgcaatttgatgttgaaacccggcatgtgtttatcggtgaccactcaggccaagtaacaatcctcaaactggagcaagaaaactgcaccctggtcacaacattcagaggacacacaggtggggtgaccgctctctgttgggacccagtccagcgggtgttgttctcaggcagttcagatcactctgtcatcatgtgggacatcggtgggagaaaaggaacagccatcgagctccaaggacacaacgacagagtccaggccctctcctatgcacagcacacgcgacaattgatctcctgtggcggtgatggtgggattgtcgtctggaacatggacgtggagaggcaggagacccctgaatggttggacagtgattcctgccaaaagtgtgatcagcctttcttctggaacttcaagcaaatgtgggacagtaagaaaattggtctaagacagcaccactgccgcaagtgtgggaaggccgtctgtggcaagtgcagctccaagcgctcctccatccccctgatgggcttcgagtttgaagtgagggtctgtgacagctgccacgaggccatcacagatgaagaacgtgcacccacagccaccttccatgacagtaaacataacattgtgcatgtgcatttcgatgcaaccagaggatggttactgacttctggaactgacaaggttattaagttgtgggatatgaccccagtcgtgtcttgatgactctcccaggaatcagaaagatagtatttactaaagaaacggttgttttaacccaaatcattaccagagtggtaaagcagacatgtgagaagtaagaaagaaactaaagaccctgaatgaatttgcagattacccatgtgcacagtggggacctggccagtgagcactcgcaaggggactcttccaacttgttcatacaatataaaagaagctatttttttaacaaatggtttatacagtctggctgtgctgcattgttttgagtgtaccgaaaaatctgtgtggggtgtttaatttttatacttttcaacaccccattttacttgttgctttgtcagagaaataagggaggtatctactcagagtattttggtcattatactttctgtgtttacttcaacatgtgtcacgtggccagcggctttttcttctcttccctctgcacctacctgcaccttctctgcctttcctggaggggatgtatttatgttatttattcccagtgtttctgctttcatgtcctcctcagtggagagatttggaaactcatcatgtggattcaccagccagctgctggaattgcctgaagagcgatttgtttgtaatgtctgcctcattcacgttcttatgaagtagaaaagactgtgtttctgcctcagttgcctctgtctttcccacattaaaaaaaaaaatgctgtgagaaagctgctcccaaccatggttatcacagaagtagattattttaactcagagcttcaacgatcagtgcctggatcatttagaattcagttggagcctcctgagcctcttgttttagcttttttgacgcagctctccctcactcgtaacaatgaaaacaaatgacacacacacaaaatcctacatcagcggccctcaaccttgttggcagcagggaccggtttcaaaatgaaactgttccacctcggatcagcaggcattagcttctcataaggagcacgcaacctaaatccctcgcatgcgcagttcacaatagagtttctgctcctgtgagaatctgacgccaccgctgatctgatgggaggcggagcccaggcagtaacacttgcttgcccactgctcacgtctgatgggtgcccccattcctcacaggctatggaccagtacccatctgcagcccagggttggggacccccaccatacatgctctgaaaataagtgtctttaagttgtgtttttctgtgtgacatcatctctgaacttgaacatgttcattacggcaagattgtaatcctgctgtattcctcgccctctgtattctatccctttaaaaactagatatttaaacattttatcctaatgtgtttcatcagaacactttgcacactttcttactaaaacggtatgtgggtggtccgagacagaatggtacctacagtgcaggctatgtttctgtgggaatggaaaagaggactttagaaagtgaacctgaagaactcttatttctaagggaatccagtcaagcttgagaaaatgaaatattcttgtgtgtagtgattcagctcaggatattgaagtcccttttaaaaatcttattttcacctgtaaaaatagaataaaaattaatggcaagcctgcgccaggtgcctgcccctcctaagcactttacacgcacagctcattcaacctcacgtgtcgggagcatcagggagctcaccagtctcttgaggatcacaggccaattgcttgtccttcccgacccaagccccaccccacagtgtcttgctctcttctgattttacaggttttttggcagtaatacacatgggagtgaaattgaaatcctccctattattttccctcttttcctggaaagccgttttttgccctcacaatcattcattacttctctaactagggggaagtactacaagctgtcctcaggtactgcccctacgtgtgtttccctgggatggggccttgctagaggtgattctgctgccccagcattgggaagcaggaccagtgcatgtgccccatgcagccacggtacatggaagctgtcacttgagccatcagaccggctcagcccatgtgaccggagctctgaagaggcacacacgcatgccccgcacaggctgttagcacttgtcgcctcgctgccctggtccagactacccttgcttgcgtcagtcaaaactgttgtaactactttgagtcttttctgcatgattgctctttgagagaactttaacaagggaattaaatttaaaatattcaaata

SEQ ID NO: 85 - DNA, 9682 bp, HOMO SAPIENS
agtagggaggtgggcaggagccagtgatgacggaatggcaatcacatttgacctctgatctgtttatttcctcctccttgacgtctccatataaatgttacacgggcatccccacactcggatacgcacccacagtggctgattcgggggtaaccgtgtcatttgcttgcaacactggcacctctgccctgcaccccgggagtgagcagtgagtgaggctcgggtctgggcgctggctccgaatcttcgggctgggagagactccaccatctgggggcggcctgggggagcagccttagtgtcttcctgctgatgcaatccgctaggtcgcgagtctccgccgcgagagggccggtctgcaatccagcccgccacgtgtactcgccgccgcctcgggcactgccccaggtcttgctgcagccgggaccgcgctctgcagccgcagacccggtccacacggccaggggctacgacccttgggatctgccctccgctcagctcgagcttccctcgtggccgacggaacaatgaaggattgcagtaacggatgctccgcagagtgtaccggagaaggaggatcaaaagaggtggtggggacttttaaggctaaagacctaatagtcacaccagctaccattttaaaggaaaaaccagaccccaataatctggtttttggaactgtgttcacggatcatatgctgacggtggagtggtcctcagagtttggatgggagaaacctcatatcaagcctcttcagaacctgtcattgcaccctggctcatcagctttgcactatgcagtggaattatttgaaggattgaaggcatttcgaggagtagataataaaattcgactgtttcagccaaacctcaacatggatagaatgtatcgctctgctgtgagggcaactctgccggtatttgacaaagaagagctcttagagtgtattcaacagcttgtgaaattggatcaagaatgggtcccatattcaacatctgctagtctgtatattcgtcctacattcattggaactgagccttctcttggagtcaagaagcctaccaaagccctgctctttgtactcttgagcccagtgggaccttatttttcaagtggaacctttaatccagtgtccctgtgggccaatcccaagtatgtaagagcctggaaaggtggaactggggactgcaagatgggagggaattacggctcatctctttttgcccaatgtgaagcagtagataatgggtgtcagcaggtcctgtggctctatggagaggaccatcagatcactgaagtgggaactatgaatctttttctttactggataaatgaagatggagaagaagaactggcaactcctccactagatggcatcattcttccaggagtgacaaggcggtgcattctggacctggcacatcagtggggtgaatttaaggtgtcagagagatacctcaccatggatgacttgacaacagccctggaggggaacagagtgagagagatgtttggctctggtacagcctgtgttgtttgcccagtttctgatatactgtacaaaggcgagacaatacacattccaactatggagaatggtcctaagctggcaagccgcatcttgagcaaattaactgatatccagtatggaagagaagagagcgactggacaattgtgctatcctgaatggaaaatagaggatacaatggaaaatagaggataccaactgtatgctactgggacagactgttgcatttgaattgtgatagatttctttggctacctgtgcataatgtagtttgtagtatcaatgtgttacaagagtgattgtttcttcatgccagagaaaatgaattgcaatcatcaaatggtgtttcataacttggtagtagtaacttaccttaccttacctagaaaaacattaatgtaagccatataacatgggattttcctcaatgattttagtgcctccttttgtacttcactcagatactaaatagtagtttattctttaatataagttacattctgctcctcaaacaaatgcaattttttgtgtgtgtttgaaagctaatttgagaaaatttcataggttacatttcctgcagcctatctttatccacagaaagtgttttcttttttttaaatcaagacttttaaaactggatttcctcccatcactgttttttgaaggtcctccaagtccgtgttaaggtaaatatctgttttcttcctgatgtcacagcctgagcatactctgtgcattaggaagacctgagtgcatttcccaccattgtcctttccacattatgttgtagctggctggctgtcaggcgactacaagactgagggtcttgtgccttatagatctttgtatcccccatggctgacatatagtaggtactcagtaaatggttttataatgaatcagtgaacattttgcttctatagaagtgtaccttctttgtttctatattatgaaacctctttattagaatttgtgattgattctgacagtgtatagatttaccttatattgtctttattttccatgagctactaagtcattagagatactctgaagcatagttagtttaggaaatcacttcatattgattgtattagaattatcttggaattgaagatatatccctagagcaggggaccccaacccccaggccatgggccacacagcaggaagaggtgagtggtgggccattgaggagcttcatctgtatttatggctacttcccatcactcgaattaccacctgaactccacctcttgtcagctcagtggcagcattagattctcataggagcacaaatcctattgtgaactctgcatgcaagggatctaggctatgcgctccttatgagaatctaatgcttgatgacctgaggtgtaacagtttcatcctgaaaccacccttcaccctgcagtctgtggaaaaattgtcttccacaaaactggtccctggtgccaaaaatgttggggaccactgctctagagagaggtcatgatatcataccaaccaaatggaaatgacaaatgttttatgtcaagtgttaattgcagaaataaatcttttttttttttttttggtagaaaacaaagaggcatactctgatttttatactctgtttttgcaggtgctcttttctttgaatggagatttgatgagcaagtggttaggatgcagggagagctactatgggtgatattttccttgtttaggagctgtgagttaaaattgtatcctttgtggtttatctaaggaaagtcaaatcttgacagaaaacatttttccttggaaggtcaactctcagacattgtattttggtttccctcagtcctcataacttccttcttgctgaacatattttattctcttttcagagaaggaaaataaaaaggattctaaaagtttgatgcattggaaaaatttccttgaggcatttagcaacacatagaaaatgggctttgattcttttccaaaacttttagccatagggtcttttatagacagggatagtaaaatgaaaattgagaaatataagatgaaaaggaatgataaaaatatcttttagggggcttttaattggtgatctgaaatcttgggagaagctgttcttttcaggcctgaggtgctcttgactgtcgcctgcgcactgtgtaccccgagcaacattctaagggtgtgctttcgccttggctaactcctttgacctcattcttcatatagtagtctaggaaaaagttgcaggtaatttaaactgtctagtggtacatagtaactaaatttctattcctatgagaaatgagaattatttatttgccatcaacacattttatactttgcatctccaaatttattgtggcgagacttgtccattgtgaaagttagagaacattatgtttgtatcatttctttcataaaacctcaagagcatttttaagcccttttcatcagacccagtgaaaactaaggatagatgtttaaaaactggaggtctcctgataaggagaacacaatccaccattgtcatttaagtaataagacaggaaattgaccttgacgctttcttgttaaatagatttaacaggaacatctgcacatcttttttccttgtgcactatttgtttaattgcagtggattaatacagcaagagtgccacattataactaggcaattatccattcttcaagacttagttattgtcacactaattgatcgtttaaggcataagatggtctagcattaggaacatgtgaagctaatctgctcaaaaagatcaacaaattaatattgttgctgatatttgcataattggctgcaattatttaatgtttaattgggttgatcaaatgagattcagcaattcacaagtgcattaatataaacagaactggtggcacttaaaatgataatgattaacttatattgcatgttctcttcctttcacttttttcagtttctacatttcagaccgagcttgtcagcttttttgaaaacacatcagtagaaaccaagattttaaaatgaagtgtcaagacaaaggcaaaacctgagcagttcctaaaaagatttgctgttagaaattttctttgtggcagtcatttattaaggattcaactcgtgatacaccaaaagaagagttgacttcagagatgtgttccatgctctctagcacaggaatgaataaatttataacacctgctttagcctttgttttcaaaagcacaaaggaaaagtgaaagggaaagagaaacaagtgactgagaagtcttgttaaggaatcaggttttttctacctggtaaacattctctattcttttctcaaaagattgctgtaagaaaaaatgtaagacaaaaaaaaaaaaaaaaaacaaacagaggcagaggcaggcagtagcaagaaagcagagcgtaacatcagctagatggtaacatgcaatgtcagctctcttgaagacatgggaaacctaagttacaccttgggttaaaattcttcaccatattagttttgttgcttcataaaatttacctaagcaagtggtcttgcttgcctcaaatccaagcagtcttgaacacttggaggcaattaatgagtatatcttagtcaaaagaattgttggagctttttattaaagctacagtttcagttctgcttttggggaattgtgctatgaaagcagctgccaaaataagctcatttattttcttcaatcccactcagtgctcagtcactatattctgtttcctttttttttttcaagttgcatatttggtttccccttatgattgggaaagatgaattttcagcagaaaacattgtttgttcactttcaaagagtgatagtttctaaaacatttagagcaataaatattcatcagaggtaccaagtaagccggcagaagagttaagggttagagaaatcccttatttcatgtcttgactctaaaattatcaaagtacttttccttgtaatgtggatttcttcttatgcggatatgcaaaaacttcagttatacgtagtaatgctagcaggtaattttagtagacattttataacaactgtcactttgtttcgccacatgtagagtttgttcagctattttccagatatctccccacaaaaggaggcaaagggtaccagcttttcaatgagcattacctattacttggcaaagatgatgaagactctattaatagttcatttgataaatgttgacataaccaacaatagagattaggaagttagttttaagaaatcaatggcatatagacattaccctcatggagtttgtattctactacttgaactgattgtagctataaaagcatagttagatagctgaatagttagatcataagcaaagaaggccagaacacatctcttatcaagaaatcaatgaatagtttatctcatttttaaagcaactttatccttctttaattccttcctttcttctagtgcaaaactacttaataaggttggtgtttaggttagtgttcacaccattcctcatctggtgtgaattaccttctctttctttactatttactaccaacctagtacatgtgttgactgaattcttttcaaacaatgttgagttatcatggtgcacctaataaattaacaccacagattacagcatccttgctgattttctcagcaaagccagattagatggaaataaacaaagaaaatgatcctagagtgaatttttctagaaaatatctattatgaaccatgctgtttaaagtattagcttgaaggtgatggatccagctattcagaaaataactttcatataaccatgattttgcacagtatgaggtcttaaatgtgtggaaagagataaattttttatcattaccacaaaccccttttaaagattcaaaggtggaagaaagtgatttattttttctcttcagcatacatatataaaagacttgtcagatgtttaatttggggaggttgataatgaaacatatcaacagagtatagtagttatagtagtgtttgtgggtaaataatttcctggggtcagacatatataaacatatttgcttcaaaatgataaaggcatgaaatcagtcttaaaaattgaaatgggggtgatgggggagaaaaagaagaacaaatttgaagtgccctttcaaatctgctggatacaagtattgaagttttaagtcatcttattctgtctgaaagtgtatttttcattctacaatagacccaatcaacaagacgtataacttgagttgcatgatgttcagtttatgtaatctactgttgggatggtaagaattgatgtaggctgtggtgtaagaatgaattaaaatatagtttcactggcttttctctacatatccactatcacaatggctaggtttcctgttgctcactattggattctggagaaaaatttaatgaaagatgatatcagaggaagaataagtggaggtagagaagaaaggaatgatagaggaggggaaaaaaacaaaacatatttttgtgttatccaaaggagctttttccttattctgtcaagcattgagatcttcttcagctttcaatgtagttgctaaatacaaataatgctactaggtagtgactaaatatagcaaacacttcatcagatattagaattaggtcacactattgaggttataatctgaaggttgtgttacatagaaaccactttagattattatcaacttggactaggctttattttataatagcatagtaagtaatatctattgtgtcatttcttcaaccattttattctaagatccatgaagcttcttgaggccaaataaaataataagtttagacaagaagtagattgtgacttttttcccttagagatactatttactatctcctatcctgataggtggaaggtttactgaattggaaattggttgactattagtttttaactaaaatgtgcaataacacattgcagtttcctcaaactagtttcctatgatcattaaactcattctcagggttaagaaaggaatgtaaatttctgcctcaatttgtacttcatcaataagtttttgaagagtgcagatttttagtcaggtcttaaaaataaactcacaaatctggatgcatttctaaattctgcaaatgtttcctggggtgacttaacaaggaataatcccacaatatacctagctacctaatacatggagctggggctcaacccactgtttttaaggatttgcgcttacttgtggctgaggaaaaataagtagttcgaggaagtagtttttaaatgtgagcttatagatagaaacagaatatcaacttaattatgaaattgttagaacctgttctcttgtatctgaatctgattgcaattactattgtactgatagactccagccattgcaagtctcagatatcttagctgtgtagtgattcttgaaattctttttaagaaaaattgagtagaaagaaataaaccctttgtaaatgaggcttggcttttgtgaaagatcatccgcaggctatgttaaaaggattttagctcactaaaagtgtaataatggaaatgtggaaaatatcgtaggtaaaggaaactacctcatgctctgaaggttttgtagaagcacaattaaacatctaaaatggctttgttacaccagagccatctggtgtgaagaactctatatttgtatgttgagagggcatggaataattgtattttgctggcaatagacacattctttattatttgcagattcctcatcaaatctgtaattatgcacagtttctgttatcaataaaacaaaagaatcctgtttgtgtggtttcatgaaatcagcattgttgaatgcatgaagtaataatgctaaattaacatttttatgatgtctcaaggtttctggtcaagggaagtaaatgtaggatagtatttttacaccaaaatgacacagagagaattgagcacaccagaaagaccagaaaccacaccactggatagagattcaatatgtttctttttcaaacatttggacaagaaaaaaatgggcatttaaaaattcttccttcccctggttatggatttatctgtagtaaaacttagctttgtcgtttgagatttgcacagaatggggggagtagattacctcttcccattcattgtcataatggatctacatcactgataaacaccatacttctatatgtggttaactagctttagaataaaagacactttaaaaagtaaaaggcctagagatcttcaatgaagtgtcccttttagccaaaccaggccttgcagaaattgtcctcaaaagcaccaagggagaacaaagccaagtgcagaattacccaagggtcacacattttgtattcattttcttataatttgcccaaatgatttgaagtacagcaaaacctgaagttttgcaaagagttactgtaaactgaacttaaaaatgtcagagtgctcggtgacccacttctccagaccctgtcaacctgtgaaaatattggcctttattcagatctctcaagaagttacgcgcagagtttggaaggtctaggcaaaggttattagtcaagtgttcttacagtgtcaacgctcaattcccacaagcgtgagaaagagagacctgtcattcctgagggtgatgacatacatttactggagcttatataatttatcagataagacagcagtttccttcagggtagaaagtgtgttttctacattgatttagtacaaaacaaaaagaaaaggggatatttcaaattttataattatttttctgctaagctgattcagtgtgatttaagcatatttttcaaatcatgaatctgattccatatacatatgtgccttatattgtgataatttatttttaagtgaaatatgctatcatagcctgactttatgtatagtggtgacaacttgcaggatcgcatttctgtaaccaaacggccgacagctgaggtgtagatgcttcctatggtctgtagaataatcactgggcttgttctctagctatgtctgtatgcaatcgcgacagtgttgatcaaaacccatgatcattctctccaaaggtctttgtcactaagccactagggattctgaaaagttcgtgagctgaaacaaataaattgagttggaagattaaaaaaaaaa

SEQ ID NO: 86 - DNA, 2025 bp, HOMO SAPIENS
agaatgcagcggccgccagcctggagcgcgggccctggggccgcaacccgcgccgggcgaggtggcagcacaccctgggccccccactccccgccgcaagtcctgaggatggccagcagagaaacaagaaaatggactccctggctgctggagagttgaatgccagccaccagccatgggtgccagagtttgtagcctattggaggaaaacacaccaagggaatcttcaaactcttcttctccactggctcctgctgtgctcctgtctccatcacctgtataatgcttcctgccatcctaccttccccgtggagtacagccatgctgtctgctgcttacagccaagattctggaaagaaatgtctcctttttcctcgtcatcaaccactcatttattcagcaagtgtttcttttacacttgcctgtgctgggcatggcagcaatgcagcagtgaacaaaaccaccagccctgctctcatgcagcttataatcaagtagagagacagacataaatgattaatagatgctcctgtaatggcggttgtgaggtgtgctgccacagcccagccacacacgccagttcccttctctgcacatgtacatgtctgctcatccttcccacctgaactcatgtgccacctcacttatgccccttcccaatgccgcacccacacaacagggtgtccctctgtgcccacagcagcccttgggtataactgttccccacagaggctgaaccccaagggcagagtccaggccacactcaccacggagacccctgcctggcacagagcccagcccagcagagatgctcagaagatgaatgaaagtccctgctgagattgatccaatctgtttgtgaacatctctggggtccaagaattcacggctttctttttctttagagagccttttgtttctttttgccattatatactatatttgggttagggcacaacaatgtgaatatacttaatactgaactctacacttgaaaatggttaagatggtaaagttttaagttatatgtattttgccacaattttttaaaatgcagagcataggtacaaagaaggaaaaaaagggggcaaggtccattttattgagaaataaagaacaaagggttcaattcagagaggattggattttaaaacgtaatttagattagggaaatgcaaatgaaaaccataataagtaagataccacttcacatctgttaggatggctattttaaaacaacaaaaacaacctgaaaataagtgttggcaaggatgtgaagaaatagatacccttgtgcattgctattgggaacgtaaaatcatgcagcctttgttgaaaacaatgtggtggttcctcaaaaacttagttatcatatgatcccgcagttccacttctaggaatatacccaaaagaattgaaagcagggactcaaagtgatatttgtacaccagtgtttgtagcagtattattcacaatagccaaaaggtggaaacaacccagatgtccatgacaagaggagtggataaacaaaatatggtgaatatgtacaatggaacataattcagctttaaaaaggaatgaaattctggtacatgttataacatagatgaaccttaaaaacattatgctaagtgaaataagccagacacagaaggaaaaataccagatgatcccacttatatgaggtacctagaatagtgaaattcatagagacagaaagtagaaggatggttgccaggggctggaaggaggaagaacagggagatactgcttagtggatgcagagtttatgttgagggtgatgaaaaagttctggagatggatggtggtgatggctgcacaacagtgagaatgtacttcatactatggaactctgcacttaaaaatggttaaaatggatgtagacattttatgtctattttgccataacaagaaagtaatttgggtgtattttagagattttagaaaatactgtaagcacaagaggaaaaaaattaaaatcattcgcaatcaccaggtagagac

SEQ ID NO: 87 - DNA, 3088 bp, HOMO SAPIENS
ggggaggggtgtgacgtacatccggcgagtagctggcggtcccgggtgctgctggttagtgtgctctgagggagggtccgagccagccgctgttttgccggaggagcccctcaggccggctgcttccaaccttcaatttgtaaaaaaaccagaaaacctcaggatccacaaagtatcatcaaatgaggtagtaagcattaataatgtctttcatctttgagtggatctacaatggcttcagcagtgtgctccagttcctaggactgtacaagaaatctggaaaacttgtattcttaggtttggataatgcaggcaaaaccactcttcttcacatgctcaaagatgacagattgggccaacatgttccaacactacatccgacatcagaagagctaacaattgctggaatgacctttacaacttttgatcttggtgggcacgagcaagcacgtcgcgtttggaaaaattatctcccagcaattaatgggattgtctttctggtggactgtgcagatcattctcgcctcgtggaatccaaagttgagcttaatgctttaatgactgatgaaacaatatccaatgtgccaatccttatcttgggtaacaaaattgacagaacagatgcaatcagtgaagaaaaactccgtgagatatttgggctttatggacagaccacaggaaaggggaatgtgaccctgaaggagctgaatgctcgccccatggaagtgttcatgtgcagtgtgctcaagaggcaaggttacggcgagggtttccgctggctctcccagtatattgactgatgtttggacggtgaaaataaaagagttttacttctctggactgatcctattcacagcttcctcatgaacttttctaatagaacaaggaaagctctccaaccatgtctggcgttgagaagccaagagtctctgtcaactctctcattgcccagtggtgacatgtgctcttctccacactgttgggaggtaatgctgccccacgtgctggtgcaggtcagtatcctgggacttggaagctggcaggatttgccgggtaaagctgtatgccatcatggggcacctgaaaagaaaaacacgtctcaccactgtggttgattcaaaagaaagtgattctattttttaaagaaagcgttgttaatgtaattggtatccctcctaactttttgagttcacaatttacttggtccagagttttctattcttttttttttttaaactaatgaatgacatttagatacttcataaaattatgaacagatatggaggccagagctcatttgggtaaacttactcctgctgagttagcaggttggtgagagaagctcccctgagctcacctgtctctctgactgccttggagtaggtggcataaccttgtgcacagagaactagaaaaggggcagaaccccggccttgcagttgtggcaggtttccactgtggtaagctaggttcattcctcatcaaggaatgtgtagcagattgttcactgtggaggagttaattatagaatgggttattgttgttattcttactcatgaagttacagattttagccagtctttgcttttatacttttgtgaaatttaatttctctctatagcaccttcctttttcgttttcagttatcaaaagtgactttgacctcataaaagagttgagaacatctctcgtgtcacatactgcaggtgcatcagttacttttgcacagattctagggggacatttttctgaataggaagacaggacaaagttaacagcttaagggctcttaattctgtgagttgaggacttaaaagtattgtagcatttgtttggatccatgaaaaatgtattcagtgggctttaaaatttccatttgcagaatttggtctctcaggctgtttgggagctcttttttttacattttttctcctttgacacctattttattggtgtttaaagtaaaggttaacatctgtagcttttccaggtttttttttttttttttttttttttggtatgaaattgtctttctccattgcagaaataagctagggaaacactaacccaaaaactttctgtagagctgttcctttggaggcagcatcacttattggcagtaaagactcagtataaaagcaccggcatccctacttgggtgatggggattaattttatagcattccattttcctagtgccacatgtgaaattggattttgatgatcttaatctatattctacccttataataaaagatcaaaagatatatctcctatgaacagattggagataggagatgaaaagttgggaggatgtctttattctaatgtgagggtagggaaaatgtggataacattactggggtgagggaggcattgttctttagttggagttctcattcttattctccagtactgacttgtggggaaagcatactttttcactgccaggtactgaatgcagaggctcagtgaagtatatatgtgggaagtgcatgcatttcgtttattagcaaacatagctggattaagacaaagttgttggtttggaaaggggttaaagccttaagtgaacaaatctagctaacagtgaatgaactaggtaatataacttgcatatttttaatttcctttggttaaaggtcccccatacttctctgttcggagacatgagaagtatgattacttcagtgttagttttcttaattttttttttcccctatttgtcccttgtcactttgttgcaagctagaaatctgtgggttatacatagggcagctctttgtgaaagtggtttattccactggagaaaggggattgaaaatcagttagaaccaatgtatttcttgccccacggaacactattcctataagatagctgaaagaagctgctgtgaggagctcagctccaaacacaggatcagcaccttgtataggaattcccatgaattatgacttctcattctgttttatcagagtgcatatatgtcctacttcaggaaaagtaaaacagtcatttacgaaagaaagtcaatctgtatcctaagcattttaataaaaagttaaaacaaaaaaaaaaaaaaaaaaa

SEQ ID NO: 88 - DNA, 9809 bp, HOMO SAPIENS
gcgggctggggggagggagaggggttgagtcaagatggcggccaaggtggcgaagcagcagccgcggcggcggcggcggctggagtgagcgtccgactcgccgcgccgaacgaggtcccggtgtagggccgcgcgccgtggccgcgtcccactcctcaggccggggcgcacgtcggctcccacgcttagccagctcccggtggtttcctagaaacatgattgtttattggcattgatctcacagtctggtgaggacttctttactgataatgtcaagttcaggttatcctcccaaccaaggagcattcagcacagaacaaagtcgttatcctcctcactctgtccagtatacatttcccaacacccgccaccagcaggagttcgcagtccctgattatcgttcctctcatcttgaagtgagtcaggcatcacagcttttgcagcaacagcagcagcaacagcttcgaaggcgaccttccttgctttcagaatttcacccaggttctgacaggcctcaagaaaggagaactagttatgaaccgtttcatccaggcccatccccagtggatcatgattcactggaatcgaagcgaccacgtctggaacaggtttctgattctcattttcagcgtgtcagtgctgcggttttgcctttagtgcacccgctgccagaagggctgagggcttctgcagatgctaagaaggatccagcattcggaggcaaacatgaagctccatcctctccaatttcggggcaaccatgtggagatgatcaaaatgcttcaccttcaaaactctcaaaggaagagttaatacagagtatggatcgtgtagatcgagaaattgcaaaagtagaacagcagatccttaaactgaaaaagaaacaacaacagcttgaagaagaggcagctaaacctcctgagcctgagaagcccgtgtcccctcctcctgtggagcagaaacaccgcagtattgtccaaattatttatgatgagaatcggaaaaaagcagaagaagctcataaaatttttgaaggtcttggcccaaaagttgaactgccactgtataaccagccatcagataccaaggtgtaccatgagaacatcaagacaaaccaggtgatgaggaaaaaactcattttattttttaaaagaagaaatcatgcaagaaaacaaagggaacaaaaaatctgccagcgttatgatcagctcatggaggcatgggagaaaaaagtggacagaatagaaaataatcctcggaggaaagctaaagaaagcaaaacaagggaatactatgaaaagcagtttccagaaattcgaaaacaaagagaacagcaagaaagatttcagcgagttgggcagaggggagctggtctttcagccaccattgctaggagtgagcatgagatttctgaaattattgatgggctctctgagcaggagaataatgagaaacaaatgcggcagctctctgtgattccacctatgatgtttgatgcagaacaaagacgagtcaagttcattaacatgaatgggcttatggaggaccctatgaaagtgtataaagataggcagtttatgaatgtttggactgaccatgaaaaggagatctttaaggacaagtttatccagcatccaaaaaactttggactaattgcatcatacttggagaggaagagtgttcctgattgtgttttgtattactatttaaccaagaaaaatgagaattataaagccctcgtcagaaggaattatgggaaacgcagaggcagaaaccagcaaattgctcgaccctcgcaagaagaaaaagtagaagaaaaagaagaggataaagcagaaaaaacagaaaaaaaagaagaagaaaagaaagatgaagaggaaaaagatgaaaaagaagactccaaagaaaataccaaggaaaaggacaagatagatggtacagcagaagaaactgaggaaagagagcaagccacaccccgggggcgaaagactgccaacagtcagggccgccgtaagggccggatcaccaggtccatgacaaacgaagctgcagctgccagtgctgcagccgcagcggctactgaagagcccccaccacctctgccaccgccaccagaacccatttctacagagcctgtggagacctctcgatggacagaagaagaaatggaagttgctaaaaaaggtctagtagaacatggtcgtaactgggcagcaattgctaaaatggtgggaacgaaaagtgaagctcaatgtaaaaacttctattttaactataaaaggcgacacaatcttgacaacctcttacagcagcataaacagaaaacttcacgaaaacctcgtgaagagcgagatgtgtctcaatgtgaaagtgtcgcttccactgtttctgctcaggaggatgaagatattgaagcctccaatgaagaagaaaatccagaagacagcgaagttgaagctgtcaagcccagcgaggacagtcctgaaaatgctacttctcgaggaaacacagaacctgcggttgagcttgagcccaccacggaaactgcacccagtacatctccctccttagcagttccaagtacaaaaccagctgaagatgaaagtgtggagacccaggtgaatgacagcatcagtgctgagacagcagagcagatggatgtagatcagcaggagcacagtgctgaagagggttctgtttgtgatcccccacccgctaccaaagctgactctgtggacgttgaagtgagggtgccagaaaaccatgcatctaaagttgaaggtgataataccaaagaaagagacttggatagagccagtgagaaggtggaacctagagatgaagatttggtggtagctcagcaaataaatgcccaaaggcccgagccccagtcagacaatgattccagtgccacgtgcagcgctgatgaggatgtggatggagagccagagaggcagagaatgtttcctatggactcaaagccttcactgttaaaccccactggatctatactcgtctcatctccgttaaaaccaaatccactggatctgccacagcttcagcatcgagctgctgttatcccaccaatggtatcctgcaccccatgtaacataccaattggaaccccagtgagcggctatgctctctaccagcgacacattaaagcaatgcatgagtcagcactcctggaggagcagcggcagagacaagaacagatagatttggaatgtagaagttctacaagtccatgtggcacatccaagagtccaaacagagagtgggaagtccttcagcctgctccacatcaagtgataactaatctccctgaaggcgttcggcttccgacaactcgaccaaccaggccaccgccccctctcatcccgtcatccaaaaccacagtggcttcagaaaaaccatcttttataatgggaggctccatctcacagggaacaccaggcacttatttgacttctcataatcaggcttcctacactcaagaaacacccaagccgtcagtgggatctatctctcttggactgccacggcaacaggaatctgccaaatcagctactttgccctacatcaagcaggaagaattttctccccgaagccaaaactcacaacctgagggtctgttggtcagggcccaacatgaaggtgtagtcagaggtaccgcaggagccatacaagaaggaagtataactcggggaactccaaccagcaaaatttcagtggagagcattccatccctacggggctctatcactcagggcaccccggctctgccccagactggcataccaacagaggctttggtgaaggggtccatttcgagaatgcccattgaagacagcagtcctgagaaaggcagagaggaagctgcatccaaaggccatgttatttatgaaggcaaaagtggacatatcttgtcatatgataatattaagaatgcccgagaagggactaggagtccaagaacagctcatgaaatcagtttaaagagaagctatgaatcagtggaaggaaatataaagcaagggatgtcaatgagggagtctcctgtatcagcaccgttagaggggctgatatgccgagcattacccagggggagtcctcattctgacctcaaagaaaggactgtattgtctggctccataatgcaggggacaccaagagcaacaactgaaagctttgaagatggccttaaatatcccaaacaaattaaaagggaaagtcctcccatacgagcatttgaaggtgccattaccaaaggaaaaccatatgatggcatcaccaccatcaaagaaatggggcgttccattcatgagattccaaggcaagatattttaactcaggaaagtcggaaaactccagaagtggtccagagcacacggccgataattgagggttccatttcccagggcacaccaataaagtttgacaacaactcaggtcaatctgccatcaaacacaatgtcaaatccttaatcacggggcctagcaaactatcccgtggaatgcctccgctggaaattgtgccagagaacataaaagtggtagaacggggaaaatatgaggatgtgaaagcaggcgagaccgtgcgttcccggcacacgtcagtggtaagctctggcccctccgttcttaggtccacactgcatgaagctcccaaagcacaactgagccctgggatttatgatgacaccagtgcacggaggacccctgtgagttatcaaaacaccatgtccagaggctcacccatgatgaacagaacttctgatgttacaatttcttctaacaagtctaccaatcatgaaaggaaatcgacactgacccctacccagagggaaagtatcccagcgaagtctccagtgcctggggtggaccctgtcgtgagccacagtccgtttgatccccatcacagaggcagcactgcaggcgaggtttatcggagccacctgcccacgcacttggatccagccatgccttttcacagggctttggatcctgcagcggctgcttacctgtttcagagacagctttcaccaactccaggttacccaagtcagtatcagctttacgcaatggagaacacaagacagacaatcttaaatgattacattacctcacaacagatgcaagtgaacttgcgtccagatgtggccagaggactctccccaagagagcagccactgggtctcccatacccagcaacgagaggaatcattgacctgaccaatatgcctccaacaattttagtgcctcatccagggggaacaagcactcctcccatggacagaatcacttatattcctggtacacagattactttccctcccaggccgtacaactctgcttccatgtctccaggacacccaacacaccttgcagctgctgcaagtgctgagagggaacgggaacgggagcgggagaaggagcgggagcgggaacggattgctgcagcttcctccgacctctacctgcggccaggctcagaacagcctggccgacctggcagtcatggatatgttcgctccccttccccttcagtaagaactcaggagaccatgttgcaacagagacccagtgttttccaaggaaccaatggaaccagtgtaatcacacctttggatccaactgctcagctacgaatcatgccactgcctgctgggggcccttcaataagccaaggcctgccagcctcccgttacaacactgctgcggatgccctggctgctcttgtggatgctgcagcttctgcaccccagatggatgtgtccaaaacaaaagagagtaagcatgaagctgccaggttagaagaaaatttgagaagcaggtcagcagcagttagtgaacagcagcagctagagcagaaaaccctggaggtggagaagagatctgttcagtgtttatacacttcttcagcctttccaagtggcaagccccagcctcattcttcagtagtttattctgaggctgggaaagataaagggcctcctccaaaatccagatatgaggaagagctaaggaccagagggaagactaccattactgcagctaacttcatagacgtgatcatcacccggcaaattgcctcggacaaggatgcgagggaacgtggctctcaaagttcagactcttctagtagcttatcttctcacaggtatgaaacacctagcgatgctattgaggtgataagtcctgccagctcacctgcgccaccccaggagaaactgcagacctatcagccagaggttgttaaggcaaatcaagcggaaaatgatcctaccagacaatatgaaggaccattacatcactatcgaccacagcaggaatcaccatctccccaacaacagctgcccccttcttcacaggcagagggaatggggcaagtgcccaggacccatcggctgatcacacttgctgatcacatctgtcaaattatcacacaagattttgctagaaatcaagtttcctcgcagactccccagcagcctcctacttctacattccagaactcaccttctgctttggtatctacacctgtgaggactaaaacatcaaaccgttacagcccagaatcccaggctcagtctgtccatcatcaaagaccaggttcaagggtctctccagaaaatcttgtggacaaatccaggggaagtaggcctggaaaatccccagagaggagtcacgtctcttcggagccctacgagcccatctccccaccccaggttccggttgtgcatgagaaacaggacagcttgctgctcttgtctcagaggggcgcagagcctgcagagcagaggaatgatgcccgctcaccagggagtataagctacttgccttcattcttcaccaagcttgaaaatacatcacccatggttaaatcaaagaagcaggagatttttcgtaagttgaactcctctggtggaggtgactctgatatggcagctgctcagccaggaactgagatctttaatctgccagcagttactacgtcaggctcagttagctctagaggccattcttttgctgatcctgccagtaatcttgggctggaagacattatcaggaaggctctcatgggaagctttgatgacaaagttgaggatcatggagttgtcatgtcccagcctatgggagtagtgcctggtactgccaacacctcagttgtgaccagtggtgagacacgaagagaggaaggggacccatcacctcattcaggaggagtttgcaaaccaaagctgatcagcaagtcaaacagcaggaaatctaagtctcctatacctgggcaaggctacttaggaacggaacggccctcttcagtctcctctgtacattcagaaggggattaccataggcagacgccagggtgggcctgggaagacaggccctcttcaacaggctcaactcagtttccttataaccctctgactatgcggatgctcagcagtactccaccaacaccgattgcatgtgctccctctgcggtgaaccaagcagctcctcaccaacagaacaggatctgggagcgagagcctgccccactgctctcagcacagtacgagaccctgtcggatagtgatgactgaactgcacaaagtgaggggaacagggtgcaggagagggatctctagtttttgtggtttaatttttagtagcaggtcaaaaacctgccctcctgtgacttattccctgagacttttcaggagagccagcccacagatgatgaagaaatgatggaagttcatttggagagtcaaatgggaaaaaaacaaacaaaaaactgcctttgatacaggcaattcagtggactataataatagtggagggttgagatgtagagtttttaaaaagtgaacagttgctgttcttacatctgtaaagaaaaccataatgtctttaaatcactcttctgtaaatagatgacctttttgcagtgtatatccccttgctgtagtatctggtgtacttatgttcaaatcagcgcatcaactttgggggtgatttttaaaaatctttttgtctatctatctttttaaccctagccttctaaacaacctcatacagcccagttacataatgttggctgtcacgggcattgtacttttatctgatattgtttcctctaaattcagctttccagtgatgtttaaaatcttgtgaaaatgtttagatttttaacacagaccctgtcataaaatctgtacattagggtcaaaaggtaaaagtaacaaattctgccatattgtaaatttccagtgcaggctttaatttttttttttcattagtagcactgaaaaaatattactgcatgggtatgttctagttcagtttataaagttttaaaggcttatttgaggcatacctcactgttacgcacactggtaatttaaccatgcccctaagtattccttttctcctgcatttgatgcagcccaacaaagcttttgttttgaaataaatttgactaccctgtccatagctacagtagattatttgtggtttaaggctcctggtgtctcaggttccaaaggaaaagcttacatatttttcccttagtttgaatatatgattggttgggttaaaagataatgatctgtgtagtatttagataagctttatgctgcatcctgaaaaactcatggtgaacacagtcctttttccccatcactatggaccagcatttactctcactttgctcccttgggacaagagtttactgttaaatgttttcatttcacagagtctcaaggtgcaaataatttaaaagactgaattctaaactaattatggtactagagggccagttttatctttcattaagaattgcttgctgaattttaaagtttttttcatacaatttatcatagcatttaagtatctttctataacatagatactaacagttttgggagaatgccactggtaactggaaaggggagaaacagatctctcaggatgataaaaattagcactttacagactttcaagtagacctaaacttttaaacaaaagtactcaaggcttttaaggaagcagctctgtgattagctactgaccaagaccctcctatcactggtgtctaatccctatgttacagatgaagacacaggtttagtactttgcccatatagttaaattagtgacagagataggccataagcccacatttgtcttcagtcaaagctttcactcctgtccctgttccactcctgtatacctgaggtccccaacataaactttagatcaggcttagtggtcagcattcctagtacttggaaagttggtattttttacaacagatatatgtaaacatataaaaatttcaaaatgaatgaaaaacagtgactaaatgttccacttcacagttttctgctgaatttttttttttcaggtactggtaatattttagagtttgttaataatttatattgccaacctaccataaaagagattatgatggtatttttctatgaccctgagggtcttaagctattctgagtcagaatacagttgacccttgaacaacacgggtttgaactgtgtgggtccacttatacatggattttcttccacctctgccacccaagatagcaagaccaaccccttctcatcctcagcctattcaacatgaagatgacaaggatgaagaccttcatgatgatccacttccacttaatgaatagtaaatatattttctcttccttataatcttaacaaacattttctcttctctagcttactttattgtaagaatacagtatataatacatatacaaaatatgtgtcaaaaaaaaaaaaaaaaa

SEQ ID NO: 89 - DNA, 2751 bp, HOMO SAPIENS
ccctttactcctggctgcggggcgagccgggcgtctgctgcagcggccgcggtggctgaggaggcccgagaggagtcggtggcagcggcggcggcgggaccggcagcagcagcagcagcagcagcagcagcaaccactagcctcctgccccgcggcgctgccgcacgagccccacgagccgctcaccccgccgttctcagcgctgcccgaccccgctggcgcgccctcccgccgccagtcccggcagcgccctcagttgtcctccgactcgccctcggccttccgcgccagccgcagccacagccgcaacgccacccgcagccacagccacagccacagccccaggcatagccttcggcacagccccggctccggctcctgcggcagctcctctgggcaccgtccctgcgccgacatcctggaggttgggatgctcttgtccaaaatcaactcgcttgcccacctgcgcgccgcgccctgcaacgacctgcacgccaccaagctggcgcccggcaaggagaaggagcccctggagtcgcagtaccaggtgggcccgctactgggcagcggcggcttcggctcggtctactcaggcatccgcgtctccgacaacttgccggtggccatcaaacacgtggagaaggaccggatttccgactggggagagctgcctaatggcactcgagtgcccatggaagtggtcctgctgaagaaggtgagctcgggtttctccggcgtcattaggctcctggactggttcgagaggcccgacagtttcgtcctgatcctggagaggcccgagccggtgcaagatctcttcgacttcatcacggaaaggggagccctgcaagaggagctggcccgcagcttcttctggcaggtgctggaggccgtgcggcactgccacaactgcggggtgctccaccgcgacatcaaggacgaaaacatccttatcgacctcaatcgcggcgagctcaagctcatcgacttcgggtcgggggcgctgctcaaggacaccgtctacacggacttcgatgggacccgagtgtatagccctccagagtggatccgctaccatcgctaccatggcaggtcggcggcagtctggtccctggggatcctgctgtatgatatggtgtgtggagatattcctttcgagcatgacgaagagatcatcaggggccaggttttcttcaggcagagggtctcttcagaatgtcagcatctcattagatggtgcttggccctgagaccatcagataggccaaccttcgaagaaatccagaaccatccatggatgcaagatgttctcctgccccaggaaactgctgagatccacctccacagcctgtcgccggggcccagcaaatagcagcctttctggcaggtcctcccctctcttgtcagatgcccgagggaggggaagcttctgtctccagcttcccgagtaccagtgacacgtctcgccaagcaggacagtgcttgatacaggaacaacatttacaactcattccagatcccaggcccctggaggctgcctcccaacagtggggaagagtgactctccaggggtcctaggcctcaactcctcccatagatactctcttcttctcataggtgtccagcattgctggactctgaaatatcccgggggtggggggtgggggtgggtcagaaccctgccatggaactgtttccttcatcatgagttctgctgaatgccgcgatgggtcaggtaggggggaaacaggttgggatgggataggactagcaccattttaagtccctgtcacctcttccgactctttctgagtgccttctgtggggactccggctgtgctgggagaaatacttgaacttgcctcttttacctgctgcttctccaaaaatctgcctgggttttgttccctatttttctctcctgtcctccctcaccccctccttcatatgaaaggtgccatggaagaggctacagggccaaacgctgagccacctgcccttttttctgcctcctttagtaaaactccgagtgaactggtcttcctttttggtttttacttaactgtttcaaagccaagacctcacacacacaaaaaatgcacaaacaatgcaatcaacagaaaagctgtaaatgtgtgtacagttggcatggtagtatacaaaaagattgtagtggatctaatttttaagaaattttgcctttaagttattttacctgtttttgtttcttgttttgaaagatgcgcattctaacctggaggtcaatgttatgtatttatttatttatttatttggttcccttcctattccaagcttccatagctgctgccctagttttctttcctcctttcctcctctgacttggggaccttttgggggagggctgcgacgcttgctctgtttgtggggtgacgggactcaggcgggacagtgctgcagctccctggcttctgtggggcccctcacctacttacccaggtgggtcccggctctgtgggtgatggggaggggcattgctgactgtgtatataggataattatgaaaagcagttctggatggtgtgccttccagatcctctctggggctgtgttttgagcagcaggtagcctgctggttttatctgagtgaaatactgtacaggggaataaaagagatcttatttttttttttatacttggcgttttttgaataaaaaccttttgtcttaaaaaaaaaaaaaaaaaaaaaaaaaaaaaaaaaaaaaaaaaaaa

SEQ ID NO: 90 - DNA, 277 bp, HOMO SAPIENS
  misc_feature (121)..(125): n is a, c, g, or t
  misc_feature (127)..(127): n is a, c, g, or t
  misc_feature (129)..(129): n is a, c, g, or t
  misc_feature (133)..(148): n is a, c, g, or t
  misc_feature (150)..(150): n is a, c, g, or t
  misc_feature (152)..(152): n is a, c, g, or t
  misc_feature (155)..(155): n is a, c, g, or t
  misc_feature (158)..(159): n is a, c, g, or t
  misc_feature (161)..(167): n is a, c, g, or t
ctggggagccaggctccacggacaccaaggtcacccagagacctagacttctggtcaaagcaagtgaacagaaagcaaagatggattgtgttcctataaaagcacatagttatgtttactnnnnncntnagannnnnnnnnnnnnnnncnanttnttnntnnnnnnncagaatgaagaacttattcagaaagcagaaataatcaatgagcgatttttagcccaatgctccaaaaactcatcctgtaccttggagatccagtccacggagtcagggga

SEQ ID NO: 91 - DNA, 713 bp, HOMO SAPIENS
ccccacatcggtccgtcctgcttccagctgctgcagcgcgccttcgccgccaaagcatccagcagccccctgctccggcccagcatggcgaccccgacccagacccccacaaaggctcctgaggaacctgacccattttactatgactacaacacggtgcagactgtgggcatgactctggcaaccatcttgttcctgctgggtatcctcatcgtcatcagcaagaaggtgaagtgcaggaaggcggactccaggtctgagagcccaacctgcaaatcctgtaagtctgagcttccctcttcagcccctggtggcggcggcgtgtaacaccttcccgaggaaactccgctgccgaccctgcctgagcgcgggagcctgaggaccgggtggaggcggtggggacccagccgcgcgccgggagcgctccccggaatgagccgccccacccaccccaaggctggagccgctgcaccctgctgtccctctccaggccttggcaatgacgatcccccaaagagcccgtctgcaccccagacccagggcctcaggcctccagctcctgggatccgggagtccatcccggcccagcacccccagcatccccgtgtatggcccccctgcacctccttgtctcatccccgaagatccgtccccctggcccctcagtgtccatgtcttgagcttaataaatgtgcatttggttttttcctctg

SEQ ID NO: 92 - DNA, 3710 bp, HOMO SAPIENS
aggacgcgtttccaagttccagtgactcctcctgtttgggactcggggggagagtgcggggagacaaataaaacctcgggcggcggcggctggtgggaagacttgaacttgaatctcgaaccactgcatctccgactctgcccagactcttcactccgcggcaccctcaaaccccagcccaggccggggcgcacaagccagccagcgcacctgcagtcctcgcccggacgcgccgcgccccctcggaaccaggctctgctccgagcagccttcgcccctcaagccagccacagtccccgccaggccgggtgggcgtcaagatgaaggcggcccgcttcgtgctgcgcagcgctggctcgctcaacggcgccggcctggtgccccgagaggtggagcatttctcgcgctacagcccgtccccgctgtccatgaagcagctactggactttggttcagaaaatgcatgtgaaagaacttcttttgcatttttgcgacaagaattgcctgtgagactcgccaacattctgaaggaaattgatatcctcccgacccaattagtaaatacctcttcagtgcaattggttaaaagctggtatatacagagcctgatggatttggtggaattccatgagaaaagcccagatgaccagaaagcattatcagactttgtagatacactcatcaaagttcgaaatagacaccataatgtagtccctacaatggcacaaggaatcatagagtataaagatgcctgtacagttgacccagtcaccaatcaaaatcttcaatatttcttggatcgattttacatgaaccgtatttctactcggatgctgatgaaccagcacattcttatatttagtgactcacagacaggaaacccaagccacattggaagcattgatcctaactgtgatgtggtagcagtggtccaagatgcctttgagtgttcaaggatgctctgtgatcagtattatttatcatctccagaattaaagcttacacaagtgaatggaaaatttccagaccaaccaattcacatcgtgtatgttccttctcacctccatcatatgctctttgaactatttaagaatgcaatgcgggcaacagttgaacaccaggaaaatcagccttcccttacaccaatagaggttattgttgtcttgggaaaagaagaccttaccattaagatttcagacagaggaggtggtgttcccctgagaattattgaccgcctctttagttatacatactccactgcaccaacgcctgtgatggataattcccggaatgctcctttggctggttttggttacggcttgccaatttctcgtctgtatgcaaagtactttcaaggagatctgaatctctactctttatcaggatatggaacagatgctatcatctacttaaaggctttgtcttctgagtctatagaaaaacttccagtttttaacaagtcagccttcaaacattatcagatgagctctgaggctgatgactggtgtatcccaagcagggaaccaaagaacctggcaaaagaagtggccatgtgaagagggacactcaggacactttacgggatcaaagtgggtctacaccagtgctgcttcctgaatgtttgtgtgtgaacccttgtttcctccaaaacaaacgacagcaacgaaaactccttaatcagaacactgatccaatgaggaatggagcttgtttctgtgacccaggagaacttagtgcaagactacaggagttaacagatggccagctccttattttttaatgtagaataactcctgagtttatatcaaatcctgaagaaataagcctcagttttccatctgtttttgataagaataagaaagggagtgagtgtgaagatggtggttagcagtttcactaagactgatattttaggcctcttgttcacatcaaaagatattggtgtcagaataccagcattttcctgccatgcaaaggattaaaacttagtttacactatgtggttacaaatatatgtcaatgtacattttgaacatatttatgtgctatggaaggaaatgctggtgactaaaataaggtttactctgaaagaggaggaattttattcaaagcattcaaacattttattcaagtgtttcaaaattcaaagcattgtattcaaagttgcagtgaaggcatcaacttatgtaaaaactcagaaggaaggctcctctgataaaaacacagctcctttattatgctgcttttcttgttcactttacacactaagtaaacacttattgtcaggtgcctagtcttgagtgaattgttagatgtgcactgaactcgggatgttggggattggagagagagaattgccaaagtaacagcaaaaatatctcttactttgctttgtttataaataaattagtagattggaaaaactagtgttagggaaagaaatcacatgttcagagcctaattcagtaggaagggcttttctctaccctgaaatgaaggtaatccaaaggcatccattttctaggcttaaaagatatatttttgatatatttaattatattctctacactccagcattaatatgtctgtttaaaaattactaattctcaaatggctcaagaacattagaatttaagtaccttttagagtaattattttaagcaaatagcctggacgtaagagattctcatgccagcatgctttcatttgtcagttgttgtgactgagagataatgaatgacacctgaaatgcatatggtatttttgggagagttaaggtataatttgaaggttggcagaccagttgcgctgattactcttagagaagaagaaatggaaaaatgaaagaaggcaggaaggaaagaaaggatataggaagagagggaagcagaaggcaggcatttttctattttccccacaaattatttcaaaaaaaatctgtattttctgggatatgtcattggcaagaggaagaactggtgttttgaaagcagtatggattctttaaatgcctctcactcttacaagatagtaggctttgagataataaacttacccgtgtcaattaacatttaaactggcatatagaaaaaaaggaggatttttctgcattgtaaaataatcagtatggtttatatgttgaatttgacatttgtgtgtaatttcatggtggcctagtgttgtggtgcttctggtaatggtaatagaagctcaactatttttttgtggatttcagtttttatcatcagaagtcctagacagtgacatttcttaatggtgggagtccagctcatgcatttctgattatacaaaacagtttgcagtaggttatttgtcatttcagttttttactgaaatttgagctaaacatttttacatgtaaatacttgtatttaccaaagatttaaatcagttgattaattaattaactcaaatactgtgaactatctctaaaacactagaaaaaagaaatgttagtatctcaattacaccaactgtgcaaatgaactttgataaaatagaaataatctacattggcctttgtgaaatctggggaagagctttaggattctagtagatggatactgaatactcaggcccacttaaattattaatgtatacattgtgtttttgtctttatgctatgtacagagaaatgtgataattttttataataaatattttttatgatgataaaagaaaaaaaaaaa

SEQ ID NO: 93 - DNA, 2774 bp, HOMO SAPIENS
gaacggacctgggcttgtcggaccagtgagcggcggcggctgcgcggcggcagcggcagaaagcgtagctgctttgctgtagtccacgcccccttgccgctccggtgacagtctctgcggaaagtcacgtttgtgatttcgggagagcacagaacgggacgacggcgctcttgctgggtcatctgggccaggtgacgaagaaacagtttcctggtgaagcagtccctcacccctagtcagcccacacccctagggcctaaagatgctgaggtctgtatggaattttctgaaacgccacaaaaagaaatgcatcttcctgggcacggtccttggaggagtatatattctggggaaatatggacagaagaaaatcagagaaatacaggaaagggaggctgcagaatacattgcccaagcacgacgacaatatcattttgaaagtaaccagaggacttgcaatatgacagtgctgtccatgcttccaacactgagagaggccttaatgcagcaactgaattccgagagcctcacagctctgctaaaaaacaggccttcaaacaagctagaaatatgggaggatctgaagataataagtttcacaagaagtactgtggctgtatacagtacctgtatgctggttgttcttttgcgggtccagttaaacataattggtggatatatttacctggataatgcagcagttggcaaaaatggcactacaattcttgctcccccagatgtccaacagcagtatttatcaagtattcagcacctacttggagatggcctgacagaattgatcactgtcattaaacaagctgtgcagaaggttttaggaagtgtttctcttaaacattctttgtcccttttggacttggagcaaaaactaaaagaaatcagaaatctcgttgagcagcataagtcttcttcttggattaataaagatggatccaaacctttattatgccattatatgatgccagatgaagaaactccattagcagtgcaggcctgtggactttctcctcgagacattaccactattaaacttctcaatgaaactagagacatgttggaaagcccagattttagtacagttttgaatacctgtttaaaccgaggttttagtagacttctagacaatatggctgagttctttcgacctactgaacaggacctgcaacatggtaactctatgaatagtctttccagtgtcagcctgcctttagctaagataattccaatagtaaacggacagatccattcagtttgcagtgaaacacctagtcattttgttcaggatctgttgacaatggagcaagtgaaagactttgctgctaatgtgtatgaagcttttagtacccctcagcaactggagaaatgatttttccttcaagaaaaactacagtgggattcatttactttttaaaatacactgggtaaatcacctatacttagagtaacagtttgttatcaaaatgcctgataaaatatattcttaataaaagtcttcatttcataatgaaatcaatttatttggcatcttaatatatttttttagattcatcaacagaccagtttttgtgggcatatatatatacacgtgcaaatatcagaattgttaataatttgttacacatggacatttgttccaaactgactaaaaatcaatatagatattttatatacatatatatatataaaaatacaaaattcagtgtactttaccatattaatactgaggaaaaatctgttggagacataggtctaggatgtgtgaagtttggaaaaatatgctatttaattataatgttccctagactgctgtaaacagaagtgaatcagacttttctccagctacctttcaaaataataaattatttgtctcaaatataccttgatggaggacttttttattcttatggaaatagtgaattccaacaactatgatgaactatgttctttgctatttcttcactatattttttaaggttttattaaaaagccttagaaagttacatattggtttagaggctaaaattgtgttgatgctgtttactcacctaattacatagttttaatcatttgtacataattttaaaaacttactttgtattgattttgaatacagtgaaaatcttattgcaataaactattttagtaaaatattattttgttgagttaatatttttcagctattaatttacttatcccatagcatttttgttattatttcggaagagagagcatgctagtttaagtttcattttaattggtcgtgtacttggtgcttttttgttgttgttaacttgttcatttagtaaaaagcaaatagctttactttctgaaaaagaaataattcattatctctagtaatacatctgtaattcttcatttagaagggtaattagggcaaaagtaaataaatcattatatatcattagtatgttgacatatattttcagtaacattgttttatgttcctccagcgtaacatgtagctgaacagtagaaggtagaaaataaattatgacatctcttctaaggcctggctaggcctgaagctcactgccagggagtttgtgtctagaatgtttttaaaaataggtagtggagccatagccctcaccatagacacctctgagcccactggcattgtctctgagcagaagatggctgtgccactcacatatgctaatcttggcaaatctgccaagcatgtcttcaccaagggatatggatttggcttaataaaacctgatttgaaaacaaaa

SEQ ID NO: 94 - DNA, 2660 bp, HOMO SAPIENS
aggctgagaccggtgcgccgcgcgctagtggccgctcttccgcgggctagcgggcggtgggggcgccagcagcgcggaaggcgggcacgcgggccatggctccctgggcggaggccgagcactcggcgctgaacccgctgcgcgcggtgtggctcacgctgaccgccgccttcctgctgaccctactgctgcagctcctgccgcccggcctgctcccgggctgcgcgatcttccaggacctgatccgctatgggaaaaccaagtgtggggagccgtcgcgccccgccgcctgccgagcctttgatgtccccaagagatatttttcccacttttatatcatctcagtgctgtggaatggcttcctgctttggtgccttactcaatctctgttcctgggagcaccttttccaagctggcttcatggtttgctcagaattctcggggcggcacagttccagggaggggagctggcactgtctgcattcttagtgctagtatttctgtggctgcacagcttacgaagactcttcgagtgcctctacgtcagtgtcttctccaatgtcatgattcacgtcgtgcagtactgttttggacttgtctattatgtccttgttggcctaactgtgctgagccaagtgccaatggatggcaggaatgcctacataacagggaaaaatctattgatgcaagcacggtggttccatattcttgggatgatgatgttcatctggtcatctgcccatcagtataagtgccatgttattctcggcaatctcaggaaaaataaagcaggagtggtcattcactgtaaccacaggatcccatttggagactggtttgaatatgtttcttcccctaactacttagcagagctgatgatctacgtttccatggccgtcacctttgggttccacaacttaacttggtggctagtggtgacaaatgtcttctttaatcaggccctgtctgcctttctcagccaccaattctacaaaagcaaatttgtctcttacccgaagcataggaaagctttcctaccatttttgttttaagttaacctcagtcatgaagaatgcaaaccaggtgatggtttcaatgcctaaggacagtgaagtctggagcccaaagtacagtttcagcaaagctgtttgaaactctccattccatttctataccccacaagttttcactgaatgagcatggcagtgccactcaagaaaatgaatctccaaagtatcttcaaagaataaatactaatggcagatctgcgatttctgggtccactttctgagatgctttctaaaaccaaccaactgataaaaagtagatgagacttctccaagctgcttcacaagcaaactaaccgaaaaaccgaaaatatacaaacagcttcacacacacacacacacacacacacacacacacacacacacaaaggaagatcatcaatggctgcggtagcctagtaggaatggactatataataatatagcaggtgctcaataactgtttgttgcatttcagtaaaagcagaataacctttcaaaataataacaggctgggtgcaatggctcacacctgttaatcccagcacttcgggaggccaaggtgggcagttcgcttgggcccaagagttcgagaccagcctgggcaacatggtgaaaccctatctccgtgaaaaaatatgaaaattagccaagagtggtggcacatgcctgtagtcccagatacttgggagtgggctgagatgggagaatcgcttgagcccaggaggtcaagggtacagtgagccgaggtcatgccactgcactccagcctggcctgggcaacagagcaagaccctgtctcaaaataataataatatataattttacaccaaaagtttcaggaaaaaacgagtttgttggagttagtttatactttcacatatcaccacaaagatctccagttaaataactatcaatatccatttccattcatctccccctcaaatcatagcctaacagaacactttgaaagctcttttatttaatatttttttacatcctttgaagggagtgcttcaaaaatgaaagcatcagaagataaaatatttttatatttatgcatagcaagccttcgtgaacggaagtgacacactctggattgaataatactgtagcctcattcatatgtagttattcaaattggattaatgtctgtgtgagtttatttgaactagcagaaagtatctgaagatattcaggaataaagtttatacttaaaatagcttatgttaaagaaaatacctgtgattaattcagagggaaataaatgcatggtataaaagaaaaccaaaaacttaaaaaataatactatagcctgagcaacacattaaaactgcacacttgtgcagcgtaagattctctggcttattggctgaggtgttaagtttattccttttatgaagatgtcctattacagtcagctaagcactaaagctttgcatttatatgtactttgctatgggggaaagaaccttatgattaataagacacatatcaaatgcatagtcaatcattcccacccccatccctggagctgtaacccaaaactgttaaactaagattcctttgttttttttgtttttttgagatggagtctcactctgtcgcccagac

SEQ ID NO: 95 - DNA, 3333 bp, HOMO SAPIENS
ataccaaggacgcgacttcttgtttggagagggtggagctttggagtgagacccaggaggccaaatcccaaagagaaaaataggagcctaaataaggatcaggaccaagggaagggaatcgtgaaaaatggaagacagtagcacagacacagaaaaagaagaggaagaggagaaagatgaaaaggatcaagagcccatttatgccatagtgcccacaattaacattcaagatgagcggtttgttgatttatctgaaactccagctttcatttttctgcatgagttacatgctatgggaaaacttcctggaaccagaatggcagcgttaaaagccaagtataccttgctgcatgacgccgtgatgagcacacaagagtcagaggtccaactgctacagaatgccaaacgtttcactgagcaaatacaacagcagcagtttcacctgcagcaagctgataattttccagaagcattctccacggaggtctccaaaatgagagaacaacttctcaagtatcaaaatgaatataatgcagtgaaggaaagagagttccataatcagtacagattaaatagcttaaaggaagaaaaaatcatcatagtaaaagaatttgagaagataacaaagccaggagaaatggagaagaagatgaaaatattgagagaaagcactgaagaattacgtaaagaaataatgcagaagaaattagaaattaaaaatttacgagaagatttggcatctaaacaaaagcaattattaaaagagcagaaggaactagaagaattgttgggacatcaggtcgtcctaaaggatgaagtggcccaccatcaaaccattccagtacaaattggaaaagagatagaaaaaataacacgcaaaaaagtagaaatggaaaagaaaaaaattgtcttggaacaagaagtcaaaacgctaaatgactccctaaagaaagttgaaaacaaggttagtgctatagtggatgagaaggaaaatgtaataaaggaagttgaaggcaaacgagccttacttgaaatcaaagaacgagaacataaccaattggtcaagctattggaattagccagagagaatgaagcaacttcattaactgaaagagggatcttggatctcaatttacgcaacagtctcattgacaagcagaactaccatgatgaactttctcgtaagcaaagagagaaagaacgagattttcgaaatttaagaaagatggaactgctcttgaaagtgtcctgggatgcacttaggcaaactcaagcactgcatcaaaggcttctattagagatggaagctatccccaaagatgattctacattatctgagagaaggcgagagcttcacaaggaagttgaagtagctaagaggaatttggcccaacagaaaattatatcagaaatggagtctaagttagtagaacaacaacttgcagaagaaaacaagcttttaaaggagcaagaaaacatgaaagagctagtagtcaaccttctccgcatgactcaaatcaaaattgatgaaaaggaacaaaagtccaaggatttcctgaaagctcagcaaaaatacaccaacattgttaaagaaatgaaagcaaaggatcttgaaatcaggatacacaagaagaaaaaatgtgaaatttatcggagactgagagagtttgctaaactgtatgacaccattcgaaatgaaagaaacaaatttgttaacttactccacaaagctcatcagaaagtaaatgaaataaaagaaaggcataaaatgtcattaaatgaacttgaaattctgagaaatagtgccgttagtcaagaaagaaagctacaaaattccatgctgaaacacgccaacaatgttaccatcagagagagcatgcaaaacgatgtgcgcaaaattgtatcaaaacttcaggaaatgaaagaaaagaaggaagcccagttaaataacattgacagacttgccaacacgatcacaatgatcgaagaggagatggtgcagcttcgcaaaagatacgaaaaagctgttcagcatcgaaatgaaagtggcgttcagctgatagagcgggaagaagaaatatgcattttttatgaaaaaataaatatccaagagaagatgaaactaaatggagaaattgaaatacatctactggaagaaaagatccaattcctgaaaatgaagattgctgagaagcaaagacaaatttgtgtgacccagaaattactgccagccaagaggtccctggatgccgacctagctgtgctccaaattcagttttcacagtgtacagacagaattaaagacctggagaaacagttcgtaaagcctgatggtgagaatagagctcgcttccttccagggaaagatctgaccgaaaaagaaatgatccaaaaattagacaagctggaactacaactggccaagaaggaggagaagctgctggagaaggatttcatctatgagcaggtctccaggctcacagacaggctctgcagcaaaactcagggctgcaagcaggacacactgctcttagccaagaagatgaatggctatcaaagaaggatcaaaaatgcaactgagaaaatgatggctcttgttgctgagctgtccatgaaacaagccctaaccattgaactccaaaaggaagtcagggagaaagaagacttcatcttcacttgcaattccaggatagaaaaaggtctgccactcaataaggaaattgagaaagaatggttgaaagtccttcgagatgaagaaatgcacgccttggccatcgctgaaaagtctcaggagttcttggaagcagataatcgccagctgcccaatggtgtttacacaactgcagagcagcgtccgaatgcctacatcccagaagcagatgccactcttcctttgccaaaaccttatggtgctttggctccttttaaacccagtgaacctggagccaatatgaggcacataaggaaacctgttataaagccagttgaaatctgaatatgtgaacaaatccaggcctctcaaggaaaagacttcaaccaggcttccttgtacccacaggtgaaaaatgtgagcataatacttctaatattattgataagtaaggtaaccacaattagtcagcaacagagtacaacagggtttctatttacccaccaactactatacctttcatgacgttgaatgggacatagaactgtcctacatttatgtcaaagtatatatttgaatcgcttatattttctttttcactctttatattgagtacattccagaaatttgtagtaggcaaggtgctataaaaatgcactaaaaataaatctgttctcaatgaa

SEQ ID NO: 96 - DNA, 3840 bp, HOMO SAPIENS
gtcttcccctcgtgggccctgagcgggactgcagccagccccctggggcgccagctttggaggcccccgacagctgctctcgggagccgcctcccgacacccgagccccgccggcgcctcccgctcccggctcccggctcctggctccctccgcctcccccgcccctcgccccgccgccgaagaggccccgctcccgggtcggacgcctgggtctgccgggaagagcgatgagaggtgtctgaaggtggctattcactgagcgatggggttggacttgaaggaatgccaagagatgctgcccccacccccttaggcccgagggatcaggagctatgggaccagaggccctgtcatctttactgctgctgctcttggtggcaagtggagatgctgacatgaagggacattttgatcctgccaagtgccgctatgccctgggcatgcaggaccggaccatcccagacagtgacatctctgcttccagctcctggtcagattccactgccgcccgccacagcaggttggagagcagtgacggggatggggcctggtgccccgcagggtcggtgtttcccaaggaggaggagtacttgcaggtggatctacaacgactgcacctggtggctctggtgggcacccagggacggcatgccgggggcctgggcaaggagttctcccggagctaccggctgcgttactcccgggatggtcgccgctggatgggctggaaggaccgctggggtcaggaggtgatctcaggcaatgaggaccctgagggagtggtgctgaaggaccttgggccccccatggttgcccgactggttcgcttctacccccgggctgaccgggtcatgagcgtctgtctgcgggtagagctctatggctgcctctggagggatggactcctgtcttacaccgcccctgtggggcagacaatgtatttatctgaggccgtgtacctcaacgactccacctatgacggacataccgtgggcggactgcagtatgggggtctgggccagctggcagatggtgtggtggggctggatgactttaggaagagtcaggagctgcgggtctggccaggctatgactatgtgggatggagcaaccacagcttctccagtggctatgtggagatggagtttgagtttgaccggctgagggccttccaggctatgcaggtccactgtaacaacatgcacacgctgggagcccgtctgcctggcggggtggaatgtcgcttccggcgtggccctgccatggcctgggagggggagcccatgcgccacaacctagggggcaacctgggggaccccagagcccgggctgtctcagtgccccttggcggccgtgtggctcgctttctgcagtgccgcttcctctttgcggggccctggttactcttcagcgaaatctccttcatctctgatgtggtgaacaattcctctccggcactgggaggcaccttcccgccagccccctggtggccgcctggcccacctcccaccaacttcagcagcttggagctggagcccagaggccagcagcccgtggccaaggccgaggggagcccgaccgccatcctcatcggctgcctggtggccatcatcctgctcctgctgctcatcattgccctcatgctctggcggctgcactggcgcaggctcctcagcaaggctgaacggagggtgttggaagaggagctgacggttcacctctctgtccctggggacactatcctcatcaacaaccgcccaggtcctagagagccacccccgtaccaggagccccggcctcgtgggaatccgccccactccgctccctgtgtccccaatggctctgcctacagtggggactatatggagcctgagaagccaggcgccccgcttctgcccccacctccccagaacagcgtcccccattatgccgaggctgacattgttaccctgcagggcgtcaccgggggcaacacctatgctgtgcctgcactgcccccaggggcagtcggggatgggccccccagagtggatttccctcgatctcgactccgcttcaaggagaagcttggcgagggccagtttggggaggtgcacctgtgtgaggtcgacagccctcaagatctggttagtcttgatttcccccttaatgtgcgtaagggacaccctttgctggtagctgtcaagatcttacggccagatgccaccaagaatgccaggaatgatttcctgaaagaggtgaagatcatgtcgaggctcaaggacccaaacatcattcggctgctgggcgtgtgtgtgcaggacgaccccctctgcatgattactgactacatggagaacggcgacctcaaccagttcctcagtgcccaccagctggaggacaaggcagccgagggggcccctggggacgggcaggctgcgcaggggcccaccatcagctacccaatgctgctgcatgtggcagcccagatcgcctccggcatgcgctatctggccacactcaactttgtacatcgggacctggccacgcggaactgcctagttggggaaaatttcaccatcaaaatcgcagactttggcatgagccggaacctctatgctggggactattaccgtgtgcagggccgggcagtgctgcccatccgctggatggcctgggagtgcatcctcatggggaagttcacgactgcgagtgacgtgtgggcctttggtgtgaccctgtgggaggtgctgatgctctgtagggcccagccctttgggcagctcaccgacgagcaggtcatcgagaacgcgggggagttcttccgggaccagggccggcaggtgtacctgtcccggccgcctgcctgcccgcagggcctatatgagctgatgcttcggtgctggagccgggagtctgagcagcgaccacccttttcccagctgcatcggttcctggcagaggatgcactcaacacggtgtgaatcacacatccagctgcccctccctcagggagcgatccaggggaagccagtgacactaaaacaagaggacacaatggcacctctgcccttcccctcccgacagcccatcacctctaatagaggcagtgagactgcaggtgggctgggcccacccagggagctgatgccccttctccccttcctggacacactctcatgtccccttcctgttcttccttcctagaagcccctgtcgcccacccagctggtcctgtggatgggatcctctccaccctcctctagccatcccttggggaagggtggggagaaatataggatagacactggacatggcccattggagcacctgggccccactggacaacactgattcctggagaggtggctgcgcccccagcttctctctccctgtcacacactggaccccactggctgagaatctgggggtgaggaggacaagaaggagaggaaaatgtttccttgtgcctgctcctgtacttgtcctcagcttgggcttcttcctcctccatcacctgaaacactggacctgggggtagccccgccccagccctcagtcacccccacttcccacttgcagtcttgtagctagaacttctctaagcctatacgtttctgtggagtaaatattgggattggggggaaagagggagcaacggcccatagccttggggttggacatctctagtgtagctgccacattgatttttctataatcacttggggtttgtacatttttggggggagagacacagatttttacactaatatatggacctagcttgaggcaattttaatcccctgcactaggcaggtaataataaaggttgagttttccacaaaaaaaaaaaaaaaaaa

SEQ ID NO: 97 - DNA, 2732 bp, HOMO SAPIENS
ggcgggaccggaacggagccgtgcggccccgcgcgctcgcagtctgtctcccgccgtccccacgcacgcgtcccggctcacgcgtccccccgcccgcccgcccgcccgcccgcccccgcttgtgccgcccctaccagagacccccaggagcaggatgtccttccagggcaagaaaagcatcccccggatcacgagtgaccgccttctgatcagaggtgggaggatcgtgaatgacgaccagtccttttacgctgatgtgcacgtggaagatggcttgataaaacaaatcggagaaaacctcatcgtccctgggggcatcaagaccattgacgcccacggcctgatggtccttcctggtggcgttgacgtccacacaaggctgcagatgcctgtcctgggcatgacaccggctgacgacttctgtcagggcaccaaggcagcgctagcaggaggaaccaccatgatcttggaccacgtcttccccgacacgggtgtgagcctgctggcggcctacgagcagtggcgggagcgggcggacagcgcggcctgctgcgactactccctgcacgtggacatcacccgatggcatgagagcatcaaggaggagctggaggccctggtcaaggagaagggtgtgaactccttcctggtcttcatggcatacaaggaccggtgccagtgcagcgacagccagatgtacgagatcttcagcatcatccgggacctgggggccttggcccaggtgcacgctgagaacggggacatcgtggaggaggagcagaagcggttgctggagctcggcatcactggccccgagggccacgtgctcagccaccccgaggaggtggaggctgaggcggtgtaccgagctgtcaccatcgccaagcaggcaaactgcccgctgtacgtcaccaaggtgatgagcaagggggcggccgacgccatcgctcaggccaagcgcagaggggtggtcgtgtttggggagcccatcaccgccagcctgggcaccgacggttcacactactggagcaagaactgggccaaggccgcagccttcgtcacatcaccccctgtcaacccagaccccaccacggcggaccacctcacctgcttgctgtccagcggggacctccaggtgacaggcagcgcccactgcaccttcaccactgcccagaaggctgtgggcaaggacaacttcgcgctgatccccgagggcaccaacggcattgaggagcgcatgtcgatggtctgggagaaatgtgtggcctctgggaagatggacgagaatgagttcgtcgcggtgaccagtacaaatgctgccaaaatcttcaatttttacccaaggaaggggcgagtggctgtgggctctgacgctgacctggtcatatggaaccccaaggccaccaagatcatctctgccaagacccacaatctgaacgtggagtacaacatcttcgagggagtggagtgccggggagcgcctgccgtggtcataagtcagggccgagtggcgctggaggacgggaagatgtttgtcaccccgggggcgggccgcttcgtccctcggaaaacattcccggactttgtctacaagaggatcaaagctcgcaacaggctggcggagatccacggtgtgccccgtggactgtatgacgggcccgtccacgaggtgatggtgcctgccaagccagggagtggcgctccggcccgcgcgtcctgcccaggcaagatctccgtccctcctgtgcgcaacctacatcagtcggggttcagcctatctgggtctcaggctgatgaccacatcgcccgacgcacagcacagaagatcatggcaccacctggcggccgctccaacatcacctctctctcctagacgcccaggaccggccctgtgagccgtgctggccccacccgaggccgcgggggccccagggcactcgcccccctccttagcattttcttttgtagaagtttctcgaaggtgcttggcggtcttgccttccccctccccacaggctctccttgtggggtcccaggtcctgctgccaagagcccctcaagagaagggctgaacctggggagatgtcactgccagggtgaggtggagccacatggcagggacaatgccggcagcctgagcccaggcaccccagtgcccgctgggcccagcctggggacagggaacctgccgggctcacagtgtgggagcagctggacaccaggcttcttggtgaaccggcgaggggccgagtcccgcctggtgggcatttgccgccgcctccccaccaccagtcactgcctcgcagagccctacactcccgcagccgctcctcagaggcctgtgcccatcgcaggcctgggaggaaagtgggcgcagagccctcctgctcacacagctgctgagacttcagggacccatcagaacttggtgcagcacagccccgcccgtggagggtcccttttacgcaccccaaggcccacacctaagcttccatgtagccctcatccagggaagttttgcgatcctttaggaagacactgtcctcttattacagattgtgtatttccgtaggcttcttagtagcagctttgtacactgaggacactgtagccaggaacctgtgcatgccacccaccgcctggacaggcagtcatcctgcctctgatgtgaatcaggcccattaaagacgtctgggtttgaagccgcctgtgcatggaaaaaaaaaaaaaaa

SEQ ID NO: 98 - DNA, 1796 bp, HOMO SAPIENS
ctgatggtatctctgtttcaggagtggtgacgcctaagctatcactggacatatcaaggacttcactaaattagcaggtaccactggtcttcttgtgcttatccgggcaagaacttatcgaaatacaatagaagtttttacttagaagagattttcagcagatgagaagctggtaacagagaccaaaatagtttggagactaaagaatcattgcacatttcactgctgagttgtattggagaagtgaaatgacaacctcactagatacagttgagacctttggtaccacatcctactatgatgacgtgggcctgctctgtgaaaaagctgataccagagcactgatggcccagtttgtgcccccgctgtactccctggtgttcactgtgggcctcttgggcaatgtggtggtggtgatgatcctcataaaatacaggaggctccgaattatgaccaacatctacctgctcaacctggccatttcggacctgctcttcctcgtcacccttccattctggatccactatgtcagggggcataactgggtttttggccatggcatgtgtaagctcctctcagggttttatcacacaggcttgtacagcgagatctttttcataatcctgctgacaatcgacaggtacctggccattgtccatgctgtgtttgcccttcgagcccggactgtcacttttggtgtcatcaccagcatcgtcacctggggcctggcagtgctagcagctcttcctgaatttatcttctatgagactgaagagttgtttgaagagactctttgcagtgctctttacccagaggatacagtatatagctggaggcatttccacactctgagaatgaccatcttctgtctcgttctccctctgctcgttatggccatctgctacacaggaatcatcaaaacgctgctgaggtgccccagtaaaaaaaagtacaaggccatccggctcatttttgtcatcatggcggtgtttttcattttctggacaccctacaatgtggctatccttctctcttcctatcaatccatcttatttggaaatgactgtgagcggagcaagcatctggacctggtcatgctggtgacagaggtgatcgcctactcccactgctgcatgaacccggtgatctacgcctttgttggagagaggttccggaagtacctgcgccacttcttccacaggcacttgctcatgcacctgggcagatacatcccattccttcctagtgagaagctggaaagaaccagctctgtctctccatccacagcagagccggaactctctattgtgttttaggtcagatgcagaaaattgcctaaagaggaaggaccaaggagatgaagcaaacacattaagccttccacactcacctctaaaacagtccttcaaacttccagtgcaacactgaagctcttgaagacactgaaatatacacacagcagtagcagtagatgcatgtaccctaaggtcattaccacaggccaggggctgggcagcgtactcatcatcaaccctaaaaagcagagctttgcttctctctctaaaatgagttacctacattttaatgcacctgaatgttagatagttactatatgccgctacaaaaaggtaaaactttttatattttatacattaacttcagccagctattgatataaataaaacattttcacacaatacaataagttaactattttattttctaatgtgcctagttctttccctgcttaatgaaaagcttgttttttcagtgtgaataaataatcgtaagcaaca

SEQ ID NO: 99 - DNA, 3228 bp, HOMO SAPIENS
caggcgcagtgcaggactgctccgagcacgcctacgcgcgcattttctccccttcctctccctctttccactttcctctccctttttctcctctcctttccccctcccaccacttggtctttcagtctttcagtcagttcgtttaggtctctccttccgacccccacccccagctcctctccctttccttttccccctccccctttcctttcccgtctcacgcgccaggccgcttgcacatgcgcattaggtacaaagcctcgctctttgtccccatctgtcgttcacacgaactcaagcctttggcattcggcagccaatagaatctaagaaatggcggaaaaatgattccgcctcgggagctaaaccttgattggcagtttagctaaccaatcgagaacgccattttgtaccccttggcaggcaccgagctccgtcgtctcgtttccggcggtcgcgcgctcttttctcgggacgggagaggccgtgtagcgtcgccgttactccgaggagataccagtcggtagaggagaagtcgaggttagagggaactgggaggcactttgctgtctgcaatcgaagttgagaggcccagtatttaggcgacagtgaatttattactctgaagagggttctgcacatatttccaaattatattggtggtcatcagaagtaggtgataggaagaaatacttctcaagggtgcaaaaatgcagagtaataaaacttttaacttggagaagcaaaaccatactccaagaaagcatcatcaacatcaccaccagcagcagcaccaccagcagcaacagcagcagccgccaccaccgccaatacctgcaaatgggcaacaggccagcagccaaaatgaaggcttgactattgacctgaagaattttagaaaaccaggagagaagaccttcacccaacgaagccgtctttttgtgggaaatcttcctcccgacatcactgaggaagaaatgaggaaactatttgagaaatatggaaaggcaggcgaagtcttcattcataaggataaaggatttggctttatccgcttggaaacccgaaccctagcggagattgccaaagtggagctggacaatatgccactccgtggaaagcagctgcgtgtgcgctttgcctgccatagtgcatcccttacagttcgaaaccttcctcagtatgtgtccaacgaactgctggaagaagccttttctgtgtttggccaggtagagagggctgtagtcattgtggatgatcgaggaaggccctcaggaaaaggcattgttgagttctcagggaagccagctgctcggaaagctctggacagatgcagtgaaggctccttcctgctaaccacatttcctcgtcctgtgactgtggagcccatggaccagttagatgatgaagagggacttccagagaagctggttataaaaaaccagcaatttcacaaggaacgagagcagccacccagatttgcacagcctggctcctttgagtatgaatatgccatgcgctggaaggcactcattgagatggagaagcagcagcaggaccaagtggaccgcaacatcaaggaggctcgtgagaagctggagatggagatggaagctgcacgccatgagcaccaggtcatgctaatgagacaggatttgatgaggcgccaagaagaacttcggaggatggaagagctgcacaaccaagaggtgcaaaaacgaaagcaactggagctcaggcaggaggaagagcgcaggcgccgtgaagaagagatgcggcggcagcaagaagaaatgatgcggcgacagcaggaaggattcaagggaaccttccctgatgcgagagagcaggagattcggatgggtcagatggctatgggaggtgctatgggcataaacaacagaggtgccatgccccctgctcctgtgccagctggtaccccagctcctccaggacctgccactatgatgccggatggaactttgggattgaccccaccaacaactgaacgctttggtcaggctgctacaatggaaggaattggggcaattggtggaactcctcctgcattcaaccgtgcagctcctggagctgaatttgccccaaacaaacgtcgccgatactaataagttgcagtgtctagtttctcaaaacccttaaaagaaggaccctttttggactagccagaattctaccctggaaaagtgttagggattccttccaatagttagatctaccctgcctgtactactctagggagtatgctggaggcagagggcaagggaggggtggtattaaacaagtcaattctgtgtggtatattgtttaatcagttctgtgtggtgcattcctgaagtctctaatgtgactgttgagggcctggggaaaccatggcaaagtggatccagttagagcccattaatcttgatcattccggttttttttttttttgtccatcttgtttcatttgcttgccccgcccccgagacggagtcttactctgtcgcccaggctggagtgtagtggcatgatctcggctcactgcaatctctgcctcccgggttcaagcttgtccaggttgatcttgaactcctgacctcgtgatctacccacctcggcctcccaaaatgctgggattacaggggtgagccaccgtgcccaacctcacttgcttcttatccttacactcccccagccccagagaaactgccacatacaccacaaaaaccaaacatcccccaatgaccttagccccattgctccattcactcccaggtgagaattcaggcaaacgtccacaaaggtcacaggcagcgtacatacggttctgttataccccatatattaccccttcatgtcctaaagaagacattttctcttagagattttcattttagtgtatctttaaaaaaaaatcttgtgttaacttgcctccatctttttcttgggtgaggacacccaggaatgacccttttgtgtctatgatgttgctgttcacagcttttcttgataggcctagtacaatcttgggaacagggttactgtatactgaaggtctgacagtagctcttagactcgcctatcttaggtagtcatgctgtgcattttttttttcattggtgtactgtgtttgatttgtctcatatatttggagtttttctgaaaaatggagcagtaatgcagcatcaacctattaaaatacattttaagccttttaaaaaaaaaaaa

SEQ ID NO: 100 - DNA, 4645 bp, HOMO SAPIENS
tagcgaaccaaccatgacagcagcgggaggacctccgagcccgctcgttacagcagaacgcgcggtcaagtttggcgcgaaattgtggccgccccgcccccctcgtccccatttgtgcaggcgaggccccgcccccccgccccggcgcacgcagggtcgcggcgtgctcgcgcccgcagacgcctgggaactgcggccgcgggctcgcgctcctcgccaggccctgccgccgggctgccatccttgccctgccatgtctcgccggaagcctgcgtcgggcggcctcgctgcctccagctcagcccctgcgaggcaagcggttttgagccgattcttccagtctacgggaagcctgaaatccacctcctcctccacaggtgcagccgaccaggtggaccctggcgctgcagcggctgcagcggccgcagcggccgcagcgcccccagcgcccccagctcccgccttcccgccccagctgccgccgcacatagctacagaaattgacagaagaaagaagagaccattggaaaatgatgggcctgttaaaaagaaagtaaagaaagtccaacaaaaggaaggaggaagtgatctgggaatgtctggcaactctgagccaaagaaatgtctgaggaccaggaatgtttcaaagtctctggaaaaattgaaagaattctgctgcgattctgcccttcctcaaagtagagtccagacagaatctctgcaggagagatttgcagttctgccaaaatgtactgattttgatgatatcagtcttctacacgcaaagaatgcagtttcttctgaagattcgaaacgtcaaattaatcaaaaggacacaacactttttgatctcagtcagtttggatcatcaaatacaagtcatgaaaatttacagaaaactgcttccaaatcagctaacaaacggtccaaaagcatctatacgccgctagaattacaatacatagaaatgaagcagcagcacaaagatgcagttttgtgtgtggaatgtggatataagtatagattctttggggaagatgcagagattgcagcccgagagctcaatatttattgccatttagatcacaactttatgacagcaagtatacctactcacagactgtttgttcatgtacgccgcctggtggcaaaaggatataaggtgggagttgtgaagcaaactgaaactgcagcattaaaggccattggagacaacagaagttcactcttttcccggaaattgactgccctttatacaaaatctacacttattggagaagatgtgaatcccctaatcaagctggatgatgctgtaaatgttgatgagataatgactgatacttctaccagctatcttctgtgcatctctgaaaataaggaaaatgttagggacaaaaaaaagggcaacatttttattggcattgtgggagtgcagcctgccacaggcgaggttgtgtttgatagtttccaggactctgcttctcgttcagagctagaaacccggatgtcaagcctgcagccagtagagctgctgcttccttcggccttgtccgagcaaacagaggcgctcatccacagagccacatctgttagtgtgcaggatgacagaattcgagtcgaaaggatggataacatttattttgaatacagccatgctttccaggcagttacagagttttatgcaaaagatacagttgacatcaaaggttctcaaattatttctggcattgttaacttagagaagcctgtgatttgctctttggctgccatcataaaatacctcaaagaattcaacttggaaaagatgctctccaaacctgagaattttaaacagctatcaagtaaaatggaatttatgacaattaatggaacaacattaaggaatctggaaatcctacagaatcagactgatatgaaaaccaaaggaagtttgctgtgggttttagaccacactaaaacttcatttgggagacggaagttaaagaagtgggtgacccagccactccttaaattaagggaaataaatgcccggcttgatgctgtatcggaagttctccattcagaatctagtgtgtttggtcagatagaaaatcatctacgtaaattgcccgacatagagaggggactctgtagcatttatcacaaaaaatgttctacccaagagttcttcttgattgtcaaaactttatatcacctaaagtcagaatttcaagcaataatacctgctgttaattcccacattcagtcagacttgctccggaccgttattttagaaattcctgaactcctcagtccagtggagcattacttaaagatactcaatgaacaagctgccaaagttggggataaaactgaattatttaaagacctttctgacttccctttaataaaaaagaggaaggatgaaattcaaggtgttattgacgagatccgaatgcatttgcaagaaatacgaaaaatactaaaaaatccttctgcacaatatgtgacagtatcaggacaggagtttatgatagaaataaagaactctgctgtatcttgtataccaactgattgggtaaaggttggaagcacaaaagctgtgagccgctttcactctccttttattgtagaaaattacagacatctgaatcagctccgggagcagctagtccttgactgcagtgctgaatggcttgattttctagagaaattcagtgaacattatcactccttgtgtaaagcagtgcatcacctagcaactgttgactgcattttctccctggccaaggtcgctaagcaaggagattactgcagaccaactgtacaagaagaaagaaaaattgtaataaaaaatggaaggcaccctgtgattgatgtgttgctgggagaacaggatcaatatgtcccaaataatacagatttatcagaggactcagagagagtaatgataattaccggaccaaacatgggtggaaagagctcctacataaaacaagttgcattgattaccatcatggctcagattggctcctatgttcctgcagaagaagcgacaattgggattgtggatggcattttcacaaggatgggtgctgcagacaatatatataaaggacagagtacatttatggaagaactgactgacacagcagaaataatcagaaaagcaacatcacagtccttggttatcttggatgaactaggaagagggacgagcactcatgatggaattgccattgcctatgctacacttgagtatttcatcagagatgtgaaatccttaaccctgtttgtcacccattatccgccagtttgtgaactagaaaaaaattactcacaccaggtggggaattaccacatgggattcttggtcagtgaggatgaaagcaaactggatccaggcgcagcagaacaagtccctgattttgtcaccttcctttaccaaataactagaggaattgcagcaaggagttatggattaaatgtggctaaactagcagatgttcctggagaaattttgaagaaagcagctcacaagtcaaaagagctggaaggattaataaatacgaaaagaaagagactcaagtattttgcaaagttatggacgatgcataatgcacaagacctgcagaagtggacagaggagttcaacatggaagaaacacagacttctcttcttcattaaaatgaagactacatttgtgaacaaaaaatggagaattaaaaataccaactgtacaaaataactctccagtaacagcctatctttgtgtgacatgtgagcataaaattatgaccatggtatattcctattggaaacagagaggtttttctgaagacagtctttttcaagtttctgtcttcctaacttttctacgtataaacactcttgaatagacttccactttgtaattagaaaattttatggacagtaagtccagtaaagccttaagtggcagaatataattcccaagcttttggagggtgatataaaaatttacttgatatttttatttgtttcagttcagataattggcaactgggtgaatctggcaggaatctatccattgaactaaaataattttattatgcaaccagtttatccaccaagaacataagaattttttataagtagaaagaattggccaggcatggtggctcatgcctgtaatcccagcactttgggaggccaaggtaggcagatcacctgaggtcaggagttcaagaccagcctggccaacatggcaaaaccccatctttactaaaaatataaagtacatctctactaaaaatacgaaaaaattagctgggcatggtggcgcacacctgtagtcccagctactccggaggctgaggcaggagaatctcttgaacctgggaggcggaggttgcaatgagccgagatcacgtcactgcactccagcttgggcaacagagcaagactccatctcaaaaaaaaaaaaagaaaaaagaaaagaaatagaattatcaagcttttaaaaactagagcacagaaggaataaggtcatgaaatttaaaaggttaaatattgtcataggattaagcagtttaaagattgttggatgaaattatttgtcattcattcaagtaataaatatttaatgaatacttgctataaaaaaaaaaaaaaaaaaaaaaaaaa

SEQ ID NO: 101 - DNA, 1501 bp, HOMO SAPIENS; identical to SEQ ID NO: 16

SEQ ID NO: 102 - DNA, 4231 bp, HOMO SAPIENS
atatgtagccttttcattttcatgaaagtgaagtgatttttagaattcttagttgttttctttagaagaacatttctagggaataatacaagaagatttaggaatcattgaagttataaatctttggaatgagcaaactcagaatggtgctacttgaagactctggatctgctgacttcagaagacattttgtcaacttgagtcccttcaccattactgtggtcttacttctcagtgcctgttttgtcaccagttctcttggaggaacagacaaggagctgaggctagtggatggtgaaaacaagtgtagcgggagagtggaagtgaaagtccaggaggagtggggaacggtgtgtaataatggctggagcatggaagcggtctctgtgatttgtaaccagctgggatgtccaactgctatcaaagcccctggatgggctaattccagtgcaggttctggacgcatttggatggatcatgtttcttgtcgtgggaatgagtcagctctttgggattgcaaacatgatggatggggaaagcatagtaactgtactcaccaacaagatgctggagtgacctgctcagatggatccaatttggaaatgaggctgacgcgtggagggaatatgtgttctggaagaatagagatcaaattccaaggacggtggggaacagtgtgtgatgataacttcaacatagatcatgcatctgtcatttgtagacaacttgaatgtggaagtgctgtcagtttctctggttcatctaattttggagaaggctctggaccaatctggtttgatgatcttatatgcaacggaaatgagtcagctctctggaactgcaaacatcaaggatggggaaagcataactgtgatcatgctgaggatgctggagtgatttgctcaaagggagcagatctgagcctgagactggtagatggagtcactgaatgttcaggaagattagaagtgagattccaaggagaatgggggacaatatgtgatgacggctgggacagttacgatgctgctgtggcatgcaagcaactgggatgtccaactgccgtcacagccattggtcgagttaacgccagtaagggatttggacacatctggcttgacagcgtttcttgccagggacatgaacctgctgtctggcaatgtaaacaccatgaatggggaaagcattattgcaatcacaatgaagatgctggcgtgacatgttctgatggatcagatctggagctaagacttagaggtggaggcagccgctgtgctgggacagttgaggtggagattcagagactgttagggaaggtgtgtgacagaggctggggactgaaagaagctgatgtggtttgcaggcagctgggatgtggatctgcactcaaaacatcttatcaagtgtactccaaaatccaggcaacaaacacatggctgtttctaagtagctgtaacggaaatgaaacttctctttgggactgcaagaactggcaatggggtggacttacctgtgatcactatgaagaagccaaaattacctgctcagcccacagggaacccagactggttggaggggacattccctgttctggacgtgttgaagtgaagcatggtgacacgtggggctccatctgtgattcggacttctctctggaagctgccagcgttctatgcagggaattacagtgtggcacagttgtctctatcctggggggagctcactttggagagggaaatggacagatctgggctgaagaattccagtgtgagggacatgagtcccatctttcactctgcccagtagcaccccgcccagaaggaacttgtagccacagcagggatgttggagtagtctgctcaagatacacagaaattcgcttggtgaatggcaagaccccgtgtgagggcagagtggagctcaaaacgcttggtgcctggggatccctctgtaactctcactgggacatagaagatgcccatgttctttgccagcagcttaaatgtggagttgccctttctaccccaggaggagcacgttttggaaaaggaaatggtcagatctggaggcatatgtttcactgcactgggactgagcagcacatgggagattgtcctgtaactgctctaggtgcttcattatgtccttcagagcaagtggcctctgtaatctgctcaggaaaccagtcccaaacactgtcctcgtgcaattcatcgtctttgggcccaacaaggcctaccattccagaagaaagtgctgtggcctgcatagagagtggtcaacttcgcctggtaaatggaggaggtcgctgtgctgggagagtagagatctatcatgagggctcctggggcaccatctgtgatgacagctgggacctgagtgatgcccacgtggtttgcagacagctgggctgtggagaggccattaatgccactggttctgctcattttggggaaggaacagggcccatctggctggatgagatgaaatgcaatggaaaagaatcccgcatttggcagtgccattcacacggctgggggcagcaaaattgcaggcacaaggaggatgcgggagttatctgctcagaattcatgtctctgagactgaccagtgaagccagcagagaggcctgtgcagggcgtctggaagttttttacaatggagcttggggcactgttggcaagagtagcatgtctgaaaccactgtgggtgtggtgtgcaggcagctgggctgtgcagacaaagggaaaatcaaccctgcatctttagacaaggccatgtccattcccatgtgggtggacaatgttcagtgtccaaaaggacctgacacgctgtggcagtgcccatcatctccatgggagaagagactggccagcccctcggaggagacctggatcacatgtgacaacaagataagacttcaggaaggacccacttcctgttctggacgtgtggagatctggcatggaggttcctgggggacagtgtgtgatgactcttgggacttggacgatgctcaggtggtgtgtcaacaacttggctgtggtccagctttgaaagcattcaaagaagcagagtttggtcaggggactggaccgatatggctcaatgaagtgaagtgcaaagggaatgagtcttccttgtgggattgtcctgccagacgctggggccatagtgagtgtgggcacaaggaagacgctgcagtgaattgcacagatatttcagtgcagaaaaccccacaaaaagccacaacaggtcgctcatcccgtcagtcatcctttattgcagtcgggatccttggggttgttctgttggccattttcgtcgcattattcttcttgactaaaaagcgaagacagagacagcggcttgcagtttcctcaagaggagagaacttagtccaccaaattcaataccgggagatgaattcttgcctgaatgcagatgatctggacctaatgaattcctcagaaaattcccatgagtcagctgatttcagtgctgctgaactaatttctgtgtctaaatttcttcctatttctggaatggaaaaggaggccattctgagccacactgaaaaggaaaatgggaatttataacccagtgagttcagcctttaagataccttgatgaagacctggactattgaatggagcagaaattcacctctctcactgactattacagttgcatttttatggagttcttcttctcctaggattcctaagactgctgctgaatttataaaaattaagtttgtgaatgtgactacttagtggtgtatatgagactttcaagggaattaaataaataaataagaatgttattgatttgagtttgctttaattacttgtccttaattctattaatttctaaatgggcttcctaattttttgtagagtttcctagatgtattataatgtgttttatttgacagtgtttcaatttgcatatacagtactgtatattttttcttatttggtttgaataattttcctattaccaaataaaaataaatttatttttactttagtttttctaagacaggaaaagttaatgatattgaagggtctgtaaataatatatggctaactttataaggcatgactcacaacgattctttaactgctttttgttactgtaattctgttcactagaataaaatgcagagccacacctggtgagggcacaaaaaaaaaaaaaaaaaaaaaaaaaaaaaaaaaaaaaaaaa

SEQ ID NO: 103 - DNA, 9560 bp, HOMO SAPIENS
gcggccaggggcgggcggccgcagagcagcaccggccgtggctccggtagcagcaagttcgaaccccgctcccgctccgcttcggttctcgctccttcggcccttgggcctccaaacaccagtccccggcagctcgttgcgcattgcgctctccccgccaccaggatgccggtaaccgagaaggatctagctgaggacgcgccttggaagaagatccagcagaacacgttcacacgctggtgcaacgagcacctcaagtgcgtgaacaaacgcatcggcaacctgcagaccgacctgagcgacgggctgcggctcatcgcgctgctcgaggtgctcagccagaagcgcatgtaccgcaagtaccatcagcggcccacctttcgccagatgcagctcgagaatgtgtccgtggcgctcgagttcctggaccgtgagagcatcaagctcgtgtccatcgatagcaaagccattgtggatgggaacctgaagctcatcttgggtctggtgtggacgctgatcctccactactccatctccatgcccgtgtgggaggatgaaggggatgatgatgccaagaagcagacgccaaagcagaggctgctggggtggattcagaacaagatcccctacttgcccatcaccaactttaaccagaactggcaagacggcaaagccctgggagccctggtagacagctgtgctccaggtctgtgcccagactgggaatcctgggacccgcagaagcctgtggataatgcacgagaagccatgcagcaggcagatgactggctgggtgtcccacaggtcatcactcctgaagaaatcattcacccggatgtggacgagcactcagttatgacttacctgtcccagttccccaaagccaagctcaagccgggggctcctctcaaacccaaactcaacccgaagaaagccagggcctatggcagaggaatcgagcccactggaaacatggtgaagcagccagccaagttcactgtggacaccatcagcgccgggcaaggagacgtgatggtgtttgttgaggacccagaagggaacaaagaggaggcacaagtgacccctgacagtgacaagaacaagacatactctgtggagtatctgcccaaggtcaccgggctacacaaagtcacagtcctctttgcaggacagcacatctccaagagcccatttgaagtgagtgttgacaaggcccagggagatgccagtaaagtcactgcaaaaggtccagggttggaagctgtagggaacatcgccaataagcccacctactttgacatctatacggcaggagctggtgtgggtgacattggtgtggaggtggaagatccccaggggaagaacaccgtggagttgctcgtggaagacaaaggaaaccaggtgtatcgatgtgtgtacaaacccatgcagcctggccctcacgtggtcaagatcttctttgctggggacactattcctaagagtcccttcgttgtgcaggttggggaagcctgcaatccaaatgcctgccgggccagtggccgaggcctacaacccaaaggcgtccgtatccgggagaccacagatttcaaggttgacaccaaagctgcaggaagtggggagctcggtgtaaccatgaagggtcctaagggtctggaggagctggtgaagcagaaagactttctggatggggtctacgcattcgagtattaccccagcaccccggggagatacagcattgccatcacatgggggggacaccacattccaaagagcccctttgaagttcaagttggccctgaagcgggtatgcagaaagtccgtgcttggggccctgggctccatggtgggattgtcgggcggtcagcggacttcgtggtagaatccattggctctgaagtggggtctctggggtttgccattgaaggcccctctcaggcaaagattgagtacaacgaccagaatgatggatcgtgtgatgtcaaatactggcccaaggagcctggcgaatatgctgttcacatcatgtgtgacgacgaagacatcaaggacagcccgtacatggccttcatccacccagccacgggaggctacaaccctgatctggttcgagcatacgggccaggtttggagaaatctggatgcattgtcaacaacctggccgagttcactgtggatcctaaggatgctggaaaagctcccttaaagatatttgctcaggatggggaaggccaacgcattgacatccagatgaagaaccggatggacggcacatatgcatgctcatacaccccggtgaaggccatcaagcacaccattgctgtggtctggggaggcgtgaacatcccgcacagcccctacagggtcaacatcgggcaaggtagccatcctcagaaggtcaaagtgtttgggccaggtgtggagagaagtggtctgaaggcaaatgaacctacacacttcacggtggactgtactgaggctggggaaggtgatgtcagtgttggcattaagtgtgatgcccgggtgttaagtgaagatgaggaagacgtggattttgacattattcacaatgccaatgatacgttcacagtcaaatatgtgcctcctgctgctgggcgatacactatcaaagttctctttgcatctcaggaaatccccgccagccctttcagagtcaaagttgacccttcccacgatgccagcaaagtgaaggcagaaggcccagggctcagcaaagcaggtgtggaaaatgggaaaccgacccacttcactgtctacaccaagggggctgggaaagccccgctcaacgtgcagttcaacagccctcttcctggcgatgcagtgaaggatttggatatcatcgataattatgactactctcacacggttaaatatacacccacccaacagggcaacatgcaggttctggtgacttacggtggcgatcccatccctaaaagccctttcactgtgggtgttgctgcaccgctggatctgagcaagataaaactcaatgggctggaaaacagggtggaagttgggaaggatcaggagttcaccgttgataccaggggggcaggaggccaggggaagctggacgtgacaatcctcagcccctctcggaaggtcgtgccatgcctagtgacacctgtgacaggccgggagaacagcacggccaagttcatccctcgggaggaggggctgtatgctgtagacgtgacctacgatggacaccctgtgcccgggagcccctacacagtggaggcctcgctgccaccagatcccagcaaggtgaaggcccacggtcccggcctcgaaggtggtctcgtgggcaagcctgccgagttcaccatcgataccaaaggagctggtactggaggtctgggcttaacggtggaaggtccgtgcgaggccaaaatcgagtgctccgacaatggtgatgggacctgctccgtctcttaccttcccacaaaacccggggagtacttcgtcaacatcctctttgaagaagtccacatacctgggtctcccttcaaagctgacattgaaatgccctttgacccctctaaagtcgtggcatcggggccaggtctcgagcacgggaaggtgggtgaagctggcctccttagcgtcgactgctcggaagcgggaccgggggccctgggcctggaagctgtctcggactcgggaacaaaagccgaagtcagtattcagaacaacaaagatggcacctacgcggtgacctacgtgcccctgacggccggcatgtacacgttgaccatgaagtatggtggcgaactcgtgccacacttccccgcccgggtcaaggtggagcccgccgtggacaccagcaggatcaaagtctttggaccaggaatagaagggaaagatgtgttccgggaagctaccaccgactttacagttgactctcggccgctgacccaggttgggggtgaccacatcaaggcccacattgccaacccctcaggggcctccaccgagtgctttgtcacagacaatgcggatgggacctaccaggtggaatacacaccctttgagaaaggtctccatgtagtggaggtgacatatgatgacgtgcctatcccaaacagtcccttcaaggtggctgtcactgaaggctgccagccatctagggtgcaagcccaaggacctggattgaaagaggcctttaccaacaagcccaatgtcttcaccgtggttaccagaggcgcaggaattggtgggcttggcataactgttgagggaccatcagagtcgaagataaattgcagagacaacaaggatggcagctgcagtgctgagtacattcctttcgcaccgggggattacgatgttaatatcacatatggaggagcccacatccccggcagccccttcagggttcctgtgaaggatgttgtggaccccagcaaggtcaagattgccggccccgggctgggctcaggcgtccgagcccgtgtcctgcagtccttcacggtggacagcagcaaggctggcctggctccgctggaagtgagggttctgggcccacgagctgacgacacggattcccagtcatggcgcagccccttgaaagccctttcagagttctttaaaggtgacccgaagggtgactttaataagacaggcttggtggagccagtgaacgtggtggacaatggagatggcacacacacagtaacctacaccccatctcaggagggaccttacatggtctcagttaaatatgctgatgaagagattcctcgcagtcccttcaaggtcaaggtccttcccacatatgatgccagcaaagtgactgccagtggccccggccttagttcctatggtgtgcctgccagtctacctgtggactttgcaattgatgcccgagatgccggggaaggcctgcttgctgttcaaataacggaccaagaaggaaaacccaaaagagccattgtccatgacaataaagatggcacgtatgctgtcacctacatccccgacaagactgggcgctatatgattggagtcacctacgggggtgacgacatcccactttctccttatcgcatccgagccacacagacgggtgatgccagcaagtgcctggccacgggtcctggaatcgcctccactgtgaaaactggcgaagaagtaggctttgtggttgatgccaagactgccgggaagggtaaagtgacctgcacggttctgaccccagatggcactgaggccgaggccgatgtcattgagaatgaagatggaacctatgacatcttctacacagctgccaagccgggcacatatgtgatctatgtgcgcttcggtggtgttgatattcctaacagccccttcactgtcatggccacagatggggaagtcacagccgtggaggaggcaccggtaaatgcatgtccccctggattcaggccctgggtgaccgaagaggcctatgtcccagtgagtgacatgaacggcctgggatttaagccttttgacctggtcattccgtttgctgtcaggaaaggagaaatcactggagaggtccacatgccttctgggaagacagccacacctgagattgtggacaacaaggacggcacggtcactgttagatatgcccccactgaggtcgggctccatgagatgcacatcaaatacatgggcagccacatccctgagagcccactccagttctacgtgaactaccccaacagtggaagtgtttctgcatacggtccaggcctcgtgtatggagtggccaacaaaactgccaccttcaccatcgtcacagaggatgcaggagaaggtggtctggacttggctattgagggcccctcaaaagcagaaatcagctgcattgacaataaagatgggacatgcacagtgacctacctgccgactctgccaggcgactacagcattctggtcaagtacaatgacaagcacatccctggcagccccttcacagccaagatcacagatgacagcaggcggtgctcccaggtgaagttgggctcagccgctgacttcctgctcgacatcagtgagactgacctcagcagcctgacggccagcattaaggccccatctggccgagacgagccctgtctcctgaagaggctgcccaacaaccacattggcatctccttcatcccccgggaagtgggcgaacatctggtcagcatcaagaaaaatggcaaccatgtggccaacagccccgtgtctatcatggtggtccagtcggagattggtgacgcccgccgagccaaagtctatggccgcggcctgtcagaaggccggactttcgagatgtctgacttcatcgtggacacaagggatgcaggttatggtggcatatccttggcggtggaaggccccagcaaagtggacatccagacggaggacctggaagatggcacctgcaaagtctcctacttccctaccgtgcctggggtttatatcgtctccaccaaattcgctgacgagcacgtgcctgggagcccatttaccgtgaagatcagtggggagggaagagtcaaagagagcatcacccgcaccagtcgggccccgtccgtggccactgtcgggagcatttgtgacctgaacctgaaaatcccagaaatcaacagcagtgatatgtcggcccacgtcaccagcccctctggccgtgtgactgaggcagagattgtgcccatggggaagaactcacactgcgtccggtttgtgccccaggagatgggcgtgcacacggtcagcgtcaagtaccgtgggcagcacgtcaccggcagccccttccagttcaccgtggggccacttggtgaaggaggcgcccacaaggtgcgggcaggaggccctggcctggagagaggagaagcgggagtcccagctgagttcagcatttggacccgggaagcaggcgctggaggcctctccatcgctgttgagggccccagtaaggccgagattacattcgatgaccataaaaatgggtcgtgcggtgtatcttatattgcccaagagcctggtaactacgaggtgtccatcaagttcaatgatgagcacatcccggaaagcccctacctggtgccggtcatcgcaccctccgacgacgcccgccgcctcactgttatgagccttcaggaatcgggattaaaagttaaccagccagcatcctttgctataaggttgaatggcgcaaaaggcaagattgatgcaaaggtgcacagcccctctggagccgtggaggagtgccacgtgtctgagctggagccagataagtatgctgttcgcttcatccctcatgagaatggtgtccacaccatcgatgtcaagttcaatgggagccacgtggttggaagccccttcaaagtgcgcgttggggagcctggacaagcggggaaccctgccctggtgtccgcctatggcacgggactcgaagggggcaccacaggtatccagtcggaattctttattaacaccacccgagcaggtccagggacattatccgtcaccatcgaaggcccatccaaggttaaaatggattgccaggaaacacctgaagggtacaaagtcatgtacacccccatggctcctggtaactacctgatcagcgtcaaatacggtgggcccaaccacatcgtgggcagtcccttcaaggccaaggtgacaggccagcgtctagttagccctggctcagccaacgagacctcatccatcctggtggagtcagtgaccaggtcgtctacagagacctgctatagcgccattcccaaggcatcctcggacgccagcaaggtgacctctaagggggcagggctctcaaaggcctttgtgggccagaagagttccttcctggtggactgcagcaaagctggctccaacatgctgctgatcggggtccatgggcccaccaccccctgcgaggaggtctccatgaagcatgtaggcaaccagcaatacaacgtcacatacgtcgtcaaggagaggggcgattatgtgctggctgtgaagtggggggaggaacacatccctggcagcccttttcatgtcacagtgccttaaaacagttttctcaaatcctggagagagttcttgtggttgcttttgttgcttgtttgtaattcattttatacaaagccctccagcctgtttgtggggctgaaaccccatccctaaaatattgctgttgtaaaatgccttcagaaataagtcctagactggactcttgagggacatattggagaatcttaagaaatgcaagcttgttcagggggctgagaagatcctgagtacactaggtgcaaaccagaactcttggtggaacagaccagccactgcagcagacagaccaggaacacaatgagactgacatttcaaaaaaacaaaactggctagcctgagctgctggttcactcttcagcatttatgaaacaaggctaggggaagatgggcagagaaaaaggggacacctagtttggttgtcatttggcaaaggagatgacttaaaatccgcttaatctcttccagtgtccgtgttaatgtatttggctattagatcactagcactgctttaccgctcctcatcgccaacacccccatgctctgtggccttcttacacttctcagagggcagagtggcagccgggcaccctacagaaactcagagggcagagtggcagccaggcccacatgtctctcaagtacctgtcccctcgctctggtgattatttcttgcagaatcaccacacgagaccatcccggcagtcatggttttgctttagttttccaagtccgtttcagtcccttccttggtctgaagaaattctgcagtggcgagcagtttcccacttgccaaagatcccttttaaccaacactagcccttgtttttaacacacgctccagcccttcatcagcctgggcagtcttaccaaaatgtttaaagtgatctcagaggggcccatggattaacgccctcatcccaaggtccgtcccatgacataacactccacacccgccccagccaacttcatgggtcactttttctggaaaataatgatctgtacagacaggacagaatgaaactcctgcgggtctttggcctgaaagttgggaatggttgggggagagaagggcagcagcttattggtggtcttttcaccattggcagaaacagtgagagctgtgtggtgcagaaatccagaaatgaggtgtagggaattttgcctgccttcctgcagacctgagctggctttggaatgaggttaaagtgtcagggacgttgcctgagcccaaatgtgtagtgtggtctgggcaggcagacctttaggttttgctgcttagtcctgaggaagtggccactcttgtggcaggtgtagtatctggggcgagtgttgggggtaaaagcccaccctacagaaagtggaacagcccggagcctgatgtgaaaggaccacgggtgttgtaagctgggacacggaagccaaactggaatcaaacgccgactgtaaattgtatcttataacttattaaataaaacatttgctccgtaaagttg

SEQ ID NO: 104 - DNA, 6413 bp, HOMO SAPIENS
agcagaaagccaccgatcctgaaccagccgccggagccggagtggcgaccgggtgcggagtgggcaaaaagccactgggggaggccagtcccgatcagtcctttctggctccagctccagatcccgtgcggagcaacagctgcggtcgcagtctccaccaccgcctccacctccatcgccgtcgggggaggggccggccggaccccggggtcactgccgaggaatgaagagaggcggccgggccccgcgctccgccccggcctagggccttgccccgggagcccgcgagggtggaggcctgaattttgatctatgttctacctacatccagctggctgaaagtacttgaggatcacatgaccctggacatggatgctgttctgtcagattttgtccgttccacaggagcagagccagggctagcgcgagatctcctagaaggaaagaattgggatgtgaatgccgccctcagtgattttgaacagctacgtcaagtccatgctggaaacctacccccatcctttagtgaggggagtggtggctccaggacccctgaaaaagggttttctgacagagagcctactcgccctccccgacccatcctccagcggcaggatgacatcgttcaagaaaaacgcctgtctaggggcatctcccacgccagctccagcattgtttccctggcccggtcccatgtctcctccaatggtgggggtggggggagcaatgagcaccccctggaaatgcccatctgtgccttccagcttccagatctcactgtatacaatgaagacttccgcagcttcatagagagagacctcattgagcagtccatgctggttgccttggaacaggcagggcgtttgaactggtgggtgagtgtggatcccacctctcagaggctgcttcctttggcaactactggagatgggaactgcctcctgcatgcagcctcccttggaatgtggggtttccatgatcgggacttgatgctgcggaaagctttgtatgcactgatggagaagggagttgagaaggaagcgttgaaaaggcgctggaggtggcagcagacacagcagaataaagagtcagggctggtatacacagaagatgaatggcagaaggagtggaatgaactgatcaagcttgcctcaagtgaaccccgaatgcatctaggtaccaatggagccaactgtggtggggtggagagttctgaggagcctgtatatgagagccttgaagagtttcacgtctttgtccttgctcatgtgcttaggaggcccatagtcgtcgtggcagacaccatgctgagggactccggaggggaagcatttgcccctattccctttggaggaatctatctgcctttggaggtcccagccagccagtgtcaccgctcccctctggtgctcgcctatgatcaggcccacttttctgcactcgtgtccatggagcagaaggagaataccaaggaacaagctgtgatcccacttacagattcagagtataagctgctgcccttgcactttgctgtggaccctggaaagggctgggagtggggcaaagatgatagtgacaatgtccgattggccagtgtaattctgtccctagaggtcaaattgcatctgctgcatagctacatgaatgtgaagtggatcccactgtcctctgatgcacaggctcctctggcccagcctgagtcccccaccgcctcagctggagatgagccccggtccactcctgagtctggagactcagacaaggagtcagttggcagcagttccaccagcaacgagggcggccggcggaaggagaagtcaaagcgagatcgggagaaggacaagaagagagcagattctgtggctaacaaactgggcagctttggcaaaaccttgggcagcaagctcaagaagaacatggggggcctgatgcacagcaagggttcaaagcctggaggggtggggacagggttgggaggaagcagcggcactgagacactggagaagaagaagaaaaactcactgaagagctggaagggtggcaaggaggaggcagctggggatgggcctgtgtctgagaagcccccagctgagtctgttggtaacggagggagcaagtatagccaggaggtgatgcagagcctgagcattctgaggactgccatgcaaggggaggggaagtttatttttgttggaaccctgaagatgggtcaccgtcaccagtatcaggaggaaatgatccagcgctacctttctgatgctgaggagagattcctggcagaacagaagcagaaggaggcagagaggaagatcatgaatggaggaatagggggtggccctcctccagccaaaaagccagagccagatgctagggaagagcagccgaccggtcccccagcagagtccagggcaatggcattttccactggctaccctggggactttactatccctcggccgtctgggggcggagtccactgccaggaaccccggaggcagttggcagggggtccatgtgtcgggggcctaccaccatatgccaccttccccagacagtgccctcctgggcgaccctacccccaccaggacagcatcccttctctggagccaggcagccactctaaggatggacttcacaggggtgccttgttaccacccccctaccgagtggctgattcctatagcaatggctacagagagccccctgagccagatggatgggctggaggtctccggggccttcccccaactcagaccaaatgcaaacaaccgaactgcagcttctatggacaccctgagacaaacaacttctgttcctgttgttacagggaagaactgaggaggagggagcgggaaccggatggggagctcctggtgcacaggttctgaacgggtggaacactgaagggcaaggaggctaaacaaagttaagctcaactaattggctcatcaagaacacagtccccatgttgagggggaaaatgcagtaatgtttgtgggagcctggctggaaacttttaagtgtgtgcacacaggagtgctgccaggctggcaagagcaggtcggggctggatggcacctcaggggctgtactattcctctgcagagcttgacttgatgaggtttgaggtacaaggggaaaagatggcgattctgtcttataacctcctgggtcccatccagggacctaagagaaagtagcaggggaaggtttggtgtgtgggggtgggaggtgggcagaagtcttggggaggaatgggcaaaggaggttctcagtcaataaaaccaaagttctttaggttgggaaaaagcacatggtggagtgagaagtgtggaggggaagtgggaaattggacacatttgctattgatttgaattaagctagaaattaaggttggataaattcttccccttgaaggatctggaaagacaaggcagtaatgtgtcctcatgggtgcctgttaggaggtgggggtagtttaaatccgtttgtttagatgggaaagggaggaacttaagagggaaatccttttcctcttaaggtttatttccttccaagcagtcatatgtcatctgttacagtttgagaagagattgctgattaccccctgtcttttcctcatctaagtctttaattgtatttgtttaaagggaagagtgtggtgagaacagccgtcatgtgtgttgcattttctccaggtgaattggggcagagctgatctattttttaaccacagcaataaccatacgttggggtttgagtgcaccttgggaggggtgggaggacagacattttagccagaggctgtttcaaacaaaaccaaaaacctaagtagagcattacaggcctctgtggctgctgcgtttctgtagaaagcaacttattttattgacttttttttttaaggaaaagaaataaaaagaccccagcaagcaaaaacatttaaaaaatgatttttttccctcctacttaagtggttctttctccctttgctctacttttggagaatgaacttaacatcccggcttcttttgttaagccatagctgaccttaatctgtggttagtttattaaaataattaaaaatactttctaagaagagatatttttgatattaggactgatgttgaaacatataggggcaatttataaaaaggtagttagagaaatatattttagtgaactataaccacagagcacagatgactcccaatgagctgatctgtctttaggtttctccctttccctgacccttccctgttctctaggggctgggagtggggatgcggacacagtagggggagctccttcgcattttgcacaaagcacaagtctgaacagcctatgctctggccagagccatttctaagagctttaaaccggaagacctatcctgggccaattttcctttttctttatatttttttccgggaaaaaaagtcaactatgcaattgtatacactcccgggtgcatgtgaagaaggggaataagtgtacttatgtgtccagagtattaactggggctgtttttctgtgtttggatttctcttttgaggtatgtactcataacccatcccttggaacgtaatccccacatttgatctaaagcacttgagcgtgcatgcatgtgcgtgcgtgcatatgtgtgtgtgttttcctcctcggtagccagtcaagattgtccttgttggaaatgctcacggtttataaaggttattttctcctcaacaaactcagaagtcacctattttccaaatctgatttaataatttcctatggctattaattcttagggttttctttgaaaatagatttgtgttaaggaagcagtgagattccaaaggaagggatgtgtatatgtctaggcaggtctggaacctggtatgagatgagcactcccctaagttgcaaaatttaagggttactataaaactcattaatcaagatactataaaaaatgcagtatttaaaaaaattaatgcaaaaaatttatgttggataaaatagcgaaatcttacaggatctgacaggactgagattaggaggagggaagtgaggctgaattgaataagtatggggatgaatccttcttatttaaatttttgatacattgtccatcatagactttttacattaattgtgattttttaaaaatgttgcattaaaatagtatttatcttggttactgggttttttggcactccttaaattttgtgcccaaggtgagtgctttgctcacctcaccctagttacgtccctgtttctgtgatttgaacactagcgagaacaccactgtgtgcgcctccacccccatcacacaccaaacaacaggtggctcagacaccctgaatttgcacagctcacctagctttcctaatttaggccttcatatcatagaatggtggcctggaccaataggaatgaaaacagaccaggggttttcccagagaataaagccggaaaagttttgattctccactggactgctgtgtttggatttgatctgttgttagattctagttaacacttttgtttttaaaaactaaggacaaatgaacaaaaaaccttgtatcatgtttgtttttatttataagttagccaatcccaattccgtttgctttattttcaaataaaaaaagatggaaattttgaggggtggtctaggggtgaatatggtaaaatggggctttaggccttatagctttttattaagaaataaattattttttttatttgggagggtaactatttattgaggcattgaaaaacctctccattctaaggatgagagaccctgagacaatggatattttttataggagatagtgaagtttgttttgcttcattctttcggggagggttttggtgggatggggggaggtgaaggaataatgcctgggaaattaatatagattcagcttggtttgtggtattttgggaagatgagggaatagaagaggcaagcccatgtcgttactgggttggggagaaggaaagaaggggcatatggcctgcactcgaaatgggcagaaaaattccttagttaaggaggggtgtgtgagtgaagggggaaggtagaccctttaaccccaagtgagggatgatatcatctctcaggcttaaatttaagtgcacttagttcctttaatccagggcaactggggtacctactgaagtttttaatggagaggggagattttcagggttcttgtttttccctttttgatgttagacagtgctactccctccctgctgtgctctctgccccatctccaatggagtaagtattactgtaggataggcctccgcttctcccttaacctatgctgcatttattgaaagttacaagatttaaccagaagtttttcctccatactggtttttatcaacaaaataaaaagattatatccaaa

SEQ ID NO: 105 - DNA, 408 bp, HOMO SAPIENS
  misc_feature (35)..(35): n is a, c, g, or t
  misc_feature (56)..(56): n is a, c, g, or t
  misc_feature (79)..(79): n is a, c, g, or t
  misc_feature (87)..(88): n is a, c, g, or t
gttaatactgccaaatcaccttagatgataaatgntttgttccttaccaattacantgacatcaatttccccagaaatngttttcanncacggttttctaatttcagtgtataaatgcccttgtctgaacgttcacttggagaaatgacaagttcggcataggcagacaaggtcttcattttcacccggtcccctgtttctagtactttatctccaaaacaccaggttgcagttggccttggatagcctgtacttggaaccaggatcgtgataggatttgggacaataacttccagaccatctttaaatgcacttaaatccattgttggttcaactacaaagaagaaaagttaatgagtttgcagtgccatatttaagtccctgttgccccaaagtagctatgtgcta

SEQ ID NO: 106 - DNA, 444 bp, HOMO SAPIENS
gactaaatgtcagcccagggtatagtaaccatgacacagtactatccttggtgaagagttgggaataggattaattgcggaaaaaatatatataaatgccataggacacttttagcacaaaagtagttgtttacctcccattctcctcctttaatctcagtgcttttactatttggtttcttttttggcattttacaaaagggaagaaatggaaaacataccccttcttggtcattgggtaacagcaccatttcggtaacagtcatacttgatgacaagtatgatgatattttaaggacatgaacatgggtgaaatcaatgtgtagatggtacaaattaaccgaattctttttaaagcatttcctgtggatcccaggatcatgaggacataacagaagaataaggtctgaatcttgttcaccagtttgctctcagcctaattgg

SEQ ID NO: 107 - DNA, 5155 bp, HOMO SAPIENS
acagaccttccgggaaagcgcggaattcagaggcagagtgtttccaatgtttgaggtactttagaatgtttactttgggaggtcaaaattgttgactatggctaactgttcccaagaagagctagatgaagagtttgaacagtttatgaaagagctttcagatgattcttttgaaaattcagacaaaacagctagacaatctaaaaaagagatgaagaagaaagatacagtgccttggtggataactgaagatgattttaaagatgatggacttcttggaacaaatgtgagctatttgaaaacaaagaagacttctcagcctgttatggaaatagaagaggagtctgctgaaaagattcaatttcttaagagcagtggaacctctctcttaagtactgatagcttagaaacaaatgaactagtagtttctgagctcaaccatagtagtctcggagtgggattggacacattagaagaacaagaggagaaagaacaattttttgccaggcttgagaaaggcttgacatcttccattgattattcgagattaaataaggaattggattctaatgactctacacattttaaagctttacatagtaatcaagccaacgcagaactaactgatgacgaacatgagaatgaatcgaaacatgaagaactggcagaaaattacagtgatgattttgaagatgagtatgttggtgcaccgttgactactaaagatgaagagatgccttccaaagagaattccaaatcagaaaaaataagtgtgcccaaacaggaagaagaaaaaactggcatgcttgctaatgttgtgctgcttgattcattagactctgttgcagaggtcaatcttgatgaacaagataaaataacacctaagccaaggtgcctaccagaaatgactgagaatgaaatgacaggaacaggtgtttcttatggacaaagcagtagtgacgttgaagccctacatcaagcttattgtcatatagcccattcattgggagatgaagacaaacaaaaaattgagagtaacacagtggaagatatcaagagctcagtgaaaggtcatcctcaagaaaatgaagagaattcaaaaaacatctctactatggaatctgatctgcccacagtagaggagctgatgaaacctatcagaatagattcctttgggatcagtggttttgatttacaacctgtcagctctgagaaagtggccgaaagaaaagaaactgaattttttagctctttacccctgaagatgaacccaaatattttgtctcaagactcacaacatgtgaaccttttttttgacaaaaatgatgagaatgtgattttacaaaagaccacaaatgagagtatggaaaacagctgtccacaagtaactgaagtaactgccacagaagaacatgttgataaaatgtaccttaatattttgaggaaaaaaataactgttaattcttcatcattatctcaggatgacaaaattaataaaacttacagatctcaacttagttctgaagaagaaggggctgtaatgggtaaacaggtaccatacaagaaggccagaagtgcacctcctttacttaaaaggaaaccccagagtggattatatgcgtcagttaggagctcaggctatggcaaacccagttcaccactcaagatgttttctactcttgaaaagaaaacttcagaggacattataaaaagcaaaaacttgagatcgatttctacctccaatcaacctaggaaaaaagaaatcttatctggaacaaaactcatcaagcctgcagctttggataaaccagctcacaaaactgaaagttgcctgtctactcgtaagaagtctgaaaatcccacagaaactgattcctgtattcagtttcagactgattccttaggatactgtggtgagaacaaggagaagaaattacttatgtttaaaagagttcaggaagcagaggataaatggaggggtgcgcaagccctaattgagcaaattaaagccacattctcagaaaaggagaaagaactagaaaataagttggaagaactaaagaaacaacaggaaaaagaactcttcaaattgaatcaagataattatattcttcaagccaagttaagcagctttgaagaaacaaacaaaaaacaaaggtggttacattttggagaagcagctgatcctgtcactggagaaaagttgaagcaaatccaaaaagaaatacaagaacaagagacacttcttcaaggatatcaacaggaaaatgaacgattatataatcaagtaaaagatctccaagaacaaaacaagaaaaatgaggagcgaatgtttaaggaaaaccaaagtttattcagtgaggtagcttccttaaaagaacagatgcacaaaagtcgttttctgtctcaagtagttgaagattcagagcccacaagaaatcagaattttacagatctgttagcagaactacggatggcacagaaagaaaaagacagtttattggaagacatcaaaagactgaaacaagacaaacaagctcttgaagtagacttcgaaaaaatgaagaaagagagggaccaagccaaagatcagattgcttatgtcacaggtgagaaattatatgaaataaaaattttagaagaaacacataaacaagaaatcagtcgtctgcaaaaaagattacagtggtatgctgaaaatcaggaacttctggataaagatgcacttcggcttagagaagcaaatgaggaaattgagaagctcaaacttgagattgagaaactgaaagctgaatctgggaatccatctattcggcagaagatacgcttaaaagataaagcagcagatgccaaaaaaattcaggatctggagcgacaagttaaggaaatggaagggattctgaagagaagatatcccaattctttacctgctttaatattggctgcatcagcagctggtgatacagtggataaaaatacagtggaatttatggagaaaaggataaaaaagctagaagctgatctggagggcaaagatgaagatgcaaagaaaagccttcgtaccatggaacaacagtttcagaaaatgaagattcagtatgaacaaagactagagcagcaggagcagctacttgcctgcaaattgaatcaacatgactctcccagaattaaagccctagagaaggaacttgatgacatcaaggaagcccatcagatcactgtaagaaaccttgaagccgaaatagacgttcttaaacatcagaatgctgaattagacgtcaagaaaaatgataaagatgatgaagattttcagtctatagaattccaggtggaacaggctcatgctaaagctaaattagtaagactcaatgaagaactggctgcaaaaaagagagaaatacaagacctctcaaaaactgtggagaggcttcagaaagacagaagaatgatgctatcaaatcagaactcaaagggcagagaggaaatgtctgccaaaagggcaaagaaagatgttttgcactcaagtaaaggaaatgctaactccttccctggaaccctggacagcaagctgtaccaaccacatactttcactgattcccatgtttcagaagttttacaagaaaactacagattaaaaaatgagctagaaggattaatttcagagaagaatgaactgaagatgaaatctgaagcagtgatgaatcaatttgaaaactccatgagaagggtcaaggaagatactgcagcacacattgcatccctcaaagcatctcatcagagagaaatagagaaactcctttgccaaaatgcagtagaaaattcttcttccaaagtagctgaactaaatcgtaaaatagcaactcaagaggtacttataagacatttccaaagtcaagttaatgagctgcagagtaaacaagagtctctcgtagtttctgaagttcgagaagaaattctacagaaagagattacaaaactcttagaagaattgagagaagccaaagaaaaccatacaccagagatgaaacatttcgtgggcttagaaaagaaaattaagcagatggaaatgagacatgcacaaagagaacaggaacttcaacagataatacagcaaacacaccaagtagtagaaactgagcaaaacaaagaagttgaaaaatggaaaagactggcacagttaaagaatcgtgagctggagaagttccgcacagaactagactcaatattagatgttctccgagagctgcaccggcaaggagtggttgtgccagttgcttttgcagatgaaatgaatgcaccagagtattaatagaaattcagatttcataatgaccttattaaaaggcctgaagatggatgggattgtgccactgtcaggacagcttatgaaaaacaagtgttccaatatgtttccagaaagcaaacaaccaaagcaacatttcaaaataaattgcctttaaccaataagaaaaaaaacatataatggtgtattttactaaaaatcattaaccagtctcattttaagtgatttatggacagtttcctttatagcagagaagggctcacttgtatgctagaaatagaaagaaaagaaaattgaacatactccgccacatttttattgataatgtgaggtttttaaaatttttattttagatccagggggtacatgtgcttgttgtaacatgggtgtattgaataatggtgggaattgggcttctagtgtacccatcatccaaatattaaacactgtacccaacaggtaatttttcaacgcttactgccgctcacactctttcccctattggagtccccagtgtctgttatctccatctttatgtctctgtgtacccattgtttagctcctacttttaagtgagaatatatgcaatattttattttttatgtctgatttagttcacataggataatggcctccagctctatccatgttgctgcaaatgacatgatttcattcttttttatagttgcataatactccatttatatatctctctctatatatatctcacgttttctttatccagtcaattgttggtagatacttaggttggttccatgaatttgctattgtaaatattgctgcaataaacatacatgtacagatatcttttttaaaaaaaaaaaaaaaaaa

SEQ ID NO: 108 - DNA, 3115 bp, HOMO SAPIENS
aaagcagtggtgttttaccactctgcagagaaagctaaggttgctaaccaaacaaaataactttacactgacaatgccaatttttacatttctttcagaacaagggacactcaaactaccagagaaacggaccaatggactgcgaagaactcctaaacaggtggatccaggtttaccaaagatgcaggtcattaggaactattctggaacaccacccccagctctgcatgaaggaccccctttacagctccaggccggggataccgttgaacttctgaaaggagatgcacacagtctgttttggcagggcagaaatttagcatctggagaggttggattttttccaagtgatgcagtcaagccttgcccatgtgtgcccaaaccagtagattattcttgccaaccctggtatgctggagcaatggaaagattgcaagcagagaccgaacttattaatagggtaaatagtacttaccttgtgaggcacaggaccaaagagtcaggagaatatgcaattagcattaagtacaataatgaagcaaagcacatcaagattttaacaagagatggcttttttcacattgcagaaaatagaaaatttaaaagtttaatggaacttgtggagtactacaagcatcattctctcaaggaagggttcagaaccttagatacaactctgcagtttccatacaaggagccagaacattcagctggacagaggggtaatagagcaggcaacagcttgttaagtccaaaagtgctgggcattgccatcgctcggtatgacttctgtgcaagagatatgagagagttgtccttgttgaaaggagatgtggtgaagatttacacaaagatgagtgcaaatggctggtggagaggagaagtaaatggcagggtgggctggtttccatccacatatgtggaagaggatgaataaattcaaatcccgtgttgcaccctgcaccaaaaatttcagagaagggataaatagaagcctgcacagcatcgtgaattaactgaagtgtttaaaaagctgcatttctggctgttcaacatcctccctccttagcccctcctaagtcttaatgctgagatttctaaagatgctggtactgacagattaatggcttgcctagagctgtgcaagaaacagcctgccagtctgtcattgtcagggaccagggcaaaaccaagagctgttcttcccagaagagccctgcaaacacattggttcgtgcttccctttacttcttctggtcagataccatgaatgccagtcatcagtaaatcttaatacacttttgctttattctcacatgccattcaccagattatttgatggtacaaagaagcagaagtgtaattttccttttcccagcatgacgaaaaattggagttctgccatttgagcagcttactggaaagatccagccttacttgtcttaaattgtccaacaaggtgactcattgcccggcaaacacttttaccctcagatgttactcatgatattataaaatatgaggccagtgctcaggtttgcatcataagtgagctatccctgaagggttttaattacttatttggtgtcctgattatatttgcaaacttctttataaaaggtgaaaaaagcacacaaaagagagggtgtcttcatattaaaccttcacaaccttcatgatttcataggattattttggaaatatagcacttgactttatgaaaggatctgggctaggtatattaagggtagttgccaataacctgaagaagctggcattgtttacagaaacagatcaagggctataatttatgtcattttatagcagcagtatctattaatacatgccttttcctcccatccacctcccccgcacacacacaaagatgacctgggacatgatttttttattcccacattttcttggagcacaaacaactttgttgaggattttggaaggaaagcacaactgggtcctttattcatttctgggacagaaagagggtcagtggacttttgtgggcctccagcttctctcagagtctccccctctgcagcccatcctgggagtgtattaactggagggaagatgggtcttgcagtacatttgttttgcccagccatcactcttttttgtgaggagcctaaatacattcttcctggggtccagagtccccattcaaggcagtcaagttaagacactaacttggccctttcctgatggaaatatttcctccatagcagaagttgtgttctgacaagactgagagagttacatgttgggaaaaaaaagaagcattaacttagtagaactgaaccaggagcattaagttctgaaattttgaatcatctctgaaatgaagcaggtgtagcctgccctctcatcaatccgtctgggtgccagaactcaaggttcagtggacacatccccctgttagagaccctcatgggctaggacttttcatctaggatagattcaagacctttacctcagaattatgtaaactgtgattgtgttttagaaaaattattatttgctaaaaccatttaagtctttgtatatgtgtaaatgatcacaaaaatgtattttataaaatgttctgtacaataaagttacacctcaaagtgtactcttggaatggattctttcctgtaaagtcttatctgcgactctgtctcgggaatgttttgtctgttgccgtcagccgaactttgttatggagggagcagcctcacacaagcagaaacactcctgtggatggtattgtagcatgtattgtttattttagtcaatagaccctctccttataaatggtgtttagtcttcctgttgcatttcatgggcctgggggtttcctagcagaggatattggagcccctttttgtgacattaccaattacatctttgtccacgtttaatactttgttttggaaaatttaaatgctgcagatttgtgtagagttctaataccaaagacagaagtaaatgttttccatatactttgtcttgcctgtatgcagccctcgtgtaatacggtgaattagagtggtatttcactttgtattattttgtaaatatgtcaatataataaatagtgactaaattgataaaaaaa

SEQ ID NO: 109 - DNA, 1655 bp, HOMO SAPIENS
gcccgcccgcgccccgaccagcccggcctcgggcagccactcaccggtgtccccgtccgcgtccttcctccccgggtcccggccatggcgctgagtgaacccatcctgccgtccttctccactttcgccagcccgtgccgcgagcgcggcctgcaggagcgctggccgcgcgccgaacccgagtccggcggcaccgacgacgacctcaacagcgtgctggacttcatcctgtccatggggctggatggcctgggcgccgaggccgccccggagccgccgccgccgcccccgccgcctgcgttctattaccccgaacccggcgcgcccccgccctacagcgcccccgcgggtggcctggtgtctgagctgctgcgacccgagctggatgcgccgctggggcccgcactgcacggccgctttctgctggcgccgcccggccgcctggtcaaggccgagccccctgaagcggacggcggcggcggctacggctgcgcccccgggctgacccgtggaccgcgcggcctcaagcgcgagggcgccccgggcccggcggcttcgtgcatgcgaggtcccgggggccgccccccgccgccgcccgacacaccgccgctcagccccgacggccccgcgcgcctgcccgcgcccggtccgcgcgcctccttcccgccgcctttcggtggccctggtttcggcgcgcccgggcccggcctgcattacgcgccgcctgcgcccccagccttcggtctcttcgacgacgcggccgccgccgcggcagccctgggcctggcgccccccgccgcccgcggtctcctcacgccgcctgcgtccccgctggagctgctggaggccaagccaaagcgcggccgccgctcttggccccgcaaacgcaccgccactcacacctgcagctacgcgggctgcggcaagacctacaccaagagttcgcatctgaaggcgcatctgcgcacgcacacaggtgagaagccctaccactgcaactgggacggctgcggctggaagtttgcgcgctcagacgagctcacgcgccactaccgaaagcacacgggccaccggccattccagtgccatctgtgcgatcgtgccttctcgcgctccgatcacctggcgctgcacatgaaacggcacatgtagccgggacgcccccgcccacctgcgcgcggccgtggcgggtcccacgcgccgggcgcggccccctcccaaactgtgactggtatttattggacccagagaaccgggccgggcacagcgtggctacagagggtctccctcgatgacgacgacgacgacgccaccaccccagcccccgtctgtgactgaaggcccggtgggaaaagaccacgatcctccttgacgagttttgtttttcaaaatggtgcaataatttaagtggcatcttctctcccaccgggtctacactagaggatcgaggcttgtgatgccttgtgagaaataagggccttaatttgtactgtctgcggcattttttataatattgtatatagtgactgacaaatattgtattactgtacatagagagacaggtgggcatttttgggctacctggttcgtttttataagattttgctgggttggttttttttttaattaaaaagttttgcatcttttaaaaaaaa

SEQ ID NO: 110 - DNA, 382 bp, HOMO SAPIENS
  misc_feature (46)..(46): n is a, c, g, or t
tgttccagggtcagaagcccctgtggtccccatgcaatcccagganacccagatacctctttatttctctttgttcacagcttagtttatttttaataagatagctgttttaggatcctatgtggaggatgttgaatcagtttctggcttaggcatcaactttttctcacttcaattctatttgcctttttgtcaaatgacaataaactttcttctctcatgagttgagtcacattgtttagtggtgattttatataaaaatatgtttcaccagatgggtgatgatttcctaagcattttgttctagcacagtgacataacagtgctatatcatatgtcattgatatctttgaccatcacttgtgacaattcgttttcttaa

SEQ ID NO: 111 - DNA, 1412 bp, HOMO SAPIENS
ggctgcgcttccctggtcaggcacggcacgtctggccggccgccaggatgcaggccccgcacaaggagcacctgtacaagttgctggtgattggcgacctgggcgtggggaagaccagtatcatcaagcgctacgtgcaccagaacttctcctcgcactaccgggccacaatcggcgtggacttcgcgctcaaggtgctccactgggacccggagactgtggtgcgcctgcagctctgggatatcgcaggtcaagaaagatttggaaacatgacgagggtctattaccgagaagctatgggtgcatttattgtcttcgatgtcaccaggccagccacatttgaagcagtggcaaagtggaaaaatgatttggactccaagttaagtctccctaatggcaaaccggtttcagtggttttgttggccaacaaatgtgaccaggggaaggatgtgctcatgaacaatggcctcaagatggaccagttctgcaaggagcacggtttcgtaggatggtttgaaacatcagcaaaggaaaatataaacattgatgaagcctccagatgcctggtgaaacacatacttgcaaatgagtgtgacctaatggagtctattgagccggacgtcgtgaagccccatctcacatcaaccaaggttgccagctgctctggctgtgccaaatcctagtaggcacctttgctggtgtctggtaggaatgacctcattgttccacaaattgtgcctctatttttaccattttgggtaaacgtcaggatagatataccacatgtggcaagccaaagatctatgcctctgttttttcaatgagagagaaatagcaaatgttctttctatgctttcctcaccatcatcacagtgtttacaaacttttgaaaatatttagtctgttacaaacttctgtcatgtagctgaccaaaatcctgcagggccacagtcggcactgttatttgcttcttttaatcagcaaaggcctcaagtcttaaaataaaaggggagaagaacaaactagctgtcaagtcaaggactggctttcaccttgccctggtgtctttttccagatttcaatatattctctgatggcctgacaggcctattaagtagatgtgatattttcttccaagatgacctccattctcggcagacctaagagttgcctctgagttagctctttggaatcgtgaacacaggtgtgctatattgtccttgtcctaactgtcacttgccatggcctgaatgttggcttaactgaatattgtatgaaaagacatgcctccatatgtgcctttctgttagctctctttgactcaagctgtggggctcctctatacatgctatacatgtaatatatattatatatatttttgcaagtgaacaataaaacattaaaagataaaa

SEQ ID NO: 112 - DNA, 470 bp, HOMO SAPIENS
  misc_feature (133)..(134): n is a, c, g, or t
  misc_feature (248)..(248): n is a, c, g, or t
  misc_feature (256)..(257): n is a, c, g, or t
  misc_feature (272)..(272): n is a, c, g, or t
  misc_feature (289)..(289): n is a, c, g, or t
  misc_feature (361)..(361): n is a, c, g, or t
tttacacctccatttagatacatttatagttcactatgtacagagaaacctttagactgaacttcaaatatgtaaggagactgctttagactaaacttgatttaacaatctctacccacttctactcttcccnncattattttgaagcgtcatctatcagtattatgtttcatctgccaaaattttaacatgtatgcctaaaaggtaagacatatggtagtttcagtgttttttctccttttaaaacnataaaccnnacaatatgggttaantgtggattatgtgggcntaagcaggttgatgtgggttaatgtgggttatgtgggctaagcaggttgatgtggttaatttttaacttccnaaagatgtttataagttattatgagtagactttttggaataaaggtttcctcatattgcagtattttggaaagtgattttactaaaaaataatacgggccaggcatgtg

SEQ ID NO: 113 - DNA, 3409 bp, HOMO SAPIENS
gccttccgcaaactcctgacctgtgggtccatccgttcaacggccaaaggctggcggaggagggatcccctgcctttctcggaacggaacggagcagagtcgtgcgtggttgagtttagataaaagccgagtgagcgcgctctgttccttaagattagtttaaggtgccttggattgctctgaagagctttgaccacctgatattgcttacatctggaacttcttggcttctcattccccagatgtgcgggtcagagaggattctacaggcaggaaacatcttagaaatcagggttgggcaggcaggagccaggagagtagctacaatgacttcaccagtactggtggacatacgagaagaggtgacctgccctatctgcctggagctcctaacagaacccctgagcatagactgtggccacagcttctgccaagcctgcatcacaccaaatggcagggaatcagtgattggtcaagaaggggaaagaagctgccctgtgtgccagaccagctaccagccagggaacctgcggcctaatcggcatctggccaacatagtgaggcggctcagagaggtagtgttgggccctgggaagcagctgaaagcagttctttgtgcagaccatggagaaaaactgcagctcttctgtcaggaggatgggaaggtcatttgctggctttgtgagcggtctcaggagcaccgtggtcaccacacgttcctcgtggaggaggttgcccaggagtaccaggagaagtttcaggagtctctaaagaagctgaagaacgaggagcaggaagctgagaagctaacagcttttatcagagagaagaagacatcctggaagaatcagatggagcctgagagatgcaggatccagacagagtttaatcagctgcgaaatatcctagacagagtggagcaacgggagctgaaaaagctggaacaggaagagaagaaggggctacgaattatagaagaggctgagaatgatctggtccaccagacccagtcgctgcgagagctcatctcggatctggagcgtcgatgtcaggggtcaacaatggagctgctgcaggatgtgagtgatgtcacagaaaggagtgagttctggaccctgaggaagccagaagctctccctacaaagctgagaagtatgttccgagccccagatctgaaaaggatgctgcgagtgtgtagagagctgacagatgtccaaagctactgggttgacgtgaccctgaatccacacacagctaatttaaatcttgtcctggctaaaaaccggagacaagtgaggtttgtgggagctaaagtatctggaccttcctgtctggaaaagcattatgactgtagtgtcctgggctcccagcacttctcctctggtaagcattactgggaggtagatgtggccaagaagactgcctggatcctgggggtatgcagcaattcactgggacctacattctctttcaaccattttgctcaaaatcacagtgcttactccaggtatcagcctcagagtggatactgggtgattgggttacagcataaccatgaatatagggcctatgaggattcttccccttccctgcttctctccatgacagtgccccctcgccgtgttggggttttcttagattatgaggctggtactgtctccttttataatgtcacaaaccatggcttccccatctacactttctctaaatattactttcccactactctttgtccatattttaatccttgcaactgtgtaattcctatgaccctgcgtcgtccaagctcttgaatattcttctgttcccacccacttctgataagtaccctgaggcttatcagcatgtgattctcccttctgatcttctgtttttctgtgttctcaattcttttgttgttttttggtttttgaatcttttttgagatggaatctcgctctgtcgcccaggctggagtgcactggcgcaatctcggctcactgcaacctctgcctcctgggttcaagcgaacctcctgcctcagcatcccaagtagctgggattacaggcacccaccaccatgcccaactaatttttgtatttttatagagatagggtttcaccgtgttggccaggctgatctcgaactcctgaccgcaagtgatccacccgcctcggtctcccaaagtgctgggattacagatgtgagccgccgcgcccagacagttctttcgttttaaacagttactcagtactaggatgcacccagtggtgagagtaagcatctttgactgatgacaggtcttgaggtggatagggggcgctttcagtattttgccattaagcatagtatttgatgcaggttttttttgattgatgcaggggatcaaatttaggaagttctgatctgttaatttactacaagtttttgtataaaatgaaaactcgtattctacctatgtcttttctgtaaattattgagacaattgtgtatcatttttgttctgttaatgtggcttagtacattgatttacttcaatttgttaccacaacttgctgaaatacaccattattatttgttgtatgcaatactggatttattttgataacgtattgtttagattttgttctcatctatgttaatgaaagaaattggcctgtatttttacattcttgtaatatctttgccaggttctataaaatgcaataataagcaaataaattactttgtttttgtataagtatgtataggattgagctctaaaaccaaaccattataatgataatttgggtagcttcaaactcaaattgaagagagtcttcactacaatcttcactacaacctttggccttcctctctacatttaagagtagcaatagaacaataaaaaaaaatacgtctttcaaattaattgcagtaaaaacaaaagagtagtggggagagaaaaacaatccaatacatatttttctctcagaatagaaagaaaacacaaagagaaaatatgaacaatataaagcacttaaaggaagaggatgatttcttccagcttttccacactctctttatgcgcaggaacaaacagctgttgagtgagctgctatgactttggtagagaggtgcaatatgttttttgaaccagctataaaagaaattaagaggtacatgtgagggtagaaacaaatatcaaggatgagaatggcactggctgtcccatatggtatccaggagccaccaatgtctgttgagtacttcatacatgcctagtctgaattgagatgtgctcaatgtataaaatatataccagatttcaaatacctacttcaaaaaataatgtaaaatatctcactaataacttttcctttgtgtattgcaatgataatatgttggctctattggattaaataaagtatgttattcattttacctgtt

SEQ ID NO: 114 - DNA, 7921 bp, HOMO SAPIENS
ctccctccggcggccaccgccaggggccgctgtggcacccgcccctcccgcttccttgggcccttcccgctgccccactcttgtccaagatggcgaccgcggcgctgcttcgaggcgccactccggggcgcggcggcccggtctggcgctggcggctgcgcgcggccccaaggtgccgcctggcccacagctcctgcagtcctggtggcgacccaacggccggagcggcctgggcctgcttccggctggacgggcgcaccctgctgcgcgtgcgtggccccgacgcggcgcccttcctgctagggctgctgaccaatgaactgccgcttccgagtcctgcggccgcgggggccccgcctgctgcgcgcgcgggctacgcccacttcctgaacgtgcagggccggacgctctatgacgtcatcttgtacgggctccaggaacactcggaggtgtctggcttccttctggagtgtgacagctcggtgcagggcgcgctgcagaagcacctcgcgctatacaggatccggcggaaggtcacggtggagccgcacccggagctgcgagtgtgggcggtgttgcccagttcccctgaggcctgcggggctgcatcgctgcaggagagggcaggggctgccgccatcctcatccgcgacccgcgaacagcacgcatggggtggcggctcctcacccaggatgaaggcccagccctggtgcccgggggccggctcggggacttgtgggattatcaccagcaccgatacctgcaaggcgttcctgagggggtccgagacttgcctcctggggtggccctgcccctggagtccaacctggccttcatgaacggcgtgagcttcaccaaaggctgctacattggccaggagctgacggcccgcacccaccacatgggcgtcatccgcaagcgcctcttccctgtccggttcttggacccccttcccaccagtggcatcacccctggtgccacggtgctgactgcctcaggacagactgtgggcaagttcagggctggccagggcaacgtggggctggccctgctgtggtcagagaagatcaagggtcctctgcacatcagagcctctgagggtgcccaggtggccttagccgcatctgtgccagactggtggcctacagtctccaagtagtccgaagccttggctggcgcaggctgatggggaggctggggcctggggcctttggcctctgtccagggtcttcccgtcccatctgtctgctgcgcctactgggtgggagccctggtttccatctgggaaagtcccccttgtaggtgccctgcctggccccacccatgctcaggggccccaggcacgtgggttgttttctccctggacttcctgtggccccagaggagcccaccgtgtgagtgctgggctccagatggcgccgggtcccaatcgtggctccacacagggttgtctgggaggacgggacggtgtctctggccagcactggcagcttccgggccttgtaccccactctgcctggcatgagcctcatggggggttggtccctgtgcctggaagcggggtggtgtccagggtctgcaggctggggctcgggctttgggagttgtttcactgtgcttgcttccagcatgtctcagggtggggctatgcgtggtctagaggggtctggggcattggatcaggtggcatgtgggtgtctacacatcgagaagcacacagggatgagccactaggtatcccatgctggaggcttgtggaaggctgtgcccatctcccatgtttccccacctctgttcctcctcagagccctccaggagcgtggggtgggggccagcgcagggctcaggagccagcagggcagagttctgcctgtgtgtgctgggttttggcatagcctgtgtttgcagtgagagtgacttgctgtcagtcacggggcacagcctcctgttcacccactggcttcccccttcccactgaagtgtgagctctatgtttcagggcatctattaaagagtgagccacaggcagccccttgggagctctggtttcatttgggggagagggaggtgggggcttagtttttgtgatctggctgactggaccccgggaacagcgctcctttgagaacgcccagacctaccagatgaagcacttggcatggctgcaggccagcaggggaggcctcagaggcccaggctgggcacgtgggtgccgagtctgcaaaggacagccccatggctgtgagctgtcggctgcagggcgcagggcctggggggcaggcgtttgggccaccaagctggacgttagggtggccacagagggccaagcaggcagggagcctgtgccgccatcctggggggccacaggtgctctctagaaatctgcagccatggcggttttggggtcaggggtctaaaggcagctctgagctgcagtgtagtttgtgatcacccaggaggagggtgtagagcggatggacgggaggaagcggctgcagctggagggaagagaggggccgtccagcctcacccgctgcagtcagctctcctatgggcaaggaaacagctaggtggccctgacccctgcggtcctgagagccggtggccttcagcccctcttggacaggtcatggtctggaagcgcccagcgcaggatggattccagaccagcatccctgcaaccttttcagccccactggctgctgctttaaactggcatggagacatttgatcagcttcccagccagttttctctccagctcagccaggagtgggtgcctgtggcctgtgtcaccaagagctggtgtctcctgcatgaggggcatgcacccctggaatgagggtctgtgcctcgagctcaaagtgtcccggctctgtcatctgcctgaagttgcctggcttttccagtggggcctccttgagtgctgcagcatctgggagcatcctagcctgtcccgtgggtgtggctgggtgagggctaggaggtgagccaggaaggaagcactccactccagagtgaggtgccgcctgagccatcctgtgccccctcagtgtcttcaggtctctgcaggtgtcaggatctcaaaatacttggttcagatcaaacacatttcgtgttcttctgtgtccttttttttttttttttttttttttgagatggagtcttgctctgttggccaggctggagctcagtggcacaatctctgctcactgcaacctctgcctcccaggttccagtgattttcctgcctcagcctcctgggtagctgggactacaggcacatgccccatgcccggctaatttttgtatttttagtagagatggggttttaccatgttggccaggatggtctcaattacaggcatgagccactgtgcccagcctcttctgtgtctttaaaaaggaaagtgtcagtcaacaaaagagcccctctgtcatacaaaccaaatcagttttcaccaaaatgtccttagtcctctcagaaaggcctggcctttaggaccttggaagcaggccctaaagcgcatcggcagggtcagagctttgtgttcaggaacactgggatctgctgagagctggtgtagccgctccaaaactgcacactgcttttcctgtctgctttagtttgtgttgtaaaaacataggaagttcgtgtgtgtgtgtgtgtgtgtgaattcaaggcataaggtgcagttgtgttatgtgggtatagtgcatggtggtgcagtctgggcttcttaccctcacacctcctgcctcccctcgttagagtcccccacatccgccttccactttctgagcccacattgcctgttgggcagctcctggttatgaggcaggacgtgtggtgtttgactgtctgtttctgagctgttttacttaacacagtgtatatggtgcatctttaggaaagcatgcttgtattttcctttcaaagccagatatgggcgggtgtggtggctcatgcctgtgatcccagcactttgggaggccgaggcaggaggattgcttgagcccaggagtttgagagcagcctgggcaacatatcaagactctgtctcttaaaaaaaaaaaaattagccaggcatggtggtccacacctgtggtcccacctattcgggaggctgaagtgcgaggatcacttgagcccaggaggttgaggctgcagtgagctgtgattgtgccactgcactccagcctgggcaacagagcaagaccctgtcttaaaacaaagaaagaataaaaaagaagagaagttgcagttggtagtatttccagagcccggcagacagtgtagaaactgtgagaaacccacctccaaatcaggccttagatagaaaacatcctaagaagtatacgttcattgtaaaatcattatcatcatcatcttctaatccccaaggagacaagctccctgttctgtgttcttgtatgaggcggtcagtcaagcgcagcccgagaggagaggcaggagcctgggagagcctctgctagacctttcctggcacttccccaggaaaggcaaggcagggcagatgtgcggctggccagctggagtgatttccatgggctccaagctgtaggagtggtccctggctgccagagtgctctggccagatagaggtgggctctggactggtgaggctgcattgcggaggcgcgcacacccagctgggcccttatctgtaaggactggctggcctgggaggggcagtctcccagccagaaggtggaatttttttttttttttgagataccaaaacatcctaaggtacaggaaagaaattgtcaacacacacacacagtaccataaacaaggcccagcagaaaggcagacagaagcacacacaccaatgttctgatcttagagtaagcagacacatcacatggaatgaggatgtttaatatatttaaagaaaacaatttatgcacaggaagcaagagactataaaaatgaccaagcagattttaaaaagagaacttgttgaaataaaaataaaatactctaaaaaatattccatgatgtgtttcctgaagaatcgggaactgtttgaagaaatgacccaaagtgcagcacagaaagacagagctggaaaatatgagatgggatgagacaagaagatggagagtttagtatgacatccgcaatttacgagtaattccagaaggaggggaaagagaatatggggtggaggcaagtattcagagaaatacggctgagaactttcccaaaccaacaggagcccctgctccttaggttcaggaaccagcagctcccaagcagcatagttaaaaagctctacccaaacagtcacgtcttggtgaaagtacagaatctcatgacaaagagatcttaaggcagaaaagaaagagattatctggaaagaagaaaataagtagttgattaaaagcaacagtggaagccagaaagatagtaaataatatcttcaaagtcctgggagaaaatagtgatagcctagaattgtgtacccagaaaatccgtctttcaagaatgaggggccaggcgcagtggctcacgtctgtattcccagcactttgggaggccaaggcaggtggatcacctgaggtcaggagttcaagaccagcctgatcaacatggtgaaaccctgtctctactaaaaatataaaaattagctgggtgtggtggcatattcctgtaatcccagctactcgggaggctgaggcaggagaatcacttgaacccaggaggcagaggttgcagtgagccaagattgtgccattgcactccagcctgggcaatagaatgagactctgtctcaaaaaaaaaaaaaaaaaaaaaaaaaaaaagagggctaaacgcattttcataccacgaaactgccctcactccggagtttgctgccagcagagcctagagcgtctaaggcatgtctgggcttctggcgagggatcctgtggggaagctggagatggaagaaggagtgaataggcaggaaggtggatttgtgggcatgtctaaaacaccacatctagaagcttctacttagaatgcctacttttggagtttataaaaaagatgccacatgttgagttgggagagaggtgcccaaacctacagtgttctaaagtccccctactggtcggaaggagggcacggacactgacttcagcatctgttacaaggcttatcagagttttcagataatctctaaaagaatggaaatatatcttccaaactatagagggaagaccatggaatttaaaagccagtccttcaaggagaaatgaacaaactcaaaatcgtagttgggagtgttttttttttttttgagacagagtctcactcttgcccaggctggagtggagtggcataaacacagctcactacagcctcaaccttctgggctcagatgattctcctgcctcagcctcctgagtagcaggaactacaggtgtgagtcatcacactcagctaattttttttttttttttttactttttgtagagatggggttctcactgcattgcccaggctggtcttgaatttctgggctcaggtgatcttcccacctcagcctcctgagtagctgggaccacaggtgcatgctaatttttaaaattttttgtttttaaatgctggtcttcaactcttgtccccaagtagctgggattggggcatgaggcactgtgctaacttcatgttgaaattgaattgccattctaacagtgttaagagatggggcctgtaagaggtgattaggctgtgagggctccactctccaagggcggagttaatgttatgaaagggtaagtccagcccgcttgtgcctctcttgccctccagtgttcaaagcaccatcttggaggtggaattcccaagtcggccagttcctggatcttggactgtccggtctccagaaccgtgagccaataaacctctgttccttgtaaatgagtcagcctcaggtattctcttgtagcagcacaaatggaggcagacacttccttcaccaatctcatgggaggcccactcctgtgagctgcctctagttccccaggccacagactccatcagggctcacctggagccgtccctgtctcacctggaagctctcccactcctctggccagcctgggcatctccacccaatatgagtgatggcgactgattcccttactttagcaagctgggaataaggaatgtttgcctgttcttattcaggggtctctgcatctccacacttgcacaggttgtgtgtacatacattttcctgtctttctggtaagcccctggggtggagctctgggccacagggcaggaaaactcagtgttgctaggaactgccagacattttcccggagtgagtgcagcatttacattcccaccagaagtgtgccaggttcttgtcatactgcgtcctcgccagcgcttggtgctgtcagtcttcttagtttccatttagagattcagtgtttaaattttgaacgtcttgggtgaacaccttggtttgagaaaagtaagaaaaagggtctgtctggctatgggccatggagacccagggcagtgctccacgtgccaaccctggggcagggagcccaagctaggactgtgactgtctgggctgtgggcatctgaccatctccagtgtccccgtctttgatttccctggcgatggtgctagcttagtttgtgcgcatcggcatttgtgggagaaatgaaggattaatacattttgttttatgtcagactctctcagtgagaagttctcagggacaataatagcagggggtcctgctgaagaaaaactgggagatggctgagctctggtccatctttcattgattcattcatttcttcattcattcaaccatgtattgaatgcttatagccaatgaaaataaagtacacagtatattttaaaaaaaaaaaaaaaaaa

SEQ ID NO: 115 - DNA, 7347 bp, HOMO SAPIENS
cctcgcgccgcccgcccggcagcccggccggcgcgcgcacgccgcgagccgctggcgctcgggctccgctcggatcccatgcaacagccacgatgtgaagcggggcagagccgggggagcccagcccagccagcctccagacgttgccccatctgacgctcggctcgaggcctctctgtgagggaccggggggccatccccctccagggcggagatcggaggtcgctgccaagcatggcgcccacctggggccctggcatggtgtctgtggttggtcccatgggcctccttgtggtcctgctcgttggaggctgtgcagcagaagagccccccaggtttatcaaagaacccaaggaccagatcggcgtgtcggggggtgtggcctctttcgtgtgtcaggccacgggtgaccccaagccacgagtgacctggaacaagaagggcaagaaggtcaactctcagcgctttgagacgattgagtttgatgagagtgcaggggcagtgctgaggatccagccgctgaggacaccgcgggatgaaaacgtgtacgagtgtgtggcccagaactcggttggggagatcacagtccatgccaagcttactgtcctccgagaggaccagctgccctctggcttccccaacatcgacatgggcccacagttgaaggtggtggagcggacacggacagccaccatgctctgtgcagccagcggcaaccctgaccctgagatcacctggttcaaggacttcctgcctgtggatcctagtgccagcaatggacgcatcaaacagctgcgatcagaaacctttgaaagcactccgattcgaggagccctgcagattgaaagcagtgaggaaaccgaccagggcaaatatgagtgtgtggccaccaacagcgccggcgtgcgctactcctcacctgccaacctctacgtgcgagagcttcgagaagtccgccgcgtggccccgcgcttctccatcctgcccatgagccacgagatcatgccagggggcaacgtgaacatcacctgcgtggccgtgggctcgcccatgccatacgtgaagtggatgcagggggccgaggacctgacccccgaggatgacatgcccgtgggtcggaacgtgctggaactcacagatgtcaaggactcggccaactacacctgcgtggccatgtccagcctgggcgtcattgaggcggttgctcagatcacggtgaaatctctccccaaagctcccgggactcccatggtgactgagaacacagccaccagcatcaccatcacgtgggactcgggcaacccagatcctgtgtcctattacgtcatcgaatataaatccaagagccaagacgggccgtatcagattaaagaggacatcaccaccacacgttacagcatcggcggcctgagccccaactcggagtacgagatctgggtgtcggccgtcaactccatcggccaggggccccccagcgagtccgtggtcacccgcacaggcgagcaggccccggccagcgcgccgcggaacgtgcaagcccggatgctcagcgcgaccaccatgattgtgcagtgggaggagccggtggagcccaacggcctgatccgcggctaccgcgtctactacaccatggaaccggagcaccccgtgggcaactggcagaagcacaacgtggacgacagcctgctgaccaccgtgggcagcctgctggaggacgagacctacaccgtgcgggtgctcgccttcacctccgtcggcgacgggcccctctcggaccccatccaggtcaagacgcagcagggagtgccgggccagcccatgaacctgcgggccgaggccaggtcggagaccagcatcacgctgtcctggagccccccgcggcaggagagtatcatcaagtacgagctcctcttccgggaaggcgaccatggccgggaggtgggaaggaccttcgacccgacgacttcctacgtggtggaggacctgaagcccaacacggagtacgccttccgcctggcggcccgctcgccgcagggcctgggcgccttcacccccgtggtgcggcagcgcacgctgcagtccaaaccgtcagccccccctcaagacgttaaatgtgtcagcgtgcgctccacggccattttggtaagttggcgcccgccgccgccggaaacgcacaacggggccctggtgggctacagcgtccgctaccgaccgctgggctcagaggacccggaacccaaggaggtgaacggcatccccccgaccaccactcagatcctgctggaggccttggagaagtggacccagtaccgcatcacgactgtcgctcacacagaggtgggaccagggcccgagagctcgcccgtggtcgtccgcaccgacgaggatgtgcccagcgcgccgccgcggaaggtggaggcggaggcgctcaacgccacggccatccgcgtgctgtggcgctcgcccgcgcccggccggcagcacggccagatccgcggctaccaggtccactacgtgcgcatggagggcgccgaggcccgcgggccgccgcgcatcaaggacgtcatgctggccgatgcccagtgggagacggatgacacggccgaatatgagatggtcatcacaaacttgcagcctgagaccgcgtactccatcacggtagccgcctacaccatgaagggcgatggcgctcgcagcaaacccaaggtggttgtgaccaagggagcagtgctgggccgcccaaccctgtcggtgcagcagacccccgagggcagcctgctggcacgctgggagcccccggctggcaccgcggaggaccaggtgctgggctaccgcctgcagtttggccgtgaggactcgacgcccctggccaccctggagttcccgccctccgaggaccgctacacggcatcaggcgtgcacaagggggccacgtatgtgttccggcttgcggcccggagccgcggcggcctgggcgaggaggcagccgaggtcctgagcatcccggaggacacgccccgtggccacccgcagattctggaggcggccggcaacgcctcggccgggaccgtccttctccgctggctgccacccgtgcccgccgagcgcaacggggccatcgtcaaatacacggtggccgtgcgggaggccggtgccctgggccctgcccgagagactgagctgccggcagcggctgagccgggcgcggagaacgcgctcacgctgcagggcctgaagcccgacacggcctatgacctccaagtgcgagcccacacgcgccggggccctggccccttcagcccccccgtccgctaccggacgttcctgcgggaccaagtctcgcccaagaacttcaaggtgaaaatgatcatgaagacatcagttctgctcagctgggagttccctgacaactacaactcacccacaccctacaagatccagtacaatgggctcacactggatgtggatggccgtaccaccaagaagctcatcacgcacctcaagccccacaccttctacaactttgtgctgaccaatcgcggcagcagcctgggcggcctccagcagacggtcaccgcctggactgccttcaacctgctcaacggcaagcccagcgtcgcccccaagcctgatgctgacggcttcatcatggtgtatcttcctgacggccagagccccgtgcctgtccagagctatttcattgtgatggtgccactgcgcaagtctcgtggaggccaattcctgaccccgctgggtagcccagaggacatggatctggaagagctcatccaggacatctcacggctacagaggcgcagcctgcggcactcgcgtcagctggaggtgccccggccctatattgcagctcgcttctctgtgctgccacccacgttccatcccggcgaccagaagcagtatggcggcttcgataaccggggcctggagcccggccaccgctatgtcctcttcgtgcttgccgtgcttcagaagagcgagcctacctttgcagccagtcccttctcagaccccttccagctggataacccggacccccagcccatcgtggatggcgaggaggggcttatctgggtgatcgggcctgtgctggccgtggtcttcataatctgcattgtcattgctatcctgctctacaagaacaaacccgacagtaaacgcaaggactcagaaccccgcaccaaatgcctcctgaacaatgccgacctcgcccctcaccaccccaaggaccctgtggaaatgagacgcattaacttccagactccagattcaggcctcaggagccccctcagggagccggggtttcactttgaaagcatgcttagccacccgccaattcccatcgcagacatggcggagcacacggagcggctcaaggccaacgacagcctcaagctctcccaggagtatgagtccatcgaccctggacagcagttcacatgggaacattccaacctggaagtgaacaagccgaagaaccgctatgccaacgtcatcgcctatgaccactcccgtgtcatcctccagcccattgaaggcatcatgggcagtgattacatcaatgccaactacgtggacggctaccggtgtcagaacgcgtacattgccacgcaggggccgctgcctgagacctttggggacttctggcgtatggtgtgggagcagcggtcggcgaccatcgtcatgatgacgcggctggaggagaagtcacggatcaagtgtgatcagtattggcccaacagaggcacggagacctacggcttcatccaggtcacgttgctagataccatcgagctggccacattctgcgtcaggacattctctctgcacaagaatggctccagtgagaaacgcgaggtccgccagttccagtttacggcgtggccggaccatggcgtgcccgaatacccaacgcccttcctggctttcctgcggagagtcaagacctgcaacccgccagatgccggccccatcgtggttcactgcagtgccggtgtgggccgcacaggctgctttatcgtcatcgacgccatgcttgagcggatcaagccagagaagacagtcgatgtctatggccacgtgacgctcatgaggtcccagcgcaactacatggtgcagacggaggaccagtacagcttcatccacgaggccctgctggaggccgtgggctgtggcaacacagaagtgcccgcacgcagcctctatgcctacatccagaagctggcccaggtggagcctggcgaacacgtcactggcatggaactcgagttcaagcggctggctaactccaaggcccacacgtcacgcttcatcagtgccaatctgccttgtaacaagttcaagaaccgcctggtgaacatcatgccctatgagagcacacgggtctgtctgcaacccatccggggtgtggagggctctgactacatcaacgccagcttcattgatggctacaggcagcagaaggcctacatcgcgacacaggggccgctggcggagaccacggaagacttctggcgcatgctgtgggagaacaattcgacgatcgtggtgatgctgaccaagctgcgggagatgggccgggagaagtgtcaccagtactggccggccgagcgctctgcccgctaccagtactttgtggtagatccgatggcagaatacaacatgcctcagtatatcctgcgagagttcaaggtcacagatgcccgggatggccagtcccggactgtccggcagttccagttcacagactggccggaacagggtgtgccaaagtcgggggagggcttcatcgacttcattggccaagtgcataagactaaggagcagtttggccaggacggccccatctctgtccactgcagtgccggcgtgggcaggacgggcgtcttcatcacgcttagcatcgtgctggagcggatgcggtatgaaggcgtggtggacatctttcagacggtgaagatgctacgaacccagcggccggccatggtgcagacagaggatgagtaccagttctgttaccaggcggcactggagtacctcggaagctttgaccactatgcaacctaaagccatggttccccccaggcccgacaccactggccccggatgcctctgcccctcccgggcggacctcctgaggcctggacccccagtgggcagggcaggaggtggcagcggcagcagctgtgtttctgcaccatttccgaggacgacgcagcccctcgagcccccccaccggccccggccgccccagcgacctccctggcaccggccgccgccttcaaatacttggcacattcctcctttccttccaattccaaaaccagattccggggtggggggtggggggatggtgagcaaataggagtgctccccagaaccagaggagggtggggcacagaccatagacggacccctcgtcctcccccagcggtggtagggggacccggggggctcctccccgctctgcagcctggggacactgggctgggaccagaatccagctttcttttaaaactctcagtgtaactgtatcccgtgacatttcattttttttaaatagtgtatttttttttccatttttttttttaagagaaacaaacaaaagactcgccagtcaatgactttcaaagagaactaactttggcttattcatattctgttcaaagacagtctattttttcactgtagaaagcgtccttgtgtgatagttacgttcgcaaacgcgcacgccaggcccatggctgtaccttggcttttttttttttttttttttttttaatttttcctaccatcagaaagtgtgctttgctcacagaagaatgggatgtccttttttctttcttggctttttttttccccctttttgtttcatttttataaattaaattttcagacatatcaaatacagttctgagggtaaggtcatgggggagctcggacccagtggcgttgggtgcggttgagggggacgctgctgtaagaggagagagatgacagtggtcctcctctgagagcctgagctgtctccccgtctcccgcccccaaggagacagagaggatcctacttcttcggggacagtggctgtatggctgtgctgccccacatcagggaccctttccccctgggactgtggggcagtttgggagcaaaaccagaaggacaggcccccctctacccgcctaccctgagcaagcgagttgttcctctttgtacaagggcaggtctgcggttactttcaacactgtttattccagcggaagcagccgggtggttttcccacccccgtgtatgtagatatatcgactttgtattaaaggaagatcgtctga

SEQ ID NO: 116 - DNA, 7416 bp, HOMO SAPIENS
gcaaagtgaaactctggcaagttgcgggcgcgcggggagctgtcgcgggcagcgcgccctcgggaggacgtggccccggcccccgcccgcagtgggcccgaccctcatggccctgagcaaagggctgcggctgctggggcgcctgggggccgagggggactgtagcgtgctgctggaggcgcgcggccgcgacgactgcctgctgttcgaggccggcacggtggccacgctggctccagaagaaaaggaagtcattaaaggacagtatggcaagctcacggacgcgtacggctgcctgggggagctgaggctgaaatctggtggcacgtctctgagcttcctggtgttggtgacaggctgcacatctgtgggcagaattccagatgctgaaatctacaaaatcactgccactgacttttaccctcttcaggaagaggccaaggaggaggaacgcctcatagctttgaagaaaatcctcagctcgggggtgttctatttctcatggccaaacgatgggtctcgctttgacctgactgtccgcacgcagaagcagggggatgacagctctgaatgggggaactccttcttctggaaccagctgttgcacgtgcccttgaggcagcaccaggtgagctgctgtgactggctgctgaagatcatctgcggggtggtcaccatccgcaccgtgtatgcctcccacaagcaggccaaggcctgcctcgtctctcgcgttagctgtgagcgcacaggcactcgcttccacacccgtggcgtgaacgacgacggccatgtgtccaacttcgtggagacagagcagatgatttacatggacgatggagtgtcatcttttgtccagatcagaggctccgttccgctgttctgggaacagccagggcttcaggttggctcccatcatctgagactccacagaggcctggaagccaatgcccctgctttcgacaggcacatggtgcttctgaaggagcagtacgggcagcaggtggtcgtgaaccttctgggaagcagaggcggagaggaggtgctcaacagagccttcaagaagctgctctgggcttcttgccacgcgggcgacacgcctatgatcaattttgacttccatcagtttgccaaaggtgggaagctagagaaattggagaccctcttgaggccacagttaaagctgcactgggaagacttcgatgtgttcacaaagggggagaacgtcagtccacgttttcagaaaggcactttgcggatgaactgtcttgactgcctggaccgaaccaacactgtgcagagcttcatcgcgctcgaggtcctgcatctgcagctcaagaccctggggctgagttcaaaacccatcgttgaccgctttgtggagtccttcaaagccatgtggtctctgaatggccacagcctgagcaaggtgttcacaggcagcagagccctggaagggaaggccaaggtggggaagctgaaggatggagcccggtccatgtctcgaaccatccagtccaacttcttcgacggggtgaagcaggaggccatcaagctgctgctggttggggacgtctacggcgaggaggtggcagacaaagggggcatgctgctggacagcacggcgctcctggtgactcccaggatcctgaaagctatgactgagcgtcagtccgaattcacaaatttcaagcggatccggattgctatggggacctggaacgtgaacggaggaaagcagttccggagcaacgtgctcaggacggcggagctgacagactggctgctcgactcgccccagctctcgggagctaccgactcccaggatgacagcagcccagctgacatatttgctgtggggtttgaagagatggtggaattgagcgcagggaatattgtcaatgccagtactaccaacaagaagatgtggggtgaacagcttcagaaagccatctcacgctctcatagatacattctgttgacttcggcacagctggtgggcgtctgtctttatatctttgtacgtccataccatgtcccgttcatcagggacgtagccatcgacacagtgaagacgggcatggggggcaaggcggggaacaagggcgccgtcggcatccgcttccagttccacagcaccagcttctgcttcatatgtagtcacctgacggccgggcagtcccaggtgaaggagcggaatgaagactacaaggagatcacccagaaactctgcttcccaatggggagaaatgttttttctcatgattatgtattttggtgtggcgatttcaactaccgcattgatcttacttatgaagaagtcttctattttgttaaacgccaagactggaagaaacttctggaatttgatcaactacagctacagaaatcaagtggaaaaatttttaaggactttcacgaaggagccattaactttggacccacctacaagtatgacgttggctcagccgcctacgatacaagcgacaaatgccgcacccccgcctggacagacagggtgctgtggtggaggaagaaacatccctttgataaaacagctggagaactcaaccttctagacagtgatctagatgttgacaccaaagtcagacacacctggtctcctggtgccctgcagtattatggtcgtgcggagctacaagcgtctgatcacagacctgtgctggcgatcgtggaggtggaagttcaggaagtcgatgtgggtgctcgggagagggttttccaggaagtgtcctccttccagggccccctggatgccactgttgtagtaaaccttcaatcaccgaccttagaagagaaaaacgagtttccagaggacctgcgtactgagctcatgcagaccttggggagttatgggacaattgttcttgtcaggatcaaccaagggcagatgctggtaacttttgcagacagtcactcggctctcagtgtcctggacgtggacggtatgaaggtgaaaggcagagcagtgaagattagaccgaagaccaaggactggctgaaaggtttgcgagaggagatcattcggaaacgagacagcatggcccccgtgtctcccactgccaactcctgtttgctggaggaaaactttgacttcacaagtttggactatgagtcagaaggggatattcttgaagacgatgaagactacttggtggatgaattcaatcagcctggagtctcggacagtgaactcgggggagacgacctctctgatgtccccggccccacagcactggctcctcccagcaagtcacctgctctcaccaaaaagaagcagcatccaacgtacaaagatgacgcggacctggtggagctcaagcgggagctggaagccgtcggggagttccgccaccgttctccgagcaggtctctgtcggtccccaaccggcctcggccacctcaacccccgcagagacccccccctccaaccggtttaatggtgaaaaagtcggcttcagatgcgtccatctcctccggcacccatggacagtattcaattttgcagacggcaagacttctaccaggagcacctcagcaacctcccaaggctcggactggaataagtaaaccttataatgtcaagcagatcaaaaccaccaatgcccaggaggcagaagcagcaatccggtgtctcctggaagccagaggaggtgcctccgaagaagccctaagtgccgtggccccaagggaccttgaagcatcctctgaaccagagcccacaccgggggcagccaaaccagagaccccacaggcgcccccactccttccccgtcggcccccacccagagttcctgccatcaagaagccaaccttgagaaggacaggaaagcccctgtcaccggaagaacagtttgagcaacagactgtccattttacaatcgggcccccggagacaagcgttgaggcccctcctgtcgtgacagcccctcgagtccctcctgttcccaaaccaagaacatttcagcctgggaaagctgcagagaggccaagccacaggaagccagcatcagacgaagcccctcctggggcaggagcctctgtgccaccacctctggaggcgccgcctcttgtgcccaaggtacccccgaggaggaagaagtcagcccccgcagccttccacctgcaggtcctgcagagcaacagccagcttctccagggcctcacttacaatagcagtgacagcccctctgggcacccacctgccgcgggcaccgtcttcccacaaggggactttctcagcacttcatctgctacaagccccgacagcgatggcaccaaagcgatgaagccagaggcagccccacttcttggtgattatcaggaccccttctggaaccttcttcaccaccctaaactgttgaataacacttggctttctaagagctcagaccctttggactcaggaaccaggagccccaaaagagatcccatagacccagtgtcagctggcgcttcagctgccaaggcagagctgccaccagatcatgaacacaaaaccttaggtcactgggtgacaatcagtgaccaagaaaagaggacagcactgcaggtgtttgacccactggcaaaaacatgactgagcagctttgaaggctgcagtcctatagaatgcataccttcctccctctagacatccctccaccagaagagacatctatttaaaggcacactggccaaaacgtttgtgcatctgtcactctcgtgtagtttacaaaaatcgtgtctcttattcagtaagatggttactcagccaccaaaatatatttcactcaaggcttgtacatctgaagtttgctcttcaaggaatgggaaccttcctgttaaattcggtgtatggattttaagaaaggaatctagccaatgaggtccaagaagttctcacccattgaatttttaaatggctgttcagttcatgttgtacgtgatggagatttgtcttttgttttatttgcattttacagatttggtataacattttggggagccacctgaaggttgatgtataaagtaaggattagagaaagaggtcgttgtgaccattagtagctgtcctggcccacttaaacaaggttacaaaaaatcagagtcggaagcagccaaataggtcaacctaatgactagactgtacattcccatgagccttcatgtttaagtgtgtacatgtgcgttaaccttgatgatgcgtgaatcccgagggagccggtggcatacaccgttagcttaaccttagcttaaactagctgaaggctcctgtgccatgtcttagacattgcatgccctatcaattactataatcctgagccatggtgtgctactgaaaccaatttttatccaccatctagtccttattaaatgaaacctcacggatcctttgttccgcttatattccatgcataccacataaaagcacacagtgcgaaaactcttgctgatacgcgatattgattctcattgttagaatatggagagtgtttcagcctcgtctgtccggctggagcttcgggatggaaagtgctatgtgtccctgcatataagaatcaccaggccagtgtttctgggtttgcttgtctatatgtttgtctatattttttgcctatacatttttcccacgtttccaacagcacttctcacctattcaataactgaaaaagacattaccatagtgctttacatttttaaagtaatgttacaaggtctggaatccatttggagcagataccgtgttttcgctatttaataagaagttcagtagtgaaatcttactgtaccgcctgttgtatctgggagcctcgtacagaggctcgcacagcagtgatcaagtgtcatcccttacgtgactgggggatgtctgtcctaaaagctgactgctaggatagtaaggatcatcttgcctgggctatgccactgtcttgttaccaattagacatctggaatttcataattagttttcattgtcactgtcaagatatattgcagattacttaaatatggccatcaaaacaaaagttacaacacgtatctcttttcatctgaaaactaatacctggaaaaggataaaaaaaaaaaggaatccgtgacccacagagctagacagataagatgcatagttgaccagtcataaaaggcggtgtttaggtgatcaggatgccgttggtggcatttacgtgctttatatgatttttacctctgtaacaaacacaagaaataaacagaatggtccttaacagagtttgggggagagagcaagatgggttccttggagaagctgatttgccaagatgcacatcgctattaacagccagagtcataaatgaaatgaaattgaagaattcattcaaatgctcttttccctataacctcttttctcaccaaaaaggagataaatttgaaaacagataaatgtaacaaccagtcaaagaagcaggggaaaagtaagctcctccaaagttgcttgcagtgctggaaatagatctcatttttaggttttctcttcgttccagataccaaataaatgggacagagaataaaatttttgttaaaatatgtgctcatctcctaagtagctcttcagagtctgaccgtaagtaaaaacacacagaattgtgttgactgggggaggtgaatcacaaaaaagttacgaggagtttaagagttaaatattatttgatcgtggctgtcaaatttagtgaacaacatagattggatttggagttggtagtaggtatggttctcataccagaattctcttaaaaaaaaaaaaaaggacaattggaattgccttatttatttttaaaatcaatgcttactagttggtaggattcccaggtcagcagcagggttgattaaataatcttgacaatgagcagctgccatcttgggggatttcattctgtggttttttaaatgtttcgtctttgatgctaccatccagggcttcttattgtgaccttgtagcctattttgttcctgctgttctctaacatggtgcagttcacgcagactggtttaggtacttcacaactcaccattgtctctctgaccccaagcctagtcccttttacatcaccatcttctcagacttcttgcctattcttaaaatatgttttggttaatgattgaattaggacatcagcttaagcaattcctgtaacggtttaacgttgttgaagttcaaggcacataataaaattctccctgatgtgtgtgtaagtataaacaaagtaatgtatcaaagcgttcactttataatgaagtcatttcattgggaaggaaagctgcaaagattattgggggactagtgattaataaaatcctgtaatatttttgaagtgaaaatttgtactgaaattgtacatgatacctattaaatgtttttgtctttttttaaaaaaaaaa

SEQ ID NO: 117 - DNA, 1835 bp, HOMO SAPIENS
gtggtgaggcctacagaagcggccttcagctggaccttggtctccccgccggacttcgagggtgtcatcgccgcccctgttgggggtgagcgccgcgcggctgcagcatgcctcacaggaagaaaaagccctttatagagaagaagaaagctgtgtcttttcacttggtccaccggagccaacgagatcctttagcagcagatgagagtgcaccccagagggttctattgcccacacaaaaaatagacaatgaagaaaggcgagcagaacagaggaagtatggagtgttctttgatgacgactatgactacctgcagcacctgaaggaaccatctgggccttcagagcttattccctcaagtaccttcagtgcacacaacaggagagaggagaaagaagaaacgctagtaattccaagcactggaattaagttgccttcatcagtgtttgcttcagagtttgaggaagatgttggattgttaaataaagcagctccagtttcaggacctcgactggattttgatcctgacattgttgcagctcttgatgatgattttgactttgatgatccagataatctgcttgaggatgactttattcttcaggccaataaggcaacaggagaggaagagggaatggatatacagaaatctgagaatgaagatgacagcgagtgggaagatgtggatgatgagaagggagatagcaatgatgactatgactctgcaggcctattgtcagatgaagactgtatgtctgtgcccggaaaaactcacagagctatagcagatcacttgttctggagtgaggaaacaaagagtcgcttcacggagtattcgatgacttcctcagtcatgaggagaaatgaacagctgaccctacatgatgagaggtttgagaagttttatgagcaatatgatgatgatgaaattggagctctggataatgcagaattggaaggttctattcaagtggacagcaatcgcttacaggaagttttgaatgactactataaagagaaggcagagaattgtgtaaaattgaatacccttgaacccttggaggatcaagacctgccaatgaatgagcttgatgagtctgaggaggaagaaatgattactgtagtccttgaagaagccaaagagaagtgggattgtgaatctatttgtagtacatactcaaatttatataaccatccacagcttatcaagtatcaaccaaagcccaaacaaattcgaatatcttctaaaacaggaatacctctcaatgtcttaccaaagaaaggactcacagcaaagcaaactgaaagaatacagatgattaatggcagtgatcttcctaaagtatcaactcagccacgttctaaaaatgaaagcaaagaagataaaagagcaagaaagcaagctataaaagaagagcgcaaggaacgaagagtggagaagaaagctaacaaattagcatttaaactggagaaaagaaggcaagaaaaagagctgctgaacttgaagaagaatgttgagggtctaaagctatagacagtggagcatacagggcaaggcactttattaggggctcctcatctttggttattgactagaaacttcagaaagacaaaactgtttgccatttttactggcagataagaggaaaatacaatatttgtattatttttatactagtaagtgtcccctgccaaccatcttgtaaatattgtaatactttaatttttaatattataagcttacatttgctctgaagtaaatgacttcatgaatgtgaaatgtttgataaattaaaggaaaatatcttcataaaaaaaaaaaaaaaaaaaaaaa

SEQ ID NO: 118 - DNA, 1530 bp, HOMO SAPIENS
agcactcccggagcctgcaacgcttgagatcctctccgcgcccgccaccccgcagggtgccccgcgccgttcccgccgccccgccgcccccgtcgcgggcccctgcaccccgagcatccgccccgggtggcacgtccccgagcccaccaggccggccccgtctccccatccgtctagtccgctcgcggtgccatgccattcctcgggcaggactggcggtcccccgggcagaactgggtgaagacggccgacggctggaagcgcttcctggatgagaagagcggcagtttcgtgagcgacctcagcagttactgcaacaaggaggtatacaataaggagaatcttttcaacagcctgaactatgatgttgcagccaagaagagaaagaaggacatgctgaatagcaaaaccaaaactcagtatttccaccaagaaaaatggatctatgttcacaaaggaagtactaaagagcgccatggatattgcaccctgggggaagctttcaacagactggacttctcaactgccattctggattccagaagatttaactacgtggtccggctgttggagctgatagcaaagtcacagctcacatccctgagtggcatcgcccaaaagaacttcatgaatattttggaaaaagtggtactgaaagtccttgaagaccagcaaaacattagactaataagggaactactccagaccctctacacatccttatgtacactggtccaaagagtcggcaagtctgtgctggtcgggaacattaacatgtgggtgtatcggatggagacgattctccactggcagcagcagctgaacaacattcagatcaccaggcctgccttcaaaggcctcaccttcactgacctgcctttgtgcctacaactgaacatcatgcagaggctgagcgacgggcgggacctggtcagcctgggccaggctgcccccgacctgcacgtgctcagcgaagaccggctgctgtggaagaaactctgccagtaccacttctccgagcggcagatccgcaaacgattaattctgtcagacaaagggcagctggattggaagaagatgtatttcaaacttgtccgatgttacccaaggaaagagcagtatggagatacccttcagctctgcaaacactgtcacatcctttcctggaagggcactgaccatccgtgcactgccaataacccagagagctgctccgtttcactttcaccccaggactttatcaacttgttcaagttctgaatcccagcacatgacaacacttcagaagggtccccctgctgactggagagctgggaatatggcatttggacacttcatttgtaaatagtgtacattttaaacattggctcgaaacttcagagataagtcatggagaggacattggaggggagaaatgcagttgctgactgggaatttaagaatgtgaacttctcactagaattggtatggaaaagcaaaatactgtaaataaactttttttctaacaatttgccaaaaaaaaaaaaaaaa

SEQ ID NO: 119 - DNA, 1375 bp, HOMO SAPIENS
aataaagtattgaaaatctcacgcaatttattgaatactgtacagaaagtgaaaaatagaggtcgtatgagtacttgaggaacagtttctactgaatgcggatcacttttgcaccattgcaaagtagaaaaatcctaagtcaagtcatcatgagttggggactgtccgtaagagttattaacagaggattggaatggggattgggtagtaaggaataaagagaagcctgggcagatgcagggaacagccgatatgggcttttcaccccaggctgagacagaacaactcaaagaagaaagctcagggctgagatccgggctgagatccagacttcgtgtgagaggacacagctgtgaaagacagaggtttgctgaggctgtggagttgcagctggagaaggtgctgggcttggggcactttgcagagaagggaccttgtgcatgtcaagggaagccattcatgtgggggtactgtgcgctgctgaccattgggtgctgctgaagttaggcaccgcccaagaagtgtgcagccagaacgaggtgctgcagaggcagagtgtatgtgctacaggagctggtattgcagatggcacaggtgttgcaggtgtctgcctagaggagcacaatggaaccaggaaaagcagcccttgccccttcagtgtgtcagcagcaccctcgattgacaaagtttcactctgtgcttactgtcatgggagaggtatttacagggcccagatctattattacagaacagacaatgaagactgaatgtggatataagaggcaacaactagcataactcattaaatctaatagtgcacacataaacacaaaataacctagtaatttcttaatattgactgacaggatatatgcacgtgatgtatttataaattcatggaaaacttatataaaaaacaggcaaccataattgagtttagggaggagaacaggatggctggtggacagaaaagggagagagggaagtttgctttttttctcctgcatacccttttataccagttgagttttgtcccatgtgtgcatactattaaaaaaccataatacttgaccaggtgcagtggctcacgctggtaatcccagcactttgggaggccgaggcgggtggatcacctgaggttgggagttcgagaccagcctgaccaacatggagaaaccttgtctctactaaaaatacaaaattagccacgcatggtggtgccttcctgtaatcccagctactcgggaggctgaggcaggagaattgcttgaacccaggaggcggaggttgcagtgagccaagaacgcgctattgcactctagcctgggcaacaagagcaaaattctgcctcaaaaaaaaaaaaaaaaaaaaaaaa

SEQ ID NO: 120 - DNA, 2788 bp, HOMO SAPIENS
agaaccggaagttgttgcgcagctggcagttccccggtttctccccgacggcgtcgggaggagtgtccatcaggacagcttcacctccttgaggattaaagcctaacagtactgagctatttgtctgtcaaaatgtctgcaaaattgggaaagtcatcatcactcctaacacaaacttcagaggagtgtaatgggattctgacagagaagatggaagaggaagagcagacctgtgatccagactctagcctccactggagcagcagctacagcccagagaccttccgccagcaattcaggcagtttggctaccaggattcacctgggccccatgaggctctgagccggctctgggaactttgtcatctctggctgaggccggaagtgcacaccaaggagcagatcctggagctgctggtgctggagcagttcctggccatcctcccaaaagagcttcaggcctgggtgcagaagcatcatccagagaatggagaggaaactgtgactatgctggaggatgtggagagagagcttgatggaccaaagcagatcttttttggacgaaggaaggacatgattgcagagaagctagcaccttcagaaatcactgaggaattgccaagtagccagctcatgcccgtgaagaagcagctccagggagcatcatgggagcttcagtccttaagaccacatgatgaagacatcaaaactacaaatgtgaaatctgcttcaaggcaaaagacttctttaggcatagaactgcattgcaatgtttccaatatccttcatatgaatggctcccagagttccacatatagaggaacctatgaacaagatggtaggtttgaaaagagacaaggaaacccttcttggaaaaaacaacagaaatgtgatgaatgtggcaaaatctttagtcagagctcagcccttattttacatcagagaatccacagtggaaagaaaccttatgcatgtgacgagtgtgcaaaggcattcagccgaagcgcaattctgattcagcatcgacgaacccatactgattcaaaatatgaacatgcgattgcagaggcccaaaagaatatgtacttcaagactaggctgaagtgccccaggtcactttcaggaggcagataaataaaggccttatcttatgaaagcacacaagagcctccatactattaatatcaagttaatttcccgtgttggaaaaaaataatctcctttgcaatgtaatttggaaataagtcaatggaaacatgaaaatgactgcttgtctacaaggagtcagctaaacataaggaatgttttcataacaatattaatctatgggtgcttctgtaagatggatgatcatcttaatataaagaaaaaagggagatgaacaaaattgtcaaacaagactgatgtaccacaagtgttgtcaagtacagtgtgtgtcggagagatgtaccacagcttaactggaagaggaagcccgtaactgctgatgacaatactttcagtgtccccttttctggcataaatcaactatgaatatgtttcaagcatcacaagacaaccttttcagagtcttctgtattcttagtaagatgagtttctagacacgctgtcatgaaatgagaccctggattttgatgctcttgtacatatggacaaatcactgaagttcaatttaaagggtccactgcagtcccttataaacaattgttgaacctaaccattatagtttataagttttaagacatttatgggatatcttatttggcttatctatgggatatgagtaactatgttttacctgcatttaattcagccagattccctgtttaaaattactgaatcgtacattattaaaattattctgacagtatacaaacaacaaaattatctattttccagagattcttgataaaactctgtaatgttactacaataatacatgtattgtgttttccatggtgctacagttacacaatatggaggcaaacatcagaaatcaaagtccttggaataagggaagagactcatagtaaacttctttgtctggttgggttcctcataaagtataaaacatttcattctcagaaaatccaaccatatcttagagtatctccagaaactggcttagaggagctccaaatatgtggaattaccacactctgcttagttagtatgctgataaatgtaagattagtaggaggagaagtgaatgtaaattttattatagaattttctgatagtgattatgatttgtagctctagtgaatatgaattttatattgagttgtgtgtatcttgagtcactaaaaatgtaggatactttttatttggggctcattgtctttgtaattacggagaggaacaaaccatctattgaaacaacaagtgcctcagagatgtatatattgtgaattactgcttaattacggaaagagtttcttaggttctatgtgaataagatggcagaatctaaatcaagtattttgaaggaagcacccatcttcacttggtgctgccatcaactttgtaagattgcattctatttattgtgaataatttgagtgtttccacaggaaagtggtatgaatcatatcgtctaagtatatgatgaatctttaaagggtgtctctgtgtactttgaattattttgcagttatgtaggtatcctaatgagtgaatggtactagtttatataaaaggagaattcattgagctaaccttggttttaaaaattagcattagcacccccattatattaattttcagggatagtaaatactccaaaatg

SEQ ID NO: 121 - DNA, 1398 bp, HOMO SAPIENS
ctggttcctcccctctcaactgctctggttcttataaaaacctcacagccttccactaacatcccgtaggagcctctctccctactgctgctacacaagaccctgagactgacctgcaggacgaaaccatgaagagcctgatccttcttgccatcctggccgccttagcggtagtaactttgtgttatgaatcacatgaaagcatggaatcttatgaacttaatcccttcattaacaggagaaatgcaaataccttcatatcccctcagcagagatggagagctaaagtccaagagaggatccgagaacgctctaagcctgtccacgagctcaatagggaagcctgtgatgactacagactttgcgaacgctacgccatggtttatggatacaatgctgcctataatcgctacttcaggaagcgccgagggaccaaatgagactgagggaagaaaaaaaatctctttttttctggaggctggcacctgattttgtatccccctgtagcagcattactgaaatacataggcttatatacaatgcttctttcctgtatattctcttgtctggctgcacccctttttcccgcccccagattgataagtaatgaaagtgcactgcagtgagggtcaaaggagagtcaacatatgtgattgttccataataaacttctggtgtgatactttcatcttgtaaatctgctttcttttgggaagatattgagatatttaaatcatggcccaccttacccaaaataggagattctgttcatctcatatctagtattaattagaaaaataactacataaaaagaaggaagctaagaaggcactcactcagccataaattctctaaaccctctctaccttggaatccgtgaatggaatctggtatgttttttgcaggattttcctattgtaaattgtggcaaatacagggctcccttcatttgcttttcatctcttatgcatcaaagtcaaaaacatttctgaatcaagataatctagaagagaaaaaaggaggaaaaggaaaagagaaagcagaagggacaaataaaagcaattggcaaaaactgtcaataatagtttatacacttaactatatcaataatcacattatatgtaaatagtctaaacaatccaattattttttacttctacttatgttatatttttacttctacatttgttaaaggttccacgctacatttttactattcttgctttaaataattttaataatttcttttaaagtttagataataagaaaatatcccgggccaggcacagtggccacacctgtaatctcagtagccatgaccataccaatgcactccagcctgtgaaacagagtgagactctgtctctacagaaaaataaaaaagaaaagaaagaaaag

SEQ ID NO: 122 - DNA, 3541 bp, HOMO SAPIENS
gaagaagtaggggcggggggaagtttaggagttgaggaaagaagattaaagagcgcgaggagacaaataaaaagaagtgttaagaattgcctttgggactctgaaggctgaagaattgatgaattgcaagtttgtgccccatagctgcacagactgcctgaagttacatttagagactgaaatcactgcaccttaaaaacaaaagattgagctgcactgtattcctaatgtttcatcattactaacaggatattcctcatgacattgctgtctgatctttgaccatcagtctgtgacctgccccttctctttacatgcagccgctctctgctccctgccccaatgaacatctgcactaggcccaagccttggagtaatttacctgaagagtgacaccattgattttgaaactactgaagaaacccaagacagctgaaaaccagaaggcatctgaggagaatgagattactcagccgggtggatccagcgccaagccgggccttccctgcctgaactttgaagctgttttgtctccagacccagccctcatccactcaacacattcactgacaaactctcacgctcacaccgggtcatctgattgtgacatcagttgcaaggggatgaccgagcgcattcacagcatcaaccttcacaacttcagcaattccgtgctcgagaccctcaacgagcagcgcaaccgtggccacttctgtgacgtaacggtgcgcatccacgggagcatgctgcgcgcacaccgctgcgtgctggcagccggcagccccttcttccaggacaaactgctgcttggctacagcgacatcgagatcccgtcggtggtgtcagtgcagtcagtgcaaaagctcattgacttcatgtacagcggcgtgctacgggtctcgcagtcggaagctctgcagatcctcacggccgccagcatcctgcagatcaaaacagtcatcgacgagtgcacgcgcatcgtgtcacagaacgtgggcgatgtgttcccggggatccaggactcgggccaggacacgccgcggggcactcccgagtcaggcacgtcaggccagagcagcgacacggagtcgggctacctgcagagccacccacagcacagcgtggacaggatctactcggcactctacgcgtgctccatgcagaatggcagcggcgagcgctctttttacagcggcgcagtggtcagccaccacgagactgcgctcggcctgccccgcgaccaccacatggaagaccccagctggatcacacgcatccatgagcgctcgcagcagatggagcgctacctgtccaccacccccgagaccacgcactgccgcaagcagccccggcctgtgcgcatccagaccctagtgggcaacatccacatcaagcaggagatggaggacgattacgactactacgggcagcaaagggtgcagatcctggaacgcaacgaatccgaggagtgcacggaagacacagaccaggccgagggcaccgagagtgagcccaaaggtgaaagcttcgactcgggcgtcagctcctccataggcaccgagcctgactcggtggagcagcagtttgggcctggggcggcgcgggacagccaggctgaacccacccaacccgagcaggctgcagaagcccccgctgagggtggtccgcagacaaaccagctagaaacaggtgcttcctctccggagagaagcaatgaagtggagatggacagcactgttatcactgtcagcaacagctccgacaagagcgtcctacaacagccttcggtcaacacgtccatcgggcagccattgccaagtacccagctctacttacgccagacagaaaccctcaccagcaacctgaggatgcctctgaccttgaccagcaacacgcaggtcattggcacagctggcaacacctacctgccagccctcttcactacccagcccgcgggcagtggccccaagcctttcctcttcagcctgccacagcccctggcaggccagcagacccagtttgtgacagtgtcccagcccggtctgtcgacctttactgcacagctgccagcgccacagcccctggcctcatccgcaggccacagcacagccagtgggcaaggcgaaaaaaagccttatgagtgcactctctgcaacaagactttcaccgccaaacagaactacgtcaagcacatgttcgtacacacaggtgagaagccccaccaatgcagcatctgttggcgctccttctccttaaaggattaccttatcaagcacatggtgacacacacaggagtgagggcataccagtgtagtatctgcaacaagcgcttcacccagaagagctccctcaacgtgcacatgcgcctccaccggggagagaagtcctacgagtgctacatctgcaaaaagaagttctctcacaagaccctcctggagcgacacgtggccctgcacagtgccagcaatgggaccccccctgcaggcacacccccaggtgcccgcgctggccccccaggcgtggtggcctgcacggaggggaccacttacgtctgctccgtctgcccagcaaagtttgaccaaatcgagcagttcaacgaccacatgaggatgcatgtgtctgacggataagtagtatctttctctctttcttatgaacaaaacaaaacaacaacaaaaaacaaacaaacaaaaaagctatggcactagaatttaagaaatgttttggtttcatttttactttctgtttttgtttttgtttcgtttcattttgtactacatgaagaactgttttttgcctgctggtacattacatttccggaggcttgggtgaataatagttttcccagtctccctcggatggtggccttaaggcctggtagtgcttcaagaggtccactggttggatctctagctactggcctctaaatacaacccttctttacaaaaaaatcttttaaaaaaaagtaaaaaaaaaaaaaaaatttccacttgtgaagagcactacaaaaaatatataacaaaatctaaaaggcctactgtctttaagtacaccgcttgcagtgtttcagtggacattttcacaattctggccgcttggacttcacagtaaccagttaaaactgtggaatatcacttctggttgaaaacccagaggaaaggccctgctgttttccacctaccacgttgtctgatttcataaaagggctgtgggggtgggaagggcagtgggttcggtggtgtgggaaagaaagacgaatggcaggcttcttccccagattctgcccgggtccacacaccctggcccaccttctccatatccccctcttgcagcagaagccaggaagacttggacaagcaacaagcaacagtggctatcgtatttattcagtgtcttcgctgagccacagcctcagcacaatcaagagggactttcatgaaaggcaggaatgcagataaaacaaagatatcagaaatttgcacctatgtttctaggtacaagagaaggattatttccaacaatctttgcaaaaaaaaaaaaa

SEQ ID NO: 123 - DNA, 6405 bp, HOMO SAPIENS
ggtatttccgaagctggccaggccctctgctgctgaccctggaaatcgggtcacactagacaaggctgcatgtgcggggagaaggcgggggggctcctttgcacgcggctgctcgcgtttccccaaggcctccaaatagtctaaaaactcacctcggaggaggagaaagagcgtgaagtggctctttcgatctgagacaccccctcccggagaactcgccccctcccccccagcccagagcggagtgaaatcttagaagccgtggctgctgggtttgaacggaatgctggagtcagtggaagacggagctggtcggcccgaagactagacgcttgaagcaaagctgccatcccagaagacgacatgctctcagcaacccccctgtatgggaacgttcacagctggatgaacagcgagagggtccgcatgtgtggggcgagcgaagacaggaaaatccttgtaaatgatggtgacgcttcaaaagccagactggaactgagggaagagaatcccttgaaccacaacgtggtggatgcgagcacggcccataggatcgatggcctggcagcactgagcatggaccgcactggcctgatccgggaagggctgcgggtcccgggaaacatcgtctattctagcttgtgtggactgggctcagagaaaggtcgggaggctgccacaagcactctaggtggccttgggttttcttcggaaagaaatccagagatgcagttcaaaccgaatacacccgagacagtggaggcttctgccgtctctggaaaacccccaaatggcttcagtgctatatacaaaacaccgcctggaatacaaaaaagtgctgtagccacagcagaagcgctgggcttggacaggcctgccagcgacaaacagagccctctcaacatcaatggtgctagttatctgcggctgccctgggtcaatccttacatggagggtgccacgccagccatctaccctttcctcgactcgccaaataagtattcactgaacatgtacaaggccttgctacctcagcagtcctacagcttggcccagccgctgtattctccagtctgcaccaatggggagcgctttctctacctgccgccacctcactacgtcggtccccacatcccatcgtccttggcatcacccatgaggctctcgacaccttcggcctccccagccatcccgcctctcgtccattgcgcagacaaaagcctcccgtggaagatgggcgtcagccctgggaatcctgttgattcccacgcctatcctcacatccagaacagtaagcagcccagggttccctctgccaaggcggtcaccagtggcctgccgggggacacagctctcctgttgcccccctcgcctcggccgtcaccccgagtccaccttcccacccagcctgctgcagacacctactcggagttccacaagcactatgccaggatctccacctctccttcagttgccctgtcaaagccatacatgacagttagcagcgagttccccgcggccaggctctccaatggcaagtatcccaaggctccggaagggggcgaaggtgcccagccagtgcccgggcatgcccggaagacagcggttcaagacagaaaagatggcagctcacctcctctgttggagaagcagaccgttaccaaagacgtcacagataagccactagacttgtcttctaaagtggtggatgtagatgcttccaaagctgaccacatgaaaaagatggctcccacggtcctggttcacagcagggctggaagtggcttagtgctctccggaagtgagattccgaaagaaacactatctcctccaggaaatggttgtgctatctatagatctgaaatcatcagcactgctccctcatcctgggtggtgcccgggccaagtcctaacgaagagaacaatggcaaaagcatgtcgctgaaaaacaaggcattggactgggcgataccacagcagcggagttcatcatgcccgcgcatgggcggcaccgatgctgtcatcactaacgtttcagggtcagtgtcgagtgcaggccgcccagcctccgcatcacccgcccccaatgccaatgcagatggcaccaaaaccagcaggagctctgtagaaaccacaccatccgttattcagcacgtgggccagcccccggccactcctgccaagcacagtagcagcaccagcagcaagggcgccaaagccagcaacccagaaccgagtttcaaagcaaacgagaacggccttccaccaagctctatatttctgtctccaaatgaggcattcaggtccccaccaattccctaccccaggagttacctcccttacccagcccctgagggcattgctgtaagtcccctctccttacatggcaaaggacctgtctaccctcacccagttttgttacccaatggcagtctgtttcctgggcaccttgccccaaagcctgggctgccctatgggcttcccaccggccgtccagagtttgtgacctaccaagatgccctggggttgggcatggtgcatcccatgttgataccacacacgcccatagagattactaaagaggagaaaccagagaggagatcccggtcccatgagagagcccgttacgaggacccaaccctccggaatcggttttccgagattttggaaactagcagcaccaagttacatccagatgtccccaccgacaagaacctaaagccgaaccccaactggaatcaagggaagactgttgtcaaaagcgacaagcttgtctacgtagaccttctccgagaagaaccagatgctaaaactgacacaaacgtgtccaaacccagctttgcagcagagagtgttggccagagcgctgagccccccaagccctcagttgagccggccctgcagcagcaccgtgatttcatcgccctgagagaggagttggggcgcatcagtgacttccacgaaacttatactttcaaacagccagtcttcaccgtaagcaaggacagtgttctggcaggtaccaacaaagagaacctagggttgccagtctcgactccattcctggagccacctctggggagcgatggccctgctgtaacttttggtaaaacccaagaggatcccaaaccattttgtgtgggcagtgccccaccaagtgtggatgtgacccccacctataccaaagatggagctgatgaggctgaatcaaatgatggcaaagttctgaaaccgaagccatctaagctggcaaagagaatcgccaactcagcgggttacgtgggtgaccgattcaaatgtgtcactaccgaactgtatgcagattccagtcagctcagccgggagcaacgggcattgcagatggaaggattacaagaggacagtattttatgtctacccgctgcttactgtgagcgtgcaatgatgcgcttctcagagttggagatgaaagaaagagaaggtggccacccagcaaccaaagactccgagatgtgcaaattcagcccagccgactgggaaaggttgaaaggaaatcaggacaaaaagccaaagtcggtcaccctggaggaggccattgcagaacagaacgaaagtgagagatgcgagtatagtgttggaaacaagcaccgtgatccctttgaagccccagaggacaaagatcttcctgtggagaagtactttgtggagaggcagcctgtgagcgagcctcccgcagaccaggtggcctcggacatgcctcacagccccaccctccgggtggacaggaaacgcaaagtctcaggtgacagcagccacactgagaccactgcggaggaggtgccagaggaccctctgctgaaagccaaacgccgacgagtctctaaagggctccatcctaaaaaacaacgccacttgctgcaccttagagaacgatgggagcagcaggtgtcggcagcagatggcaaacctggccggcaaagcaggaaggaagtgacccaggccactcagcctgaggccattcctcaggggactaacatcactgaagagaaacctggcaggaaaagggcagaggccaaaggcaacagaagctggtcggaagagtctcttaaacccagtgacaatgaacaaggcttgcctgtgttctccggctctccgcccatgaagagtctttcatccaccagtgcaggcggcaaaaagcaggctcagccaagctgcgcaccagcctccaggccgcctgccaaacagcagaaaattaaagaaaaccagaagacagatgtgctgtgtgcagacgaagaagaggattgccaggctgcctccctgctgcagaaatacaccgacaacagcgagaagccatccgggaagagactgtgcaaaaccaaacacttgatccctcaggagtccaggcggggattgccactgacaggggaatactacgtggagaatgccgatggcaaggtgactgtccggagattcagaaagcggccggagcccagttcggactatgatctgtcaccagccaagcaggagccaaagcccttcgaccgcttgcagcaactgctaccagcctcccagtccacacagctgccatgctcaagttcccctcaggagaccacccagtctcgccctatgccgccggaagcacggagacttattgtcaataagaacgctggcgagacccttctgcagcgggcagccaggcttggctatgaggaagtggtcctgtactgcttagagaacaagatttgtgatgtaaatcatcgggacaacgcaggttactgcgccctgcatgaagcttgtgctaggggctggctcaacattgtgcgacacctccttgaatatggcgctgatgtcaactgtagtgcccaggatggaaccaggcctctgcacgatgctgttgagaacgatcacttggaaattgtccgactacttctctcttatggtgctgaccccaccttggctacgtactcaggtagaaccatcatgaaaatgacccacagtgaacttatggaaaagttcttaacagattatttaaatgacctccagggtcgcaatgatgatgacgccagtggcacttgggacttctatggcagctctgtttgtgaaccagatgatgaaagtggctatgatgttttagccaaccccccaggaccagaagaccaggatgatgatgacgatgcctatagcgatgtgtttgaatttgaattttcagagacccccctcttaccgtgttataacatccaagtatctgtggctcaggggccacgaaactggctactgctttcggatgtccttaagaaattgaaaatgtcctcccgcatatttcgctgcaattttccaaacgtggaaattgtcaccattgcagaggcagaattttatcggcaggtttctgcaagtctcttgttctcttgctccaaagacctggaagccttcaaccctgaaagtaaggagctgttagatctggtggaattcacgaacgaaattcagactctgctgggctcctctgtagagtggctccaccccagtgatctggcctcagacaactactggtgagcaagctggacccaccatgtacagtgtgttatagtgttaatccttgtgcatatgtgtcataatacaactatttctgtaaagaaaggacactattacatatgaaaatatctcttctttatataagagaaattactccagtcagaaggacttagaaacatgtttttttccttttaaacttttaagtcagtttttatgaagttgttataatgtttctttacttttcaatgcacacatgctttgggatacgtttgtttttacttggaacatttgtttcttttcttttttaaggagaaaaaaaaatgagtaaaaggagctccacactttgacttaatttcatacaaagctctgatgacaggccatgactgtagagtggtcagaactgtgtggttggtttgagggagcgaattcggggaaggcacttggtgatataactttgttttgtttacagagtacctgctcgggccaggtaaatgctattggatgtaatccagtagtgtgtaatataaattcaaaccatatccacacacaacaactaattgtatgaaacttttatatcctaatttaaaagctgtgaaattagttttcacgcatcaaaccggattgtttatatgtttaaacattttatgctcttatttaaagaagactttgagctatttttttctgtaccctgtaaaatattgaaaactaacataatatgttgaggttgcttggaaatgtacataaaactaaaattttctgaatcgtgtgtttatgtttgaaatctgtgttttaactttgtaagtaaattctctgcctttgtatttatattttacaaaaattttcttaaaaggcaataaaactgttgaggaaaggagaaaattgaaaaaaaaaaaaaaa

SEQ ID NO: 124 - DNA, 4465 bp, HOMO SAPIENS
ctttcccttttttcgctcgtgtcccgccgggtggcgctcaccacctccccggaacacgcgagtctcctgtcgcggttccggtcggaattaccccgtggagcacgccgatatggctgcgctgacactgaggggtgtccgggagctgctgaagcgtgtggacctcgcgacggtcccgcggagacatcgatataagaagaaatgggctgccacagagcccaaattccctgctgttcgactggctttgcagaattttgacatgacttacagtgtgcagtttggagatctttggccatcaatccgtgtcagtctcctctcagagcagaagtatggtgcactggtcaataactttgctgcctgggatcatgtaagtgctaagctggagcagctgagtgccaaggattttgtgaatgaagccatctcccactgggaactgcagtctgagggtggccaatctgcagccccatcccctgcctcctgggcctgcagtccgaaccttcgatgcttcacttttgacagaggggatatcagtcgcttccctcctgccagacctggcagcctgggtgtcatggagtactacctgatggatgctgcctccttgctgcctgttctggccctcggcctgcagcctggggacatcgtgcttgacctatgtgcagctcctgggggaaagacactagcgttgcttcagactggctgttgccgcaatcttgctgccaatgatctctccccgtcccgaatagccagactacagaagatccttcacagctatgtgcctgaagagatcagggatggaaatcaagttcgagttacctcatgggatggcaggaaatggggagaactggagggggacacctatgaccgggtgctggtggatgtgccctgtaccacagaccgccactcccttcatgaggaggagaacaacatctttaagcggtcaaggaagaaggagcgacagatattgcctgtgctgcaagtgcagcttcttgcggctggactccttgccaccaaaccaggaggccatgttgtctattctacctgctcactctcacacttacagaacgagtatgtggtgcaaggtgccattgagctcctggccaatcaatacagcatccaggtacaggtggaagatctgactcacttccgaagggttttcatggacacattttgtttcttctcatcctgtcaggttggggagctggtaataccaaacctcatggccaattttggccccatgtacttctgcaaaatgcgtaggctgacatagtatcacccaatccctgaagcaagaatacaaagggtatactctgttggatgcaccagaaactggaaactgggaccagtggcagagatgcactctcggtcctgtctccatcctgttcgtgtctttctgcagttttcggcaataagaagtagaagatttgctgtcctgctgtccaattgtggagcatcagcaggtttccaactcactcattaacccctaccccatctccaggcctgtactaaagtttgctgcccgcttaggggcttagaaggagaagccagtgagcaggctcacactaagttgtaaacataggagaagcatttggccaataaagttgttgaaactctatagacctggggctgcagttggggacttcatgtcagtgcaaatgccattagttccatttgtaccagccagttactgagcccctgtcacccttgaagtgagttccacctgaccagtcttgagcagccaacaggctcaattaagcccgcctggtttttccatatggctcatgatctaatttaaggaacaagtaactaaaaatgttaagccagtgcaaaataatctgcttacctactcacattggaaaaaccctctgagctgaataattctggccattcctgctgtcaacaatactgctgcccaaatgtggcttaggaggctgcttctgccacaaaaccgtcatactcttgtgcgtgccttgttctttgttcattcatctagcaggtattcccagacctcgtgtatgacaggtagctagggagctcttggagatgtagcagttgggattgtgggagattactgggcttcctcatcctttagaatggtaactctccttttgctttctgaacacctaggaatttcctgatgttttgttttgttggattccagactttttgttgtttctagtctgcagctgagctctggtgcctgttctttggcccaccccctaatccctaactcttccctcagcatcacagggcttcactgcacacactgtgttcagggcaagatttcatcatttactgactgcatactcgatatgttgtttttgtaactttagccaaaagaaagtaacctttagtggcagggatataaaaaattgctcagggtcacttgcagatattttatttttaaactttttttttttttcctggaaaacatcctgtgcagaaaagggtatataattttagaatacctgaaggcttcttggcttttccactttccttattcctcctcttcctgccactctttttgtcccttctgtctttcctgctcatccttatttgggtattagaggtgtcagttgaggagggactttagctgaggttaagccttcttttgggatttgcattgtaattgagggccctggaagatctctgagactcaaaatcaggtgaagctaggaagatggagctttaaggagcatggctagtgctctgagtaggaccgtaaccgcctccgtgcgtggcatatggtccctgcatgctgttcactctgtatagtacttagtattcgctgaggctaagaggcctcaggtgcctgggcttctgcccttggactcctggatatccagcctagtgctaattgaatgctaagcagtggtaattcaaaatgagagggtcccctgcctctagagtcatcatctaattggggacaggcagacctagataagaaaagcagagaactactttggaaaacagtttatctgctgtaattgaacattcagctaccctataacccagttaatccaatactggggataaatcctagagaaactcatacatgtacaccaggagatgtgtacaagaatattcatagcaaccctattcacaaaagcaaaagcctagaaataacccagatgcccatgagcaagagagtggacaagtaaactggaatattcacataatagaacattatacaattgtcaaatgaactataatgatacctaaccatatggatgaatctgagcaataaaataattaagtgaaaaaagtttaatcccagaagagtaaatgtagcatgatgccctttctaaatgaaaggttttttcttttctatggagttattctttacatacaatatagttcataaattttaaatatattgtttaataaattttgataattgtatataatagtatagtcaccatcaagatgtagaaaatagaaaataggctaggcacagtggctcacgcctgtaatctcaacactttgggaggccaaggtgggaagatcacttgatcccaggaattctagatcagcttggacaatgtagtgagacctggtctttaccaaaaaaaaaaaaaaaaaaattagctgggtgcgctggcatgtgcctgtggtcccagctactcaggaggctgaggcaggaggatcacttgagcacaggagtttgaggctgcagtgagcagcctgggcaagagagtgagactccgttttgtgccactgcactccagccagggtgacagagtgagactctgtctcaaaaaaaaaaaaaaaaaaaaaggcattgggatttataatgtgctgtttaaagtctgaagctcggccaggtgcggtggctcacgcctgtaatcccaaaactttggaaggctgaggcaggtggatcacctgaggtcaggaggagttcaagaccagcctggccaacgtggtgaaaccccatctctataaaagtacaaaagggcatgatggcaggtgcctgtaatctcagctactcagtaggctggagcgggagaactgcttgaacctgggaggtggaggtttcagtgagccaagatagcgccattgcactccagcgtgggcgacagcaagagacttcatttcgataaataagtaaataaataaataaagtctgaagctccactggtcactccttttattgattatttgcagctggtctaaccagttacgtatgtctggcttgattacatggccagagcaacataaaagccctgctgggaacttctgatttgagctcttccaaaaccaggatggatgcctcacatagatcatgatgattcaatccaaaggcactttgcagtgcagtccacatgtgcataaggaccatggggagcttgtatttgggaattctgagattcctgatgtttacctacctagtctttctcttgctgccctgtatcctttgcctttaaataaaaatcttaagtgataaaaaaaaaaaaaaaaaaaaaaaaaaaaa

SEQ ID NO: 125 - DNA, 310 bp, HOMO SAPIENS
tacagaaactacactcctgcatgcacccagaatcaaagttaaggttttctgaccaactaacaccatacatacatcatcaggaaaaagtcttcccttatgaaagtcaatccaaaaagttagaagtgacttttgcaccaaatgtgcagatatcaacgtaaagacacatgaaatgtgaaaaaacaaggaaatatgacacctctaagggagtacaataattctccagcaacagatactaatggaaaagaaatttatgaaatgccagaaaaatataaaagtaacgatagtaaagaagctcactggccaggcacgg

SEQ ID NO: 126 - DNA, 4983 bp, HOMO SAPIENS
gattgggccgctgtcaggtgtcgctgcctgcaggttcggctgcgcgagcggagggaggcgggactcaagagtagccttcctcgaggacctgcctttcccatttgctgcctgaagttaatgtttcttgctggccaaatcagggacatgccggcattagcgggatgagtgggtgttccggcagggatgtggtcattgacggccagtgagggcgagagtaccacggcccacttcttccttggagctggagatgaggggctgggcacccgtggaataggcatgaggccagaagagagtgacagcgagctccttgaggatgaggaggatgaagtgcctcctgaacctcagatcattgttggcatctgtgccatgaccaagaaatccaagtccaagccaatgactcaaatcctagagcgactctgcagatttgactacctgactgttgtcattctgggagaagatgtaatccttaatgaacctgtggaaaactggccatcctgccactgcctcatctctttccactccaaaggctttcctctggacaaagctgttgcttactccaagcttcgaaacccctttcttatcaatgatctggccatgcagtattacatccaagataggagggaggtgtaccggatcctgcaggaagagggtattgatctgcctcgatatgctgtgctcaaccgtgatcctgcccggcctgaggaatgcaacctgatagaaggtgaagaccaagtagaggtcaatggagctgtctttcccaagccctttgtggagaagccagtgagtgcagaagaccacaatgtttacatctactaccccagctcagctggaggaggaagccagcgtctctttcgtaagattggcagccgaagcagtgtttactctcctgagagcagcgtccgaaagacggggtcgtacatctatgaggagtttatgccaacagatggcacagatgtcaaggtgtatacagtggggccagattatgcccatgctgaagctagaaaatctccagctttggatgggaaggttgaacgagacagtgaggggaaagagattcgatatccagtcatgctgactgccatggaaaagctggtggccaggaaagtctgcgtagctttcaagcaaacagtttgtggatttgaccttcttcgtgccaatggtcattcctttgtgtgtgatgtcaatggctttagttttgtcaagaactcgatgaaatactacgatgactgtgccaagattctggggaacaccataatgcgggagcttgccccacagttccagattccatggtccatccccacggaggctgaggacattcccattgttcccaccacatctggcactatgatggaacttcgttgtgtcattgcaattattcgtcatggggatcgtactcccaagcagaagatgaagatggaagtgaaacacccaaggttttttgctctgtttgaaaaacatggtggctacaagacagggaaattaaaactcaagcgacctgagcagctccaggaggtgctggatatcacaaggctgttgttggctgaactggagaaagaaccaggtggtgagatcgaggagaagactggaaaactagagcagctgaagtctgtactggagatgtatggtcacttctcaggtataaaccggaaggtacaattgacttactaccctcatggagtaaaagcttctaatgaggggcaagatccacagagggaaactctggccccatctctgttgctggtactgaagtggggtggagaactgactcctgctggccgtgttcaggctgaggagctggggcgagcttttcgctgcatgtaccctggaggacagggtgactatgctggcttccctggttgtgggctgcttcgtctccatagcactttccgccacgatctcaagatctatgcctctgatgagggtcgtgttcagatgactgctgctgccttcgccaagggccttctggctctagaaggggagctgacacccattttggtgcaaatggtgaagagtgccaacatgaatgggctactggacagcgatggggattccttgagcagctgccagcaccgggtgaaggctcggctgcaccatattctacagcaggatgcgccctttggccctgaggactacgatcagctggctcccaccagaagtacttccctgctcaactccatgactatcatccagaatcctgtgaaggtctgtgatcaggtatttgccctgatcgaaaacctcacccaccagatccgggaacgaatgcaggaccccaggtctgtagacctgcagctctaccacagtgagacactagagctaatgctacagcgttggagcaagctggagcgtgactttcgacagaagagtgggcgctatgatatcagtaagatccctgacatctatgactgtgtcaagtatgatgtgcagcacaatgggagtctgggacttcaaggcacagcagagttgctccgtctctctaaggcactggctgatgtggtcattccccaggagtacgggatcagtcgggaggagaaactggaaattgctgtgggcttctgtcttccactgttgcggaagatactacttgacctgcagagaacccacgaggatgagtactcccgaggcgtgctctccccaggtcgccacgttcgaacgcgtctctatttcaccagtgagagccatgtccactccctgctcagtgtcttccgttatggaggacttcttgatgagacccaggatgcagaccgggcattgcagacttcaccccagcctcctgagggccctggccttccgaggagatcacccctcattcgtaaccgaaaagctggttccatggaggtactttctgagacttcatcctcgaggcctggtggctaccggctcttttcatcttcacggccacccacagaaatgaagcagagtggcctaggctcacagtgcacagggctgttcagcaccacagtgctgggtggctcctccagtgccccgaatcttcaggactacgcccgcagccatggcaaaaagctaccacctgccagtctgaagcaccgagatgagctcttgtttgtcccggccgtaaaacgattttctgtgtcgtttgcaaagcatccgactaacgggtttgaagggtgttccatggtgcctaccatctaccctctggaaacactgcataatgccctttccctacgtcaagtgccacctatggaaaccagccagccatacgaggaggtcagccagccatgtcaggaggtccctgacatcagccagccatgccaggacatttctgaggcgctcagccagccatgtcagaaggtccctgacatcagccagcaatgccaggagaaccatgacaatggtaaccacacatgccaggaggtccctcacatcagccagccatgccagaagtccagccaactgtgccagaaagtctctgaggaagtttgccagctatgtctggagaactccgaggaggtcagccagccatgccagggggtctctgtggaggttggcaagctggtccataagttccatgtaggggttggtagcttggtccaggaaacccttgtagaagttggcagcccagctgaagagatccctgaggaggtcatccagccataccaggagttctctgtggaggttggcaggctggcccaggagacttctgcgatcaatctgttatctcagggcatccctgagattgataaaccatcccaagagttccctgaggagattgatctgcaggcccaggaggtccctgaggagataaattagaagtcctgggtggtccctgaagtgattgatcagctgcctggagagggtattcctcaagcccagcatccatctggtgatccaaaccctcagagccagtctctagcccatgaccagcactcaccccttccaccagcaacatgtgattaattttctcattagtggtatcacactataccagccatttgagccagcaaccttttctgttggctaactcactggccagctctcaccagcggtgtctggggaagtagttctctttgtatgaagcatacctgtgccagagctgtggttgaggaggagccagttttaggttcgaagaagccattggctcctcacttagccattagacttgaataggatttccttggggtgggttggtctgtcattacccagccttctctgagcatcctaggaaatcacagattgttaaaggaaatgccgcttcactgctgaagacaccatctggcgacagcaaatgcaaaagaggggactctagggtcttcacttttctggggaaatgttcacgacttctcaaggtacgcttagaccatatgtgcattcaggggactcttgtctttgccagcactcctcaggtgagcccgggatggctatctgaaatgtctggaaaatagagtcccttccccaaacatctgacatggccactaaatctttagacttgccttatagatccttccatatcatccccaagtgccccttctgcctcagtcctgttcctctgggcaatagctctagggaaaagtaggtattagactgctgtgcaaaattcagagcaactacttaaaatgctctagaggattcttagccagtctgtgaaagtgggcctcctctgtggtggggctgtttggcttaggagatgctgtagtagtagagataatcaggttctattttaagcaatcagcagagatcaatattgtacagatacaagcaaaggtttaataaatatatatatatatatttatttctgtagttgtgccagggacagactggccaaagaccaaacactgcagggtccccaagaaatttgtccttatatcattgtgtctgagggccagatatgattatgaagctttttccaaagatccagggatgggaatgggagtgggtaggaggggtaatgcggtcattggagtcgggggctggaacattatgagtgctcaataaatataaactaatgagaatggtggtgatggaaaa

SEQ ID NO: 127 - DNA, 5952 bp, HOMO SAPIENS
cgctcgcagtttcgccctctcttccgctaatgattgcattattatgctcccctctctggggggtctcgcccctcttgggtcgctccggagccccggcctcccctggctgcatttcttaaaaatttgggagcctgggagtgagttttctccgaggcgtgtgtgagaggcggcgggggtgttttcctgcgcgaggggcgggtgaagttcattgcccccacttttcccgcgacctttttcggacccgattttggatcgagttgaggggggcgcgggcgttttcggggggcggggggcgcggcggagaatggccgcggggagggctccccggagcctcccagtctcttgatcaaagcattccgctattctgatttattgcttgcttggtgagttatttttttttcctctaaaggagacctgtgtgttcagccattactttgctcggcgctgctcccaggcatctccgaccctcggtgctgtggggagccccacacttgggctcctcgcctctcgccctcgctccccgtccctcctcccctctctccgccccttcccccttttctttctcctctctttcttcccctctctcccttctttcggccgccgtctcccccgcgccctcctcggggcggagggaagccgtgaagggggagggagggctcggtgtcaatttttttttgtgtggctgcggccgtagcctgtggcgggcaagcggggagaccccggcgcagcagaaccatggatggcccgacgcggggccatggactccgcaaaaagcggcggtcgcggtcgcagcgagaccgggagaggcgctcccggggcgggctgggggccggcgcggccggcggcggcggggctggccggacccgggcgctctcactcgcctcgtcgtcgggctccgacaaggaagacaatgggaagcccccgtcctccgccccgtcccggcccagacccccgcggaggaagcggagagagtccacctcggcagaagaggacatcattgatggatttgccatgaccagctttgtcacttttgaagcgctggagaaagatgtagcacttaagcctcaggaacgtgtggagaaacgccagacgcccctgaccaagaagaaacgagaagcacttaccaatggcttgtcctttcattcaaagaagagcagactcagccacccacaccactacagctcagatcgagaaaatgaccgcaatctctgccagcaccttgggaagagaaagaaaatgccgaaggcactcagacagctcaagccaggacagaacagctgcagggacagtgacagtgaaagtgccagtggagaatccaagggcttccaccggagcagctctcgggaaaggctcagtgatagttcagctccttccagcttgggaacaggctacttctgtgacagtgacagtgaccaggaagagaaggcatcagatgccagctctgaaaaactcttcaacactgttattgtaaacaaagatccggagttaggtgttggcacgctaccagaacatgacagccaggatgcagggccgattgtccccaagatatcgggtctagagagaagccaggagaagagccaggactgttgcaaagagccaatctttgagcctgtggtgcttaaagacccctgccctcaggtcgcacagccaataccccagccgcagacggagccccaactccgagctccttctccggaccctgacttggtgcagcgcacagaggccccacctcaacccccacctctgagtacacagccaccacagggccctcctgaggcccagctccagcctgccccgcagcctcaggtgcagaggccacccaggccacagtcccccacccagctgctccatcagaacctcccacctgtgcaggcccacccctctgctcagagcctctcccagccattgtcagcctacaacagcagtagcttaagcctcaacagtttaagcagcagcagaagcagcactccagcgaagactcagcccgccccacctcacatctcccaccacccctctgcctccccgttccccctctccctgcccaaccacagccccctgcacagcttcacacccaccctccagccccccgcacactcacatcaccccaatatgtttgcccctcccactgctctgcctcctccaccaccactgacatcaggaagtctgcaggtggccggacacccggccgggagcacttactcagagcaagacatcttgcgacaggaactgaacactcgttttttggcctctcagagtgctgaccgcggggcttccctgggccctccgccctacctgcggaccgagttccatcagcaccagcaccagcaccagcacacccaccagcacacgcaccagcacaccttcacgccgttcccccacgccatcccacccaccgccatcatgccgacgccagcacctcccatgtttgacaaataccctacaaaagttgacccattctaccggcacagtctcttccattcctatcctcctgcagtgtcgggcatcccccctatgatcccacccactggcccttttggttcactacaaggagcatttcagccgaagttgacagatcctttcagacctatgttaaggaaaccagggaagtggtgtgctatgcatgttcacatcgcctggcagatttaccaccaccaacagaaagtcaagaaacagatgcagtcagacccacataagctggactttggactgaaacctgagttcctgagccgccctccaggccccagtctttttggagccatccaccacccccatgacctggcacggccttcaactttgttctctgccgctggtgctgcacacccaactgggaccccttttgggccacctcctcatcacagcaacttcctcaaccctgctgcccacctagagccttttaatcggccgtctacattcacaggcctagcagcagttggtggcaatgccttcgggggacttggaaatccttccgttacacccaactcaatgttcggccacaaggatggccccagtgtgcagaactttagcaaccctcacgaaccctggaaccggctgcaccgaacgcctccgtcgttcccgacccctccgccctggctgaagccaggggagctggagcgcagcgcgtccgctgcagctcatgacagagatagagatgtagataaacgagactcatctgttagtaaagatgacaaagaaagggaaagcgtcgagaagagacactccagccacccttcaccagcacctgtcctcccggtgaatgccctgggacatacccgcagctccactgaacagatccgggctcatctgaacactgaggctcgggagaaggacaaacccaaagagagggagagagaccactcggaatcccgcaaggacctggccgccgacgagcacaaggcgaaagagggccacctgcccgagaaggacgggcacggccacgaggggcgcgccgcgggcgaagaggccaagcagctggcccgggtgccgtctccctacgtgcggaccccggtggtggagagtgccaggcccaacagcacctcgagccgggaggccgagccgcgcaagggtgagccggcctacgagaaccccaagaagagctccgaggtcaaggtgaaggaggagcggaaggaagaccatgacctgcctccagaggccccgcagacccaccgggcctcggagccgccgcctcccaactcctcgtccagcgtgcacccggggcccctggcctcgatgcccatgacggtgggggtgacgggcattcaccccatgaacagcatcagcagcctggacaggactcgcatgatgacccccttcatgggcatcagccccctcccgggcggagagcgcttcccgtacccttctttccactgggaccccatccgggaccccttgagggatccttaccgagaacttgacattcaccggagagacccgctgggcagggacttcctgctaaggaacgacccgctccaccggctctcgactccccggctgtacgaagccgaccgctccttcagggaccgggagcctcacgactacagccaccaccaccaccaccaccaccacccgctgtctgtggaccctcggcgggagcacgagcggggaggccacctggacgagcgggagcgcttgcacatgctcagagaagactacgagcacacgcggctccactccgtgcaccccgcctccctcgacggacacctcccccaccccagcctcatcaccccgggactccccagcatgcactatccccgcatcagccccaccgcgggcaaccagaacggactcctcaacaagacccctccgacagcagcgctgagcgcacctcccccgctcatctccacgctggggggccgcccggtctctcccagaaggacgactcctctgtccgcagagataagggagaggcccccttcccacacgctgaaggatatcgaggcccgataagccgagaacaggagcaagaacgaggaagaagaaaccctaggcagacaccaggccaggcttgagagacagaactcctgcatggctcacacagactgggggggaaagccccaccccttccccttgtaaaaaatgtatagactcagtgcacattttgaaatgttttgtatattatatgttgagatttttcagatcttttagcccagtcatatgttctcacgtctcctactttttgtttctcgtataaaactttttgatttgaaccaaaacagtgaagatgacaacacacaccaattggatgataattgtagcgggggcggtgggggggagaagtccacgccatccatcatgcaaaattctttcagatgaggtgggaaggccgtgtacatagttatgtaaaaagagattgcttcatgagctaatggttcatatatgcaaaagggtaagatgaaagctttactttgtacaaatgtaaatagataaagtaacataatacattaatacttcttaaaatgtgctatttgcaaacttacttaatatcagtgaacacagtcggctaaagctgtgttcccatatattgttatagacagctaaacccttcaactatgcaatgaatgttcgggcttttcacaaaagcccgcctaactcaaaggagccttttcaaatccatttacagcatacttaaggtcatattttccctgaacaagcgcttacgtgatatgactctgttttccttgcttgttttttttcaaacggagaaacatcctgttttgcaaattggaccccaggctggaacttagcatctgaagttgccgcttgtgggctctgggggaaagtgtagccccggagaggtaactgaggacatgagcaaccagtgccagggagggtgggatttgccagatgccaaaatcaggggacgggtggtggtgtctgtcagacacacacaggtcgccagtgacttcacacacacctcatgtgagaaccatgccttttttagtgtgtcctatttcatacctgtacacacttcctcgttttgtaatgagatttacttacacccaaacagatcctgaaagaaagcttcaagttttctcagatgatggatatgttttcactgtattcaataactgacggatgtaaggtgcacgtttcctgatgtgacgcactgtattccagctggtgatcaagtctgggaacagccgtaacaggtcaaccttgtggagccatcgcgagttagagggtgaaagatggcagaaaaaaaagtcttgtgtgtgagtgtgttttttgagtttgcatcaatcttaatgtctcttcataatacttttataatacattaagcctcttgtctacatatttggagagaatatgactttactagcagagaaatacaatatatcttgtctactggactgtaaaatatatgtatgaaataaaattagttccatttggtcttctagtatattaaagtgctatctgacgttgttatcctgtttttgcaaaaaaaaaaaaaaaaaa

SEQ ID NO: 128 - DNA, 369 bp, HOMO SAPIENS
  misc_feature (138)..(138): n is a, c, g, or t
aagaaaccaactggcttcttcctgttcgcccacctttcctttgtttattgatatttccaccagaggaaggaccaggcaaaagggagaataaattcactttttaagataatgcttctgagttttagcacagcatcccanttcccgggaagctttattgccaaggcaataaggagaccatgtgagtaggagttaaatgcacagccatttgtgaagtgagactgcttgggttcagatcttgattctgccctttattctatgttgtggaatatattacattgtgctgtgcctcttttaccttatttgtaaaatagagcaagcacccaactcaagcagttgttgcaagaactgcctgctatgctgtttaataca

SEQ ID NO: 129 - DNA, 491 bp, HOMO SAPIENS
  misc_feature (26)..(29): n is a, c, g, or t
  misc_feature (37)..(37): n is a, c, g, or t
  misc_feature (43)..(43): n is a, c, g, or t
  misc_feature (51)..(51): n is a, c, g, or t
  misc_feature (62)..(62): n is a, c, g, or t
  misc_feature (65)..(65): n is a, c, g, or t
  misc_feature (89)..(89): n is a, c, g, or t
  misc_feature (96)..(96): n is a, c, g, or t
  misc_feature (98)..(98): n is a, c, g, or t
  misc_feature (197)..(197): n is a, c, g, or t
  misc_feature (465)..(465): n is a, c, g, or t
atatcaggttcattggacaggtgctnnnnagatccanttttcnttaattgncacctacatcnagngtaatataaatgtcttcattcacnaatcccncnaagggttgtagatatcaatatgccgggggatagtgtatgggaattgagggtcatagtaggtcaatactatataagaaaattcctacagagagtgagtcnaaatccctactcctatgggaccagcgactattattgtctatttatttacttatttgaaaatgtaaacaattatttcccagtggactaattacaaagttcctgtgacatcaagatcattccttctcaaggcttttcactatatattgagacgtgtagtcttaatttcattttggtttgccccaagacttccaccaagtctaggggatctgtacggaactatcctttcccaaggtacatcatgcatactttctgctattatttttttttncagtctgtcccttgtggtcaatcaag

SEQ ID NO: 130 - DNA, 11784 bp, HOMO SAPIENS
aggagtggaaggttgaggggggcgctaggcgcccttcgctccctccctctggaggagctgccgccgccaccgccgccactctgctgctgccgccgccgccgccgccgctcccgccgccattttgggttcgctttgcggaggggagacgatcccagtctcggttgcgggacccgcctcccctcagtttgccccctttagccttccacctttcccttctcctctctcgcatttccgccagtcagcttacccgctggccgcctcctgacaagcgggagggatccgccgtggacccagggaagcggaggagcctggcggccaccccctcttccccacttccctgcactctcatcgctctcggcctcggcctcggcctccgacacgagaaagatgctggtttcgagttttggagatccttgttttttatggaacacagttctgtaaaattttcataagattccttggcaataacatacgcttgtgatggaccctagaaatactgctatgttaggattgggttctgattccgaaggtttttcaagaaagagtccttctgccatcagtactggcacattggtcagtaagagagaagtagagctagaaaaaaacacaaaggaggaagaggaccttcgcaaacggaatcgagaaagaaacatcgaagctgggaaagatgatggtttgactgatgcacagcaacagttttcagtgaaagaaacaaacttttcagagggaaatttaaaattgaaaattggcctccaggctaagagaactaaaaaacctccaaagaacttggagaactatgtatgtcgacctgccataaaaacaactattaagcacccaaggaaagcacttaaaagtggaaagatgacggatgaaaagaatgaacactgtccttcaaaacgagacccttcaaagttgtacaagaaagcagatgatgttgcagccattgaatgccagtctgaagaagtcatccgtcttcattcacagggagaaaacaatcctttgtctaagaagctgtctccagtacactcagaaatggcagattatattaatgcaacgccatctactcttcttggtagccgggatcctgatttaaaggacagagcattacttaatggaggaactagtgtaacagaaaagttggcacagctgattgctacctgtcctccttccaagtcttccaagacaaaaccgaagaagttaggaactggcactacagcaggattggttagcaaggatttgatcaggaaagcaggtgttggctctgtagctggaataatacataaggacttaataaaaaagccaaccatcagcacagcagttggattggtaactaaagatcctgggaaaaagccagtgtttaatgcagcagtaggattggtcaataaggactctgtgaaaaaactgggaactggcactacagcggtattcattaataaaaacttaggcaaaaagccaggaactatcactacagtaggactgctaagcaaagattcaggaaagaagctaggaattggtattgttccaggtttagtgcataaagagtctggcaagaagttaggacttggcactgtggttggactggttaataaagatttgggaaagaaattgggttctactgttggcctagtggccaaggactgtgcaaagaagattgtagcaagttcagcaatgggattggttaataaggacattggaaagaaactaatgagttgtcctttggcaggtctgatcagtaaagatgccataaaccttaaagccgaagcactgctccccactcaggaaccgcttaaggcttcttgtagtacaaacatcaataatcaggaaagtcaggaactttctgaatccctgaaagatagtgccaccagcaaaacttttgaaaagaatgttgtacggcagaataaagaaagcatattggaaaagttctcagtacgaaaagaaatcattaatttggagaaagaaatgtttaatgaaggaacatgcattcagcaagacagtttctcatccagtgaaaagggatcttatgaaacctcaaagcatgaaaagcagcctcctgtatattgcacttctccggactttaaaatgggaggtgcttctgatgtatctaccgctaaatccccattcagtgcagtaggagaaagcaatctcccttccccatcacctactgtatctgttaatcctttaaccagaagtccccctgaaacttcttcacagttggctcctaatccattacttttaagttctactacagaactaatcgaagaaatttctgaatctgttggaaagaaccagtttacttctgaaagtacccacttgaacgttggtcataggtcagttggtcatagtataagtattgaatgtaaagggattgataaagaggtaaatgattcaaaaactacccatatagatattccaagaataagctcttcccttggaaaaaagccaagtttgacttctgaatccagcattcatactattactccttcagttgttaacttcactagtttatttagtaataagccttttttaaaactgggtgcagtatctgcatcagacaaacactgccaagttgctgaaagcctaagtactagtttgcagtccaaaccattaaaaaaaagaaaaggaagaaaacctcggtggactaaagtggtggcaagaagcacatgccggtctccaaaagggctagaattagaaagatcagagctttttaaaaacgtttcatgtagctcactatcaaatagtaattctgagccagccaagtttatgaaaaacattggacccccttcatttgtagatcatgacttccttaaacgccgattgccaaagttgagcaaatccacagctccatctcttgctctcttagctgatagtgaaaaaccatctcataagtcttttgctactcacaaactatcctccagtatgtgtgtctctagtgaccttttgtctgatatttataagcccaaaagaggaaggcctaaatctaaggagatgcctcaactggaagggccacctaaaaggactttaaaaatccctgcttctaaagtgttttctttacagtctaaggaagaacaagaacccccaattttacagccagaaattgaaatcccttccttcaaacaaggtctgtctgtgtctccttttccaaaaaagagaggcaggcctaagaggcaaatgaggtcaccagtcaagatgaagccacctgtactgtcagtggctccatttgttgccactgaaagtccaagcaagctagaatctgaaagtgacaaccatagaagtagcagtgatttctttgagagcgaggatcaacttcaggatccagatgacctagatgacagtcataggccaagtgtctgtagtatgagtgaccttgagatggaaccagataaaaaaattaccaagagaaacaatggacaattaatgaaaacaattatccgcaaaataaataaaatgaagactttaaagagaaagaaactgttgaatcagattctttcaagttctgtagaatcaagtaataaagggaaagtgcaatccaaactccataatacggtatcaagtcttgctgccacatttggctctaaattgggccaacagataaatgtcagcaagaaaggaaccatttatataggaaagagaagaggtcgcaaaccaaaaactgtcttaaatggtattctttctggtagtcctactagccttgctgttcttgagcaaacagctcaacaggcagctgggtcagcattaggacagattcttcccccattactgccttcatctgctagtagttctgagattcttccatcacctatttgctctcagtcttctgggactagtggaggtcagagccctgtaagtagtgatgcaggttttgttgaacccagttcagtgccatatttgcatttacactccagacagggcagtatgattcagactcttgcaatgaagaaggcctcaaaggggaggaggcggttatctcctcctactttgttgccaaattctccttcgcacttgagtgaactcacatctctaaaagaagctactccttccccaatcagtgagtctcatagtgatgagaccattcccagtgatagtggaattggaacagataataacagcacatcagacagggcagagaaattttgtgggcaaaaaaagaggaggcattcttttgagcatgtttctctgattccccctgaaacctctacagtgctaagcagtcttaaagaaaaacataaacacaaatgtaagcgcaggaatcatgattacctcagctatgacaagatgaaaaggcagaaacgaaaacggaaaaagaaatatccccagcttcgaaatagacaggatccagactttattgcagagctggaggaactaataagtcgcctaagtgaaattcggatcactcatcgaagtcatcattttatcccccgagatcttctgccaactatctttcgaatcaactttaatagtttctatacacatccttctttccccttagaccctttgcactacattcgaaaacctgacttaaaaaagaaaagagggagaccccctaagatgagggaggcaatggctgaaatgccttttatgcacagccttagttttcctctttctagtactggattctatccatcttatggtatgccttactctccttcaccccttacagctgctcccataggattaggttactatggaaggtatcctcccactctttatccacctcctccatctccttctttcaccacgccacttccacctccttcctatatgcatgctggtcatttacttctcaatcctgccaaataccataagaaaaagcataagctacttcgacaggaggcctttcttacaaccagcaggactcccctcctttccatgagtacctaccccagtgttcctcctgagatggcctatggttggatggttgagcacaaacacaggcaccgtcacaaacacagagaacaccgttcttctgaacaaccccaggtttctatggacactggctcttcccgatctgtcctggaatctttgaagcgctatagatttggaaaggatgctgttggagagcgatataagcataaggaaaagcaccgttgtcacatgtcctgccctcatctctctccttcaaaaagcttaataaacagagaggaacagtgggtccaccgagagccttcagaatctagtccattggccttgggattgcagacacctttacagattgactgttcagaaagttctccaagcttatcccttggaggattcactcccaactctgagccagccagcagtgatgaacatacaaaccttttcacaagtgcaataggcagctgcagagtttcaaaccctaactccagtggccggaagaaattaactgacagccctggactcttttctgcacaggacacttcactaaatcggcttcacagaaaggagtcactgccttctaacgaaagggcagtacagactttggcaggctcccagccaacctctgataaaccctcccagcggccatcagagagcacaaattgtagccctacccggaaaaggtcttcatctgagagtacttcttcaacagtaaacggagttccctctcgaagtccaagattagttgcttctggggatgactctgtggatagtctgctgcagcggatggtacaaaatgaggaccaagagcccatggagaaaagtattgatgctgtgattgcaactgcctctgcaccaccttcttccagtccaggccgtagccacagcaaggaccgaaccctgggaaaaccagacagccttttagtgcctgcagtcacaagtgactcttgcaataatagcatctcactcctatctgaaaagttgacaagcagctgttccccccatcatatcaagagaagtgtagtggaagctatgcaacgccaagctcggaaaatgtgcaattacgacaaaatcttggccacaaagaaaaacctagaccatgtcaataaaatcttaaaagccaaaaaacttcaaaggcaggccaggacagggaataactttgtgaaacgtaggccaggtcgacctcggaaatgtccccttcaggctgtcgtatcaatgcaagcattccaggctgctcagtttgtcaacccagaattgaacagagacgaggaaggagcagcactgcacctcagtcctgacacagttacagatgtaattgaggctgttgttcagagtgtaaatctgaacccagaacataaaaaggggttgaagagaaaaggttggctattggaagaacagaccagaaaaaagcagaagccattaccagaggaagaagagcaagagaataataaaagctttaatgaagcaccagttgagattcccagtccttctgaaaccccagctaaaccttctgaacctgaaagtaccttgcagcctgtgctttctctcatcccaagggaaaagaagcccccacgtcccccaaagaagaagtatcagaaagcagggctgtattctgacgtttacaaaactacagacccaaagagtcgattgatccaattaaagaaagagaagctggagtatactccaggagagcatgaatatggattatttccagcgcccattcatgttggaaagtatctaagacaaaagagaattgacttccagcttccttatgatatcctttggcagtggaaacacaatcagctatacaaaaagccagatgtcccactatataagaaaattcgttcaaatgtctacgttgatgtcaaacccctttctggttacgaagctaccacctgtaactgtaagaagccagatgatgacaccaggaagggctgtgttgatgactgcctcaatagaatgatctttgctgagtgttcccccaacacttgcccatgtggcgagcaatgctgtaaccagaggatacagaggcatgaatgggtgcaatgtctagaacgatttcgagctgaggaaaaaggttggggaatcagaaccaaagagcccctaaaagctgggcagttcatcattgaatacctaggggaggtcgtcagtgaacaggagttcaggaacaggatgattgagcagtatcataatcacagtgaccactactgcctgaacctggatagtgggatggtgattgacagttaccgcatgggaaatgaggcccgattcatcaaccatagctgtgacccaaattgtgaaatgcagaaatggtctgttaatggagtataccggattggactctatgctcttaaagacatgccagctgggactgaactcacttatgattataactttcattccttcaatgtggaaaaacagcaactttgtaagtgtggctttgagaaatgtcgaggaatcatcggaggcaagagtcagcgtgtgaatggactcaccagcagcaaaaacagccagcccatggccacacacaaaaaatctggacggtcaaaagagaagagaaagtctaagcacaagctgaagaaaaggagaggccatctctctgaggaacccagtgaaaatatcaacaccccaactagattgaccccccaattacagatgaagccaatgtccaatcgtgaaaggaactttgtgttaaagcatcatgtattcttggtccgaaactgggagaagattcgtcaaaaacaggaggaagtaaagcacaccagtgataatattcactcagcatcattatatacccgttggaatgggatctgccgagatgatgggaatatcaagtctgatgtcttcatgacccagttctctgccctgcagacagctcgatctgttcgaacaagacggttggcagctgcagaggaaaatattgaagtggctcgggcagcccgcctagcccagatcttcaaagaaatttgtgatggtatcatctcttataaagattcttcccggcaagcactggcagctccacttttgaaccttcccccaaagaaaaagaatgctgattattatgagaagatctctgatcccctagatcttatcaccatagagaagcagatcctcactggttactataagacagtggaagcttttgatgctgacatgctcaaagtctttcggaatgctgagaagtactatgggcgtaaatccccagttgggagagatgtttgtcgtctacgaaaggcctattacaatgcccggcatgaggcatcagcccagattgatgagattgtgggagagacagcaagtgaggcagacagcagtgagacctcagtctctgaaaaggagaatgggcatgagaaggacgacgatgttattcgctgtatctgtggcctctacaaggatgaaggtctcatgatccagtgtgacaagtgcatggtatggcagcactgtgattgtatgggagtgaactcagatgtggagcactacctttgtgagcagtgtgacccaaggcctgtggacagggaggttcccatgatccctcggccccactatgcccaacctggctgtgtctacttcatctgtttgctccgagatgacttgctgcttcgtcagggtgactgtgtgtatctgatgagggatagtcggcgcacccctgatggccacccggtccgtcagtcctatcgactgttatctcacattaaccgagataaacttgacatctttcgcattgagaagctttggaagaatgaaaaagaggaacggtttgcctttggtcaccattatttccgtccccacgaaacacaccactctccatcccgtcggttctatcataatgaactatttcgggtgccactctatgagatcattcccttggaggctgtagtggggacctgctgtgtgttggacctttatacgtattgtaaagggagacccaaaggagtaaaggagcaagatgtgtacatctgtgattatcggcttgacaagtcagcacacctgttttacaagatccaccggaaccgctatcctgtctgcaccaaaccctatgcttttgatcacttccccaagaagctcactcccaaaaaagatttctcgcctcattacgtcccagacaactacaagaggaatggaggacgatcatcctggaagtctgagcgctcaaagccacccctaaaagacttgggccaggaggatgatgctctacccttgattgaagaggttctagccagtcaagagcaagcagccaatgagatacccagcctggaggagccagaacgggaaggggccactgctaacgtcagtgagggtgaaaaaaaaacagaggaaagtagtcaagaaccccagtcaacctgtacccctgaggaacgacggcataaccaacgggaacgactcaaccagatcttgctcaatctccttgaaaaaatccctggaaaaaatgccattgatgtgacctacttgctggaggaaggatcaggcaggaaactgcgaaggcgtactttgtttatcccagaaaacagctttcgaaagtgaccctcaaagaatgagaacctcaagcatctgggatccagtggagctaatcagtcctgcctcctgctctctgggtatagacaggggtgggaagggtccatctgggcaaggggaatggggccatgttgttgacattaggtacttaataagccttggagctagtggagagggagaggaaagggttctgtccaagacagttcaggttaattaattttcttctccattgcttcaccttaagggttaataatgtagagaggagggaggaccacattgatgaccagaacctactggtactttatagcatttgccccaccccacagcttaggtttttctgtcatcctcagatcccacaggcattgcgaagaagctgcttcctatacccaggtataactcaaaatccaaagggatagggccaggatccctattcctaccccatctattctctgttggctccaagagctaccccagagaccttaaacagaaacagtagctgaggcttcttcctagatacctgactagggaagtttgtctctcctttcttgcccaaccaggtcaaagtaaaatgtgagttgacagctcaaagcacttgtaactgctgccccctccctacctctactccccaaaatggaatcatgggatagggaaggcccccatggggtcagaagggcacggtagttcttgcaattatttttgttttacccttcataacctgtcaaacatatttttttctaatgagaaagccaggcccccgccagcacacatgctgtttttaatgcgctgtagttcttgtgtgtctgctgtgctgtgcaaatggagattcagttcaaaataaaatcatttaaaaacctacataaaaagaactctaaacccacccctgcaacaaaagtcactacataaactgttcagcagtattcacctatcagagtatttgttgtgagtatagattatcaattgaaaacactactcttgttttcttaattgtacagttttcaatgtccctttcttaaagagacagtatatttctcttcacccctagcccatcttccctcaccctcctgaatgacatcaggaggtatatccagggtgtctccttccttcctactctcttgaccagaagttaacagactatactgtctctttaaaaataaaatttaaaaagctttgttgtcttttcagacatacatatgcatatatgttttagatgttcttataagagaaaagatggtttttaaatgtgccaagttgtgtgtgtgtgtgtatatatatgtgtgtatgtgtgtgtatatatatatgtgtgtgtgtatatatatacacacacacacacacacctgctgtgtgattggtaagcaatacaatagtaaacatgtccccattacttttttctaatattggaccaatgctgtcctaattgtacatttccccttatggtgacgatgctctgactcgtttaggtagacacattgaccaccttccattccattaaatattttttcctttttcccctttctgtgtcattcttgaggaaaaaacaaaagagagaggggatgccaatgatccccttgagcagagaaaaagcaaaataaatattttattaaagaaaaaagagaattaagaaaatagtttggagtattttcttactgtagagaagcactgtacattactaagagacctgggtataagatactcacatgtggagctggaaaaatcgcatgtccaagcccgtttgagtggtttcttttgtttttcattgcagggagtgggtgggagggaggtgggactaggggcactttgggggtctccttttagtcaaaagcgagaaaatgacaagaaagagattaaaattcaatgtttcctttatagtgttaaacactaaaattttaaaaaagatgaaaaagaaaaaaaaactttgtaaaatgcgagaacagaagcaaaagacactacgctctgtcattttatctttcttttgttgaaagactaaaaaaaaactgaaatgttttttagacaatcaaatgttaggtaagtgcaaaaacttgttttttcttactggtgtagaaattaatgcctttttttatttttcagttattttataataacgaaataaaaagaaccccccagctgccaggcgggttttggtgtttgaaatgcggggcaaagcactacatcactgcaaatagatacagagttagtctgcatgtctgtaggctgtgtgattgcggaaaatataaatgctgctaatatatttcctttttacaaaagcatatctaaatagatgattgttttgatgttaatctttgtaaattatgtattaccaattttaacattggatgtaattgcatacaaagcttgcatctcaatccttgaaagtctagtattaaatggaaaaaacttttcctaactgtggaaaaaaaaaaa

SEQ ID NO: 131 - DNA, 6891 bp, HOMO SAPIENS
aactgcatttcccagcgccccacgcggcggcggccgtaaagcgcggcggtcgaacggccggttccggctgaatgtcagtgctgggctgtgggccggggaggaaggcggctcgcggttcctccaccgcctccgccgccgcatcctccgcttgtgctaccgccgcgggcgctgggccgctctgctggtccggcatgagaccgtgagacgagagacgggtcggggccgccgacatgtttggccgctcgcggagctgggtgggcgggggccatggcaagacttcccgcaacatccactccttggaccacctcaagtatctgtaccacgttttgaccaaaaacaccacagtcacagaacagaaccggaacctgctagtggagaccatccgttccatcactgagatcctgatctggggagatcaaaatgacagctctgtatttgacttcttcctggagaagaatatgtttgttttcttcttgaacatcttgcggcaaaagtcgggccgttacgtgtgcgttcagctgctgcagaccttgaacatcctctttgagaacatcagtcacgagacctcactttattatttgctctcaaataactacgtaaattctatcatcgttcataaatttgacttttctgatgaggagattatggcctattatatatcgttcctgaaaacactttcgttaaaactcaacaaccacactgtccatttcttttataatgagcacaccaatgactttgccctgtacacagaagccatcaagtttttcaaccaccctgaaagcatggttagaattgctgtaagaaccataactttgaatgtctataaagtgtcattggataaccaggccatgctgcactacatccgagataaaactgctgttccttacttctccaatttggtctggttcattgggagccatgtgatcgaactcgatgactgcgtgcagactgatgaggagcatcggaatcggggtaaactgagtgatctggtggcagagcacctagaccacctgcactatctcaatgacatcctgatcatcaactgtgagttcctcaacgatgtgctcactgaccacctgctcaacaggctcttcctgcccctctacgtgtactcactggagaaccaggacaagggaggagaacggccgaaaattagcctgccggtgtctctttatcttctgtcacaggtcttcttaattatacatcatgcaccgctggtgaactcgttagctgaagtcattctgaatggtgatctgtctgagatgtacgctaagactgaacaggatattcagagaagttctgccaagcccagcattcggtgcttcattaaacccaccgagacactcgagcggtcccttgagatgaacaagcacaagggcaagaggcgggtgcaaaagagacccaactacaaaaacgttggggaagaagaagatgaggagaaagggcccaccgaggatgcccaagaagacgccgagaaggctaaaggtacagagggtggttcaaaaggcatcaagacgagtggggagagtgaagagatcgagatggtgatcatggagcgtagcaagctctcagagctggccgccagcacctccgtgcaggagcagaacaccacggacgaggagaaaagcgccgccgccacctgctctgagagcacgcaatggagcagacccttcctggatatggtgtaccacgcgctggacagcccggatgatgattaccatgccctgttcgtgctctgcctcctctatgccatgtctcataataaaggcatggatcctgaaaaattagagcgaatccagctccccgtgccaaatgcggccgagaagaccacctacaaccacccgctagctgaaagactcatcaggatcatgaacaacgctgcccagccagatgggaagatccggctggcgacgctggagctgagctgcctgcttctgaagcagcaagtcctgatgagtgctggctgcatcatgaaggacgtgcacctggcctgcctggagggtgcgagagaagaaagtgttcaccttgtacgacatttttataagggagaagacatttttttggacatgtttgaagatgagtataggagcatgacaatgaagcccatgaacgtggaatatctcatgatggacgcctccatcctgctgcccccaacaggcacgccactgacgggcattgacttcgtgaagcggctgccgtgtggcgatgtggagaagacccggcgggccatccgggtgttcttcatgctgcgttccctgtcactgcaattgcgaggggagcctgagacacagttgccgctgactcgggaggaggacctgatcaagactgatgatgtcctggatctgaataacagcgacttgattgcatgtacagtgatcaccaaggatggcggcatggtccagcgattcctggctgtggatatttaccagatgagtttggtggagcctgatgtgtccaggcttggctggggagtggtcaagtttgcaggcctattgcaggacatgcaggtgactggcgtggaggacgacagccgtgccctgaacatcaccatccacaagcctgcgtccagcccccattccaagcccttccccatcctccaggccaccttcatcttctcagaccacatccgctgcatcatcgccaagcagcgcctggccaaaggccgcatccaggcaaggcgcatgaagatgcagagaatagctgccctcctggacctcccaatccagcccaccactgaagtcctggggtttggactcggctcctccacctccactcagcacctgcctttccgcttctacgaccaggggcgccggggcagcagcgaccccacagtgcagcgctccgtgtttgcatcggtggacaaggtgccaggcttcgccgtggcccagtgcataaaccagcacagctccccgtccctgtcctcacagtcgccaccctccgccagcgggagccccagcggcagcgggagcaccagccactgcgactctggaggcaccagctcgtcctccaccccctccacagcccagagtccagcagatgcccccatgagtccagaactgcctaagcctcaccttcctgaccagttggtaatcgtcaacgaaacggaagcagactctaagcccagcaagaacgtggccaggagcgcagccgtggagacagccagcctgtcccccagcctcgtccctgcccggcagcccaccatttccctgctctgcgaggacacggctgacacgctgagcgtcgaatcgctgacccttgtccccccagttgacccccacagcctccgcagcctcaccggcatgcccccgctgtccacgccggctgccgcctgcacagagcccgtgggcgaagaggctgcatgtgctgagcctgtgggcaccgctgaggactgagtcagtgccggggcctccctttgtgtgtgtggccccgctggtagggaccccagtgccgctgactggcaagacacactgggagcacccaccattctgtgcggcccccagcagccatctcaaccacctatccctgcgctcccttgaatgggaagaagccccacgttgtccttgaattcctttttcactttgcatctcttcacgtgcaggctgggaccagcggagacaccgcggcgaatgcagatgactgcaccggccactcagggagctgcctgggctccgtgtctctgagccccgggtggcaggacccaccggcacctctttcttcctctgtcatatggctcctctgtcaccagccccagtgtgcacagaagaattggaccaggtcactgtacgtagaaatttgtagaaaagcagacttagataaacatctcctttggatatttatttccgcttttggcagcaggtgaacatttatttttaaaacttctatttaaaagaagtccaaaaacatcaacactaaggtttgatgtcatgtgaaaagtgtaataataacagttaagatttcatgatcattttcactggacctttcctgatattttgtttcagagttcttagtgtggctttttccatttatttaagtgattctttgttactcactaactctgcaagcctgtggaataatgaagtaccttcctggaaagtttggattattttttaaacaaaaacaagggagatacatgtattctcaggtacacacagagctgagagggctgaatggttttctgctatagcagccgagaggcctcccatcatggaaagatttctccaggaaaaggaggaatgtagccagctccccactcaggacgcttcctcatttctcttcaccaaaaccaaacagagacagcttccagcaccttcttcagtgttaccatctctaagaaggaaccagttgggaccgtgaagactcccgaccctgtggccatgatggaaatcaaaggaagacaccctctacgtcacctgccctcgactgtgtgtgcccacatgtgccgagagatggcccagagccagttcccctccagctgcaagggcatggtgtccccagagctctgagtctgtcactctccctctgctactgctgctgatctgaatatggaaaccccatggttcccttccccattcggactgggtgtgtacaagcaaggacccagatgcatcagacacagcccccaagatgttcctttctactcggccagctcgggagccagacacagcactcacagcccaggccgtgatccaccctccccaagtccaccagggccagcggcccctcacctctctggtcactggtgagaccttccacaactttcctccagacctgccagcagatgtgcccaccaggggcattaggtatccgccggagcctggccatagggtagtctcgggagccgcgctgagatcttttgccacctgcattttagaagaacatggtctctgtctcctcggcccagccagctgtcccggcaaggcctgccgagggcagttttcaacctcatgaaggaaacacagtcctgccaaggagggggagtggcgcccatggggacaggcctcagtccttagaagccctctgggtagctgtgcccacccagccttcatggctgcaggtacaaggacctttgcttccatagagaaaacgcacagctcagaaagggggccacatgggcagaaacccaaaggaaggacaaaccacgaccaccgtggccatctgcagaatccctggaagagaaggaaggcagggtggagcggggggaagaccatcatggagagaaggaccacagcatcaggagacgggacacgccacacccagcaggcagcctgtgtgttgcttaattttttaagagcaagaggggtagagaggatcaagctggccctggctggagatggctagcccctgagacatgcacttctggttttgaaatgactctgtctgtggggcagcagaaactagagaaggcaagtggctgccccaccccaaggcgtgaccaggaggaacagcctgcagctcactccatgccacacgggtgggccaccagcctgctgtcagaagtctctgggctccaactggtcttgtaaccactgagcactgaaggagagaggtcttggtcagggctggacagcatgcccgggaggaccagcagaggattaaaggtgactgggaggaccagcggaggataaaagacactgctcagggcagggcttctaccctgcatccctggccaagaaaagggcagtccccatgtgggcttgcagggtcactctcaggggcctctttcagctggggctggcaacttgcgtctgggggacacctccaggtgtgtggggtgaggatttcctataaccagggctcccagaagctttgcttatgtaaggaggtctgggagccagcccattggaggccaccagccattttggcttcaaaggaccccacctcacccaggtctcagcggcagtgggcacagctatgtcttcaggagctcccgtcaaacctcatagctggggcgctcccagacaggccagtccagacaggacacgctgggcccctggcatccagaggaagagccaggagtgtgggaaggcccacagtgggggctgtggcttctgacactcaggtcatagcctcagaggtctgaggtcagcccccacagacccatccggcccgccccccaagtccctgcagagagcacttagagttatggcccaggccctggtccacccttcccctgtgcacctccggctgggtttgccaagtcagggagcagggctggccgcaggaactcccaaaccttggctttgaatattgttgtggaggtgtgctcgtccctttctggacgtgcaaggtacctgtcccagcaggtcagatggggccagctgaggcgctcccccaggcaggaagggccagccttcaccatcgcgtgggattgggaggaggggcctccgtgagcagcccctcctctgccgctgtcccagcccagtccctctcccggagccttggcagcctcccacaacccagacacttgcgttcacaagcaacctaaggggcaggtgaagaagcgcagccctgccagacgcgctagattcctctaaggtctctgagatgcaccgttttttaaaaaggcgtggggtgaactgattttgatcttcttgtctagatgcaataaataaatctgaagcatttaatgtagtcatcttgacattgggcctacactgtacgagttccttatgtttccttgagctaaaaatatgtaaataatttttgtcccagtgagaaccgagggttagaaaacctcgatgcctctgagcctcgggaccgctctagggaagtacctgctttcgccagcatgactcatgcttcgtgggtactgaacacgagggtggaaatgaaaactggaacttccttgtaaatttaaacttggcaataaaagagaaaaaaagttaccaagaa

SEQ ID NO: 132 - DNA, 5547 bp, HOMO SAPIENS
gcgacttttgcaacaactcgccgcgccgcggcctccgcgcgccgccgccgccaccgcagccgccggctccccgccgcccgggcccgggccggccgcgccgggggccgccgcgcccgccgcccgctgcctgcgccgccggccgggcatgagttagtcgcagacatggacaccaaacatttcctgccgctcgatttctccacccaggtgaactcctccctcacctccccgacggggcgaggctccatggctgccccctcgctgcacccgtccctggggcctggcatcggctccccgggacagctgcattctcccatcagcaccctgagctcccccatcaacggcatgggcccgcctttctcggtcatcagctcccccatgggcccccactccatgtcggtgcccaccacacccaccctgggcttcagcactggcagcccccagctcagctcacctatgaaccccgtcagcagcagcgaggacatcaagccccccctgggcctcaatggcgtcctcaaggtccccgcccacccctcaggaaacatggcttccttcaccaagcacatctgcgccatctgcggggaccgctcctcaggcaagcactatggagtgtacagctgcgaggggtgcaagggcttcttcaagcggacggtgcgcaaggacctgacctacacctgccgcgacaacaaggactgcctgattgacaagcggcagcggaaccggtgccagtactgccgctaccagaagtgcctggccatgggcatgaagcgggaagccgtgcaggaggagcggcagcgtggcaaggaccggaacgagaatgaggtggagtcgaccagcagcgccaacgaggacatgccggtggagaggatcctggaggctgagctggccgtggagcccaagaccgagacctacgtggaggcaaacatggggctgaaccccagctcgccgaacgaccctgtcaccaacatttgccaagcagccgacaaacagcttttcaccctggtggagtgggccaagcggatcccacacttctcagagctgcccctggacgaccaggtcatcctgctgcgggcaggctggaatgagctgctcatcgcctccttctcccaccgctccatcgccgtgaaggacgggatcctcctggccaccgggctgcacgtccaccggaacagcgcccacagcgcaggggtgggcgccatctttgacagggtgctgacggagcttgtgtccaagatgcgggacatgcagatggacaagacggagctgggctgcctgcgcgccatcgtcctctttaaccctgactccaaggggctctcgaacccggccgaggtggaggcgctgagggagaaggtctatgcgtccttggaggcctactgcaagcacaagtacccagagcagccgggaaggttcgctaagctcttgctccgcctgccggctctgcgctccatcgggctcaaatgcctggaacatctcttcttcttcaagctcatcggggacacacccattgacaccttccttatggagatgctggaggcgccgcaccaaatgacttaggcctgcgggcccatcctttgtgcccacccgttctggccaccctgcctggacgccagctgttcttctcagcctgagccctgtccctgcccttctctgcctggcctgtttggactttggggcacagcctgtcactgctctgcctaagagatgtgttgtcaccctccttatttctgttactacttgtctgtggcccagggcagtggctttcctgaggcagcagccttcgtggcaagaactagcgtgagcccagccaggcgcctccccaccgggctctcaggacaccctgccacaccccacggggcttgggcgactacagggtcttcgggccccagccctggagctgcaggagttgggaacggggcttttgtttccgttgctgtttatcgatgctggttttcagaattcctgtgtggccctcctgtctggagtgacatcttcatctgctctgaatactggtgcccagccagcccgtgacagcttccccctaatcaggaggggacagctgggggcgcaagctggtgtgtcatcagcaaagacctcagccgcctcggggatgagaggggactcgtggggcaagcaagctgccctgtgctctgagtgagggggaaggtagcccctttttccaaagataactcacagttttgccctcgagccaatgagaacatgagctgccctctgtgcaaggtttcggggccacctccaggctgcaggggcgggtcactcacccccctgttttctctctgccttggtgttctggtttcagactcccgactccccgttcagaccagagtgccccggcccctccccagcctgagtcttctccttgctctgcggggtgggctgaggcttgtccttgtttcctgcagggctggccctggctcgggcagggtggggcatcaccacctcactggccttgctggaggcacagggctctgcggacctgcagccatctgtgaggcccgcggggatgggaggggaggagggtggcctgttggtttccctcagagggggcaggtggcctggagagagaggggctcaggaactgggagcctcgtgggtggggcagatgctccgcggcctggagtggctctgccggggcattggtgggacccctgctcaggccttctctctggctgccagttgtgtctaaaagactcttggaatctgagaacccggagtcgcagcgccctcgggcctgggccacacgcaggccctggtgggaccacccagcctggtattgtccacggacagcgttgttcacccagagccttacttgggagcctcactgaacgcctgctctggttgaaggtggggtgggggcggggcttggggcctccctggctcagcccagtgcggcctggcgctcctcccgcaggctctgcccccgggctccggtggtgcggggccctctcaggttgaactcgcctcttttgcactggaaggccctccctttggcctgagtacttttcccgttcacgcctcagtcccgtggacccagcctttgtcagtggcaggtgcctgaacagagggtggatgggggggataccggagggggtcttgtcttcccagccgcagtctaggaatgatgcgggggggtggacgccttctccatagtctttccccacctggagcaggggcttcctcagtggtgaggggagctgcctacaggttggaccgggaggcagtggcttggagaggcagctttccagccttggtggggaagaaagtgtccattctttgccttcctggagctcccagccagagctgagcttaggcacccgagtggagcctgcagctgagtctgtgcccgagacaggctgtcagagattccagaagcctctcctccccgccgccctccacccctgcctttcagcgttgtggatccctagaggtggccccctgcccgatccaccgtcctgaggcagagtgttgagcctcatacctgtaccaggtccccggccagctgggcccctcccaggcactgccaggaagccccagctgcccctggcgggtgtggtggaaatggcaggagggtgcaggtactcttggggccccagcggtgggagtgcaaaagacccaacgccaacacctggtgccttctgcagccagcgcccacccatccgtgcccggacccttgggaatgcccgcggctccagaggaaaaagcccagggacggggcctccgttgcggggggtcggctgcttcttgggaactttgtcgtttccggcgctggctggctggctggctggctgtaaagcactgaagccccccggccgccaacccctgaaagcagaacctggcctccctggccacagcagccttacccaccgctctacgtgtcccgggcacttcccgcagccttcccgtccctttctcatcggccttgtagttgtacagtgctgttggtttgaaaaggtgatgtgtggggagtgcggctcatcactgagtagagaggtagaatttctatttaaccagacctgtagtagtattaccaatccagttcaattaaggtgattttttgtaattattattattttggtgggacaatctttaattttctaaagatagcactaacatcagctcattagccacctgtgcctgtccccgccttggcccggctggatgaagcggcttccccgcagggcccccacttcccagtggctgcttcctggggacccagggcaccccggcaccttcaggcacgctcctcagctggtcacctcccggctttgccgttcagatggggctcctgaggctcaggagtgaagatgccacagagccgggctcccctaggctgcgtcgggcatgcttggaagctggcctgccaggaccttccaccctggggcctgtgtcagccgccggccctccgcaccctggaagcacacggcctctgggaaggacagccctgaccttcggttttccgagcacggtgtttcccaagaattctgggctggcggcctggtggcagtgctggagatgaccccgagcccctccccgtggggcacccaggagggccctgccggaatgtgcagcctgtgggtagtcggctggtgtccctgtcgtggagctggggtgcgtgatctggtgctcgtccacgcaggtgtgtggtgtaaacatgtatgtgctgtacagagagacgcgtgtggagagagccgcacaccagcgccacccaggaaaggcggagcggttaccagtgttttgtgtttatttttaatcaagacgtttcccctgttttcctataaatttgcttcgtgtaagcaagtacataaggaccctcctttggtgaaatccgggttcgaatgaatatctcaaggcaggagatgcatctattttaagatgctttggagcagacagctttagccgttcccaatccttagcaatgccttagctgggacgcatagctaatactttagagaggatgacagatccataaagagagtaaagataagagaaaatgtctaaagcatctggaaaggtaaaaaaaaaaaatctatttttgtacaaatgtaattttatccctcatgtatacttggatatggcggggggagggctgggactgtttcgtttctgcttctagagattgaggtgaaagcttcgtccgagaaacgccaggacagacgatggcagaggagagggctcctgtgacggcggcgaggcttgggaggaaaccgccgcaatgggggtgtcttccctcggggcaggagggtgggcctgaggctttcaagggttttcttccctttcgagtaatttttaaagccttgctctgttgtgtcctgttgccggctctggccttcctgtgactgactgtgaagtggcttctccgtacgattgtctctgaaacatcgtggcctcaggtgccagggtttgatggacagtagcattagaattgtggaaaaggaacacgcaaagggagaagtgtgagaggagaaacaaaatatgagcgtttaaaatacatcgccattcagttcgttaaaaaaaaaaaaaaaaaaaaaaaaa

SEQ ID NO: 133 - DNA, 4575 bp, HOMO SAPIENS
gtagtcgtggcgctctcgaggccctgccatgagcaagctcttaactcttcaggtctgcacgtcctacgcccaccgtccagtgctactctcagctcggagttcagcttcgggctgccaagagccagcaacctggtgtcagaggctcggtcccacaacgctctgcgggccgcggcgcctgctgggaggtgtagtccccgatctgcgtactgcgttcgccgagggggagggcggagctgccggcggcccgggcgggctggcagctagagtgggtgcgatagccgcctccgcctctgccgcctccgccgtcgcctcctccgcccgggccgttcgctgctgcgcggggagagcgaggcggggccgccggggccgccatggagcccgactcggtgattgaggacaagaccatcgagctcatgtgttctgtgccaaggtctttgtggctaggctgcgccaacctggtagagagcatgtgcgcactgagttgcctgcagagcatgcccagtgtcagatgtctccagataagtaatggaacatcatctgtgatcgtctccagaaagaggccatcagaaggaaactatcaaaaagaaaaagacttgtgtattaaatattttgaccagtggtctgaatcagatcaagtggaatttgtggaacatcttatttcacgaatgtgtcattatcagcatggacatattaactcttacctgaagcccatgttgcagcgggactttattaccgctttaccagagcaaggcttagatcacatagcagaaaacattctttcgtacctggatgccaggtctctgtgtgcagcagagctggtatgtaaagaatggcagcgagtgatctcagaaggaatgctttggaagaagctgattgaacgaatggtacgcactgatcccctatggaaaggactttcagaaagaagagggtgggatcagtacctgtttaaaaacagacccacagatggccctccaaattcattttataggtcattatacccaaagattatccaggatatagagactatagaatctaactggcggtgtggacgacacaacttgcagaggattcagtgccgctctgaaaatagtaaaggtgtctactgtttacagtacgatgatgaaaaaattatcagtggcctacgagataattctattaagatatgggataaaaccagcctggaatgtttgaaagtgttaacaggacacacaggctctgtcctctgtctgcagtatgatgagcgtgtcattgtaactggctcttcagattctacggtgagagtgtgggatgtgaacacgggtgaagttcttaacacattgatccaccacaatgaggctgtattgcacttacgcttcagcaatggactgatggtgacctgttccaaggaccgctccattgctgtgtgggacatggcttctgcgaccgacatcactttacgccgtgtcctggttggccaccgggctgccgtcaatgtagtagactttgacgacaagtacatcgtgtctgcctctggtgacaggaccatcaaagtctggagcacgagcacctgtgaatttgttcgtactctcaatgggcacaagcggggcattgcctgtctccagtacagggatcgcctggttgttagtggatcatcagataataccattaggctctgggatattgaatgtggtgcctgtttaagagtcctagagggacatgaagaattggtccgatgcatccggtttgataacaagaggattgtcagtggggcctatgatgggaaaattaaagtttgggacttgcaagctgctcttgaccctcgagccccagcaagcacattgtgtttgcgcacattggtggaacattctggacgtgtgtttcggctccagtttgatgagtttcagatcatcagcagctcccatgatgacactattttgatttgggatttcttaaatgtgcctcccagtgcccagaatgagacccgttctccctccagaacatacacttacatctctagataacagtctgcactttcacccgtttcagggttttctagtcttgaactactggctacgtggctaccaaatgcctaagggagttcgttcacagctgagttatgaagctggaattggttctagacgctgggtagatgcaaagcagcctaactcttcaagtaccgacatttctcacctctgattccggctctcctttgagaaggagaccttagcttccccggcttcaagtagaacagaagcccgtttccttccctcatcagtgaaaaaatctaatgtttcaaatgtaaattgttcatagaaaaggaacatagaatctgttttacagaagtaaatcgaccgtcaagagaagacttggcctctaatttatattgctttgcactttggtttgatattaagaaacagcattcttcttcagtgaaattttgggtgccaaacacctacccagaatgtccagggctttcattttcaaaagttagcattctccttttgaccgtccaagtcattatgaattctgacttgttgtattaggaacatgttggacagtggaaaattttctctggattgttttagtaatatttttgggattatacttcctttctgtaccaatttcttttaatttaaagaactataagtcagttatattatctaccaacaggtaatatagctctttcttttattaactgttctctgtcccccaaccatctcctgatatttggtagagtaacacctttatacgtgtgcttgcctcctaatttaaaatactgtattcgcatgtagatataatgtacataacagtttaacctcaaagttgctggagtcagggccccctgtgcttgagacactaatacagagtgtgttcgcacttagccatgggctgggctcaagaacctgatacctgggttgatgtggattacctagaacccttcctgcagtattcatacagtgtttttattttgttgttgtcattgcgtgtgtgtggtttgtgtgtgtttttaatgagaatcttgttttaaaatgtaatttctaaggtttaacaccaaaatgttttatttgttgtggagtatatattatacaatagagaggtaccttaaacattttttgttcttattctttttctcataagtactcctgagtacaagtggtcacctcccatagtattcatttggcttcgctgtcaaaaatcattattctgtgcagtcgtggccctgggaaggggaaataagaaggccctgttgacgggctgtcttggctctggaattcatgcatcctggccttgccaaggttctggcagggcctgctggtgtgttggagcctgcagggcaggtcaggctggttcagaggcccatgctgaggggtgggtgctctgaagtggagtgaagcctcaagcccatgaatgccaccccagtcatctctggtgtcagctgctgctgtggccccagcaggttctcaaagctcccaagtcctccctacgacacagcccaaatgtgtaaatggcactgttgccctgacagtgcatggaaaggacgttggcatccaattggcactccttctcccttattcaatattaggtttgatttgcccttcgccattgtttccaaagatcaaggaatgtcaataacattttaaaggaccaataaacagcctcctataaagtaaacctcttcccgtggaagcacactctactactaaagggaaggccctgggctctgatttgtcctttgcattgagaacggtgtggggatcagtgtgtgtgtatgtgatttgtttattgagttggctttgcttttttagtttttcttttaaaaataaaatccttccttcccatgttactaaattaatttatgtttttgagaggttgagtctcaaagtgtaaacaataaacctccattcataaggtggatgttgtaagcttgatggtggttgtgaaagtgatttagctttgaccacttttcatcctacagcttcaatatcaaactggttaggaaagcccagggggaagggagggggcaggggaggaggcaattctgaatgaatgaatggattttttgttgtttttgcatgtttaatatagaagttcccctcgttccttgggagatgatggcctttgaatatgcagacaacctttgaattgtgcctactaaattatagcaggggactttggcacccaaggagttctgactttctgggattataatagtaattcccagccatactctggactttattttgctaaccataactgagcaaatgtaaattactgctatattaatgttttaaagcactgggatagtctaattctaacttgtaattaattatgtttgccaattatctgtttgaaataaatttgtgtctgaacagctattgaaactgttaaattgtacagatattattcatgacagctttgtactgtggaatgtgcttaataaaaaacaaaaaagtttgacttttgtccagtaaattgctaagtaatgtcaataaatcgagtatgggtattatgcagtgcacctaatctggcttcatgcaattgttacttcagctactgattcaaagccaatactcttaataaagtgttgcaatactc

SEQ ID NO: 134 - DNA, 2614 bp, HOMO SAPIENS
agcccccaagagctctgtgcgggattctaggctcccctgtgacagccgcggcaggaagcaggcgggcgctccccggccacaggcctgttgttctcggaagggagaaagctggacatttccccacgtaactcccagctctgggcctagagtgcgtgcatggcgaagtccccggagaactctaccctggaggagattctggggcagtatcaacggagtctccgggaacatgccagcagaagcattcaccaactgacatgtgccctgaaagaaggcgatgtcactattggagaagatgcaccaaatctttcttttagcaccagtgtgggaaatgaggacgccaggacagcctggcccgaattacaacagagccatgctgttaatcagctcaaagatttgttgcgccaacaagcagataaggaaagtgaagtatctccgtcaagaagaagaaaaatgtcccccttgaggtcattagaacatgaggaaaccaatatgcctactatgcacgaccttgttcatactattaatgaccagtctcaatatattcatcatttagaggcagaagttaagttctgcaaggaggaactctctggaatgaaaaataaaatacaagtagttgtgcttgaaaacgaagggctccagcaacagctaaaatctcaaagacaagaggagacactgagggaacaaacacttctggatgcatccggaaacatgcacaattcttggattacaacaggtgaagattctggggtgggcgaaacctccaaaagaccattttcccatgacaatgcagattttggcaaagctgcatctgctggtgagcagctagaactggagaagctaaaacttacttatgaggaaaagtgtgaaattgaggaatcccaattgaagtttttgaggaacgacttagctgaatatcagagaacttgtgaagatcttaaagagcaactaaagcataaagaatttcttctggctgctaatacttgtaaccgtgttggtggtctttgtttgaaatgtgctcagcatgaagctgttctttcccaaacccatactaatgttcatatgcagaccatcgaaagactggttaaagaaagagatgacttgatgtctgcactagtttccgtaaggagcagcttggcagatacgcagcaaagagaagcaagtgcttatgaacaggtgaaacaagttttgcaaatatctgaggaagccaattttgaaaaaaccaaggctttaatccagtgtgaccagttgaggaaggagctggagaggcaggcggagcgacttgaaaaagaacttgcatctcagcaagagaaaagggccattgagaaagacatgatgaaaaaggaaataacgaaagaaagggagtacatgggatcaaagatgttgatcttgtctcagaatattgcccaactggaggcccaggtggaaaaggttacaaaggaaaagatttcagctattaatcaactggaggaaattcaaagccagctggcttctcgggaaatggatgtcacaaaggtgtgtggagaaatgcgctatcagctgaataaaaccaacatggagaaggatgaggcagaaaaggagcacagagagttcagagcaaaaactaacagggatcttgaaattaaagatcaggaaatagagaaattgagaatagaactggatgaaagcaaacaacacttggaacaggagcagcagaaggcagccctggccagagaggagtgcctgagactaacagaactgctgggcgaatctgagcaccaactgcacctcaccagacaggaaaaagatagcattcagcagagctttagcaaggaagcaaaggcccaagcccttcaggcccagcaaagagagcaggagctgacacagaagatacagcaaatggaggcccagcatgacaaaactgaaaatgaacagtatttgttgctgacctcccagaatacatttttgacaaagttaaaggaagaatgctgtacattagccaagaaactggaacaaatctctcaaaaaaccagatctgaaatagctcaactcagtcaagaaaaaaggtatacatatgataaattgggaaagttacagagaagaaatgaagaattggaggaacagtgtgtccagcatgggagagtacatgagacgatgaagcaaaggctaaggcagctggataagcacagccaggccacagcccagcagctggtgcagctcctcagcaagcagaaccagcttctcctggagaggcagagcctgtcggaagaggtggaccggctgcggacccagttacccagcatgccacaatctgattgctgacctggatggaacagagtgaaataaatgatttacaaagagatatttacattcatctggtttagacttaatatgccacaacgcaccacgaccttcccagggtgacaccgcctcagcctgcagtggggctggtcctcatcaacgcgggcgctgtccccgcacgcagtcgggctggagctggagtctgactctagctgagcagagctcctggtgtatgttttcagaaatggcttgaagttatgtgtttaaatctgctcattcgtatgctaggttatacatatgattttcaataaatgaactttttaaagaaaaaaaaaaa

SEQ ID NO: 135 - DNA, 525 bp, HOMO SAPIENS
  misc_feature (72)..(72): n is a, c, g, or t
  misc_feature (78)..(80): n is a, c, g, or t
  misc_feature (132)..(133): n is a, c, g, or t
  misc_feature (159)..(159): n is a, c, g, or t
  misc_feature (262)..(262): n is a, c, g, or t
  misc_feature (265)..(265): n is a, c, g, or t
gttggtttggcccatcaggactaatattacccctcatatcctagtctctcttgtaggcagaagccttgcctnaacccnnngctgcttagctcacattctgtcttgctttttctgtttttttttttttttttnnggagggggttcaaatataaaatatangggaaagaaatataatgaacctccatgtacccaacacccggattaaacagttatctcaattttgccagacttgtttcatctacttcaatctccctaaacattnacntttgtacaggaaaaactggataaatacctaattctccaccctatctcccattttaagtcatttttcagaataatgagttagtgactagtaacctccactgtagtgaccaatagttttttttcctgaatatcgtaatgagctcatagattattgtttgcatttgagcccattgtagtcactattaattgttttagatgctcatattgtctcaggttaataagtatctcttcaagttgactcccatggccttttgacgtgat

SEQ ID NO: 136 - DNA, 2349 bp, HOMO SAPIENS
gtgctgtgggattcgcggacccctctggccgcgctgtggctgtttcaccgctccccggctgggacttggagtcccttatctttccctggtttggtacatgacccggaagcctcggctggccgttgcgtcatccatggcgccggcgcagagcgagaaggaggtgggaacgccgtgaagcaagagcggtcggcagagcggggaggcgaactgcagcagagttcttgctttccggcaggtgatggcgccccccgcggcctagaggtccagcgcccgccgcgagcagcggacagtcctcctgttgtgtccgaccgagagtcctggtgactttgaacatgctggtgccgctagccaagctgtcctgcctggcatatcagtgctttcatgccttaaaaattaagaaaaattatctacctctatgtgctacaagatggtcttcaacttctactgtgcctcgaattactacccattatactatttatccccgggataaggacaagagatgggaaggagtgaacatggaaaggtttgcagaagaagcagatgttgtaatagttggtgcaggccctgcagggctctctgcagctgttcgtctaaaacagttggctgtggcacatgaaaaggacatccgtgtgtgtctagtggagaaagctgcccagataggagctcatactctctcaggggcttgccttgatccaggtgcttttaaagaactcttcccagactggaaagagaagggggctccacttaacactcctgtaacagaagacagatttggaattttaacagagaaatacagaattcctgtgccaattcttccagggcttccaatgaataatcatggcaattacattgtacgcttgggacatttagtgagctggatgggcgaacaagcagaagcccttggtgttgaagtataccctggttatgcagctgctgaggtcctttttcatgatgatggtagtgtaaaaggaattgccactaacgatgtagggatacaaaaggatggtgcaccaaaggcaacatttgagagaggactggaactacatgctaaagtcacaatttttgcagaaggttgccatggacatctagccaagcaactatataagaagtttgatttgagagcaaattgtgaacctcaaacctacgggattggactgaaggagttatgggttattgatgaaaagaactggaaacctgggagagtagatcacactgttggttggcccttggacagacatacctatggaggatctttcctctatcatttgaatgaaggtgaacccctagtagctcttggtcttgtggttggtctagactatcagaatccatacctgagtccatttagagagttccaaaggtggaaacaccatcctagcattcggccaaccttggaaggtggaaaaaggattgcatacggagccagagctctcaatgaaggtggctttcagtctataccaaaactcacctttcctggtggtttactaattggttgtagtcctggttttatgaatgttcccaagatcaaaggtactcacacagcaatgaaaagtggaattttagcagcagaatctatttttaatcaactaactagtgaaaatctccaatcaaagacaataggactccatgtaactgaatatgaggacaatttgaagaactcatgggtatggaaagagctatattctgttagaaatataagaccgtcctgccacggagtactgggtgtatatggagggatgatttacactggaatcttttactggatattgagaggaatggagccgtggactctgaaacataaaggttctgactttgaacggctcaagccagccaaggattgcacacctattgagtatccaaaacccgatggacagatcagttttgacctcttgtcatctgtggctctgagtggtactaatcatgaacatgaccagccggcacacttaaccttaagggatgacagtatacctgtaaatagaaatctgtcgatatatgatgggcccgagcagcgattctgtcctgcaggagtttatgaatttgtacctgtggaacaaggtgatggatttcggttacagataaatgctcagaactgtgtacattgtaaaacatgtgatattaaagatccaagtcagaatattaactgggtggtacctgaaggtggaggaggacctgcttacaatggaatgtaaactgcagctagccagtttctttcaagtatggcaagctaacgttaaaatgtttagagattaacagatttcagaatgtctttctgcatattactgaacagaatagtcacaaaatgattatcaaataaaaattttatactatatgtaagattgtcccataaagaaa

SEQ ID NO: 137 - DNA, 3844 bp, HOMO SAPIENS
agcactcattggacttcagcatgactactcagttgccagcttacgtggcaattttgcttttctatgtctcaagagccagctgccaggacactttcactgcagctgtttatgagcatgcagcgatattgcccaatgccaccctaacaccagtgtctcgtgaggaggctttggcattaatgaatcggaatctggacattttggaaggagcgatcacatcagcagcagatcagggtgcgcatattattgtgactccagaagatgctatttatggctggaacttcaacagggactctctctacccatatttggaggacatcccagaccctgaagtaaactggatcccctgtaataatcgtaacagatttggccagaccccagtacaagaaagactcagctgcctggccaagaacaactctatctatgttgtggcaaatattggggacaagaagccatgcgataccagtgatcctcagtgtccccctgatggccgttaccaatacaacactgatgtggtatttgattctcaaggaaaactggtggcacgctaccataagcaaaaccttttcatgggtgaaaatcaattcaatgtacccaaggagcctgagattgtgactttcaataccacctttggaagttttggcattttcacatgctttgatatactcttccatgatcctgctgttaccttggtgaaagatttccacgtggacaccatagtattcccaacagcttggatgaatgttttgccacatttgtcagctgttgaattccactcagcttgggctatgggcatgagggtcaatttccttgcatccaacatacattacccctcaaagaaaatgacaggaagtggcatctatgcacccaattcttcaagagcatttcattatgatatgaagacagaagagggaaaactcctcctctcgcaactggattcccacccatcccattctgcagtggtgaactggacttcctatgccagcagtatagaagcgctctcatcaggaaacaaggaatttaaaggcactgtctttttcgatgaattcacttttgtgaagctcacaggagttgcaggaaattatacagtttgtcagaaagatctctgctgtcatttaagctacaaaatgtctgagaacataccaaatgaagtgtacgctctaggggcatttgacggactgcacactgtggaagggcgctattatctacagatttgtaccctgttgaaatgtaaaacgactaatttaaacacttgcggtgactcagctgaaacagcttctaccaggtttgaaatgttctccctcagtggcactttcggaacccagtatgtctttcctgaggtgttgctgagtgaaaatcagcttgcacctggagaatttcaggtgtcaactgacggacgcttgtttagtctgaagccaacatccggacctgtcttaacagtaactctgtttgggaggttgtatgagaaggactgggcatcaaatgcttcatcaggcctcacagcacaagcaagaataataatgctaatagttatagcacctattgtatgctcattaagttggtagaatattgactttttctcttttttatttgggataatttaaaaaatgatggatgagaaaagaaagattggtccgggttaatattatcctctagtataagtgaattactagtttctctttatttagacaaacacacacacaccagataatataaacttaataaattatctgttaatgtagattttatttaaaaaactatatttgaacattggtctttcttggacgtgagctaattatatcaaataagtatcacaaatcttttacgcagaagaaataaaaactacgggtagaaaacataagaactatcataaaatttacttacaaggaggctgctcttgttaccacttttattatattacgtatcacttattcagctctgctgaaaatttccaatgactttgtttgtttgctctttttgttttttacctaaacaatacattttgattctcttgtgggttgataatgtctccccaaaatttacatgttgaagcacctcagaatgtgactgtatttggagacagggtctttaaagaggtaaaataaggtcattaggatagaccctaattcaatatgactgatgatcataaaagaagaggcgagtagggcacaacaggcacaaagggagaccataaggagacacagaggaaggacaactctttacaagctaagaagagagggcctcagaagaaaccaaccctgccaacaccttgatcttggacttccagcctccaaaactatgagaaataaatttctattgtttaagtcacccagtccatggtactttgttaggcagccctggcaaatgaatcaaagacccattcctgttcctctccccaccactactgttttctactgtaatctgaagcttcaacaaaaggcttacctggtaagaatattcagctggtctgggtcctcaagactccaatagacactcttagagaaggattgctgatggattgatagtgaaaccattagatcattgaattcctctggaattagaaaaccagagagtcccattttaagaaattagatatttaatatagcattgtgtgttctattttagtaacagcagaatctcttgacattacacaactcagtgaaacaacatcatttaagccaaaatatctcccaactgactgatagactctgagcactaatatcatagtgctgtgatgatggacaattacatagtaccgataacagccatgcactgtgcaaagcatgcccttctgcacaggagagcaaggcacttgcagtagtgatctatgccagcaaaacatcattttgagacaaacatttttgtggcagatgtttttcctaaaaagtactatatcatccaagaaatatttgagtaaaatcccttgttcttttgggtgacattaactgacatttgctttttttcaagacctaatagaaaataagaaagcccataatgtatttagaaacaggaatcctcagagcaattctctgtattctcatataatttcaatgtaaaacagaaaacatattgatgtgttggtgataggcttgaattattaaaaacttcaaaaacatcctaagtgtttcttttttgctcaacgttgtcaactatagtaggtctcccttgtggtgtaatgaattgcccccaaactattatcttaaaacaacaaacatttattatcttatagcatttctgagggtcaggatctgggactggcttagtggagttgttctggatcagggcctttggaaagttgtagttaacttgtccccagggctgccatcatctcaaggctcgggtggggctggagaaaatctgcttctcagctcactcacggcggttgccaggcctccattctttaggatgctagaaaaactttcataaaatgtcatctggcttctcctagagcaatgatactgagagagaaagcacatgagagaaagagcgagggaacttggatgtaagccacagtctttgaaaacctaatcacagaagtgacatctcttcttccacatgatgttggtcacatggaccaacaatggcacaacgtggacagaatcaaacagagttgagaatatcaggaggtggggcttcatgggggccattttggatgctatcatagtgaatatatgtatttatatttatatctgtatatattgcaatgtaatttaaaaaataggattgttttccttttctttttgctatatgtgatatgtatttcaaaatacactcccaatagttacgtctgaaaagcactacactaaaaaactttctatacattgaataattaaattaaataatctaa

SEQ ID NO: 138 - DNA, 441 bp, HOMO SAPIENS
ttgccctttgtgatctgcttatgtatttacactactgcttcatggaaaaaaattaaatttcatggagttctcttcaaggggagaattttatttttatttttttgctttagttagctaagtagatgcatgctttgctaaatggaaatgtaagaataattgtgtttttatttggggatgtggatgaagatgaaagaagaaaacaagcaaaatatatttagtgagtgggaaaataaaagcagaacagtttctgatggtagaagaagaggctgctgtgttaatgctggactgtattgccactaaacaagcagtttgaaggctgtgatcgcttgtattcactttgtaactcgggtactgtttgtggagcacttctgtgatcttaggttattatgaagtgttttctgccaaagactatatataaccccttcaaaagtaccatatctg

SEQ ID NO: 139 - DNA, 3498 bp, HOMO SAPIENS
gctccgcccaacccgcgcgcgagcctgggcggggagggggagccaggaagctgcgagcgcgctggggagcgcagctgcaggcgttggggcggcaggagccgcggagccggcgctgagaggggctgcggccggagcgggcggctgagacaaaggcgacgactatctgttatagtccctgggtcaagacaacaatttttataccttcgtcgtggttcagaaaggagtctctgtagaaccagaagcaaagaaaggaaacaatccaaatttttctttattaaatcgactgtgtaagatacttgacttccaggaacaaaaacacggtgaaataataaaatttcatcttggcatcactggacatcatcgtattgaggagcgtatttttggaacttcccgagttgagatttggaaccttcattggtgctcatttactgtggactgtaagcatgagtgaattctggttgtgtttcaactgctgtattgcagaacagcctcagcctaaaaggcgacggcggattgacagaagtatgattggagagcccacaaactttgtgcatacagctcatgttggatcaggagacctgttcagtggaatgaattcagttagctccattcagaaccaaatgcagtccaagggaggttatggaggtggaatgcctgccaatgtccagatgcagctcgtggatacgaaggcgggatagccctggtcctttctccaaagtgtgatggcaccttgtccaccctgtcgtgattattccagtgagatgttactgttctgctctgaagaagatactgtcagacgaatcctgcatttccttcagctggcatgcatgcctttggactcatggacagagttctttggattgtcactgaattttcaatgtttaatcagtatggatctgatcttcgcatgatcttttttgtgaatgctaacaccattttgcagttttttttttctattttaaacatttttcttttcactgccgaccccctgccttacgattttattggaaagcaaggacctgctattatttgttaatttgccatcatttatgtatattttggaaggtatgagacccacaagcacaatgatcatttttatttgtttgtttgtttgaaacttcagcagaatagatatctgcatgctttatgaagttgttgcttcggtaagagcccatgggatgccagaaattaacatttctttgctgccatgggctgatgatgctgctattagataaagtttagctgtggcaccaagtcacatcattttcatagaaaaagattacttgtagcttattttagaagtatgaccttttggtctgtttgattgattgattagaattgcaataaaagaaaagcttgcattcataaggcattcattctgttgtaaatgttcaatatatttattttgagagcaaggacctgtggttgtaaacaggtgtggttacaggtgtggttatgtatctgagtgttgcggtcatactctcctccagtccaatcctgagcatcttcatcttattaattagctgttcgtttctttgtgcactcattcttttatttttacttctttttaatgttatggtatccagttgtttccagtagcagtttcttgaacttctggcctgtactactaactgcagacctccagagtcactggcctttctgtgctctacatattattttaggggccacatcagttgccaagagcaacatacataccgacctggctgaattattgccagtgaaaacaacctgtacgaagcctttgctcaggttctaaaatatgtttgtccttgcacgaattttgtatatttcaaatatttctgtaaaggtttcttcttttctgttagagtgtggtgttaagccagagtcagtggtttgtgttctcattaaaatgtttgtttaaatcctatgtccaattcaagcctatctaactacatttggtaggattaacatttcatataacaaatggggcttaattaaaaactttaacttggaataaaggaacagggatcactttatcttctgccttcatttaccttagtccaagattcttgcaaaacaggcaactgaacaaacattaggtttatgtaggtaaaatgtgaaagcatttctcctccactttttaaaatttaatttacccagtacagcggggcaccagattacttgatctttgtattttgcagttttgagcctttgtgtcaatcccaagcacagagaggatctgccaaggaaaaacatttgcatcttcggagtagacattttgcagtttgtttaataacaacttctaaagtaagttgaattcatccattgtcactgattcaccaagtggatgttgcattgtggaatttgcctgagtactgttgtcattctgctcagccaggcacggtcagtttcttggccagggacattgctatgtgctgtgtgcaagctctttagaagagagattggattttcttggcattatcagcactcatgctatttagtctacttctattttgactgactctttaaattagtacaatttttctacttgtcatataactcctggaacaatagtacgggaagccgtgatccttttccctgactcatgattttagtctttttccaaatcgctgttttttttttttttttttttttttttgctgctccaacgaccagcatgtgttggagcagatctccatggtaagccaaaagtggacttgtcagcctataactactctgcagctgccactaactctacaggcacagtaactacactttatacaggagcacatgccaaagtgcctgggaggtgccaataaaatcaagaaataagaaaactacaaaaaaagatacggtattaaccttggacataattttttttagggaggcagctttcccacttttataaagggggttgtaaatctcaagaggtcatttgttccccatagcagcatatctcatttttaaattgaagcgaattaaataggattttactactcaacattcattatactgttaatctttgctgaaatatatgctaacaaatgttaagcaagggaaactgaagacttagtcatgtggattgttagcagtgatctgcattctgtaaaagaggtactttcccatgatgtaggcatgaagtggtgccagtaagcgtagagcggaaatgttgactttagttaacattgggtttagcatttccagtgcagcattatcagtgggcctttaaaaatacttcgtaagtacattagctttcactttgttgttaaattatagcagactcattatagagaacaagtttgccttgattttgtttaaaatgacttctgctaagcacccagaagataaaattgacatatttttataatataagcatactttttttgtacattgtgttcattcttgaataaaatgagttctgtgttggcttgtagatactaaaaagaaagtattgattttgattcaataaatgttttctttcaatcctggttggcctttcctttaaaaaaaaaaaaa

SEQ ID NO: 140 - DNA, 3748 bp, HOMO SAPIENS
ggctgaggcggaggagccgccgcttctgacctcgctctggctccggtgcgcgcggctgagcgcgtgcgaggccccgcgcgtcgggcaggggcggcggcggccactgcgcgccgccctgaggagcgccccagcggcggcgcgactgcggctgaggagagagccggctccgggcctccgcgtcctcctgctcccccggccccccgcctcctcgggggggcggcggcggcgatgttctcggtcctctcgtacgggcggctggtggcccgcgccgtgctcggcggcctctcgcagaccgaccccagggccggcggcggcggcggcggcgactacggactggtgacggccggctgcggcttcgggaaggacttccgtaagggcctcctcaagaagggcgcgtgctacggggacgacgcgtgcttcgtggcccggcaccgttccgcggacgtgctcggggttgcagatggtgtaggaggctggagagactatggagttgatccatctcaattctcagggactttaatgcggacgtgtgaacgtttagtaaaagaaggacggttcgtacctagtaatcccattggaattctcaccacaagctactgtgagttgctgcaaaataaagtccctttgctcggtagcagcaccgcctgcattgtggtgctggacagaaccagccaccgcttacacacagcaaacctgggcgattcaggcttcctggttgtcaggggtggtgaagtcgtgcaccgatcagatgagcagcagcattacttcaacactccattccagctctcaatcgctccccctgaagccgagggagtcgtcttgagcgacagtccggatgctgctgatagcacgtctttcgatgtccagctaggagacattatcctgacggcaacagatggactctttgacaacatgcctgattatatgattcttcaggagctaaaaaagttaaagaattcaaattatgagagtatacaacagactgccagaagcattgctgagcaagctcatgagctggcctatgacccaaattatatgtcaccttttgcacagtttgcatgtgacaatggattgaatgtgagaggtggaaagccagatgacatcaccgtccttctttcaatagtggctgagtatacagactagctgaggtgtcaagtcctgcctttcctttcatcatcccaaatttcccctgccatgtgtgctgatcctgctggcaggaccacatttctttgccactgatctcaatggccagtgatgtaagtcttttgcctgtcttcttgagactcgttgagatctttgttgagaaccactactatcattcactagctcatatctgccggcagcaattgaagagatccaatatttgaagattggccttcatttctcgatgttctttccatgatggggatggaggtgttcagtgccaccgtggctgttacttttcaaagtagttgaagtattgaaaatgagtaatgttggtaaagtgaattcaaaatcctagtatgctaaagggatggtacaagtctaacacaaattgtacgtaatgatacatctactagaaacatacattattcatcaaaagaaatgttacatgtgtactccacaggcatagtctttgttatgatgattggtgtggctttatgtctttgttataaactcctatttttcaggggcttatgattctgctctaaaacattgctctgggttatacagttttgatcccaaaagcttttttgttacaaatcgggagaaaaatccattttagttctatggatggaaatatttcatgcttttaaaaagatgtttgtgttcctgtggttaaagttttggcagtttattgattagtccaaatcacaggctaaggcctgatctccaggaggggtaggggagacactttaccagtatttttttatggaaataatactcaaggttgtaaaacccctcaaagcctagaaatttaattgttatggctgaaattcctcctagttgtctgatagaatgcccctgaatgggaactctaggtcccaaggcctgaagggttgagaacagacagctgtaactttgaattttgttggctttcagtggtcatgctacctacccatactcgtactctcagaccttttattagtagccttgctttctatagagcatgcaccaaatccagtgagtccatgtggagagagcactgtgtgcgcagcggcagcagcacagacgtccatgaggaaaactcccagtgatgatctgacatttacaattaccccacatggaaatttaggggtttctgaatcaagcttaatgtttacagtttccaaatagccattttgcagtgtatagtttccttacaaaactaccccgcattcagttttcacattatctgcaagctgaaacttatttttaagttttgtgtacaagttgactgctgtaaagatatatatttttgggtcagtttttttccttcattaacttggtggtagaaaaaaatatatacttagaaatccttaaattaaagccatgttttatatataagtcaggtaacattggtgtatagatgagaatgcaattaaacctgatgagaatctacttgagaatatagaaagtctttctctaaaggagatactgactccctggtttattgcattaaaatttatgtttgaggttacctcaacttgttttaaaagattttgttttgtgaatttgtactgtatatttgagtaactgtcaggcttttatttaaaattgtttaacatgtaccatgtacatgtcattactatatttcaatgcatcatgcttgtaacaggcatttcatttataataagaatgagttattcatttgtaagccgttcagtaatttatctactattcctaaattggcataatgttagataatctattttgaatcacctttaattacatgtcagaatgccttaactaccctaacttgacaaaacagaattctttggtagacgcggtgggggcggggtggggggtctggacggagtctctatttaaggagaaatcatcatgctatgataaaacacagaagcatgagtggcaagtggcggggtatttattttgcacaaactatttgcagtctctgtgtatttaaaaagtaaagaaagttgcatccagaagggttttgttagaatgaatacatttatattaggactgacaacttcagctcttttgtttaggttttcaattatttttggtaagagtatgtagccttatgatctggatatattttgcattcattttccaacgcctacatttaattcctggtaagagcagtgctcgtcaagtttctggtttttctctgctctcatttaacccgtcaaacacaatctttgtaaagctagattggtggtgttttatacaacttatttactcagcttacctttttgagaaacgattgttagaaattgacgatgtgtttgttccagtgatactgaaagtagtgggggcaagaattgagtttcacagtggaattggctttggatctggcctatagattagtgacataaaatattttctctattttcccctgttctttttgtgttatgcacttaattttatgactgccgggggggtcagctggagtgctgcttaacaagtatctctcctactctcagtggtcagaggctgtgttggacccatagtagaattttccaggtcacagacccaagcttccatgggttgttactgtgctgtaccacttggtgggtctgattctgaacctgatgtgtgtgtt

SEQ ID NO: 141 - DNA, 863 bp, HOMO SAPIENS
cccattacttcccgttttctcgatctgctgctcgtctcaggctcgtagttcgccttcaacatgccggaaccagcgaagtccgctcccgcgcccaagaagggctcgaagaaagccgtgactaaggcgcagaagaaggacggcaagaagcgcaagcgcagccgcaaggagagctactccgtatacgtgtacaaggtgctgaagcaggtccaccccgacaccggcatctcctctaaggccatgggaatcatgaactccttcgtcaacgacatcttcgaacgcatcgcgggtgaggcttcccgcctggcgcattacaacaagcgctcgaccatcacctccagggagatccagacggccgtgcgcctgctgctgcccggggagttggccaagcacgccgtgtccgagggcaccaaggccgtcaccaagtacaccagcgctaagtaaacttgccaaggagggactttctctggaatttcctgatatgaccaagaaagcttcttatcaaaagaagcacaattgccttcggttacctcattatctactgcagaaaagaagacgagaatgcaaccatacctagatggacttttccacaagctaaagctggcctcttgatctcattcagattccaaagagaatcatttacaagttaatttctgtctccttggtccattccttctctctaataatcatttactgttcctcaaagaattgtctacattacccatctcctcttttgcctctgagaaagagtatataagcttctgtaccccactggggggttggggtaatattctgtggtcctcagccctgtaccttaataaatttgtatgccttttctcttaaaaaaaaaaaaaaaaaaaaaaaaa

SEQ ID NO: 142 - DNA, 438 bp, HOMO SAPIENS
  misc_feature (60)..(64): n is a, c, g, or t
  misc_feature (72)..(72): n is a, c, g, or t
taccatttgctccgatgcctatagctcagtattaagcagacagcaggtagatgaacatgnnnnnggggtctntgctcacaggctttgtaacatcatcattctttctgggctgtctctcttttccagatgcctatgatttggtatttctcctggccagagagtagcactggaaacattgaacacaaagtattctaacccttattgctcaatgtgtttttccagagcagcccaaaaggttatgctgggtttcatgagctgcagaggatgactgactggtgccacctagaaagacaaacagcagaaactgcagagcttggactgagctcagacaaaaatctctgctgcttgtacccagcttgaatattatggccaacacttgaagaatagaaagcatcacttaaaacattttaattatccccacatgtaacatgggcccta

SEQ ID NO: 143 - DNA, 360 bp, HOMO SAPIENS
tttccctggcttgcccaattatcaagggaaaatttcagctgaacacggggaacccagtctttgacactcctgtgtgcagtgtggagcagcgtgcactgtctgagtctccatagtgaggaatggtcttccctggggcatcaccctagaaggatgggctcaaagtcgccctccacgtgggtgcacaggagcccagattctcaagccccagttgcagaattaggctgatggttttacaaaagagtcctcctaaaagtccatcactaagttttgtttggttagcaacccttgccacatgatgtagtacttagctataattttatttttattcaaggccaaatcttatctggtgtccatgccttc

SEQ ID NO: 144 - DNA, 8457 bp, HOMO SAPIENS
gacgctcctcccggagagtagtgagacccctggtgcggggcgattggcggcgggagcgatgagtggcagccgcacggcccaacgggagctgtgcgtgggccgcggggcggggccagggcgggtgcgcggcggcggcggggtggctgggccggcggcggcggcggtacgaggcgcgcgctcggggtcccggtcgcgaggaggaggaggatgtggcgcgcggaggggaaatggctgccgaaaacaagccggaagagcgtttcccaaagtgtattctgcggaactagcacctactgtgttctcaacaccgtgccacctatagaagatgatcatgggaacagcaatagtagtcatgtaaaaatctttttaccgaaaaagctgcttgaatgtctgccgaaatgttcaagtttaccaaaagagaggcaccgctggaacactaatgaggaaattgcagcttatttaataacatttgagaaacacgaagaatggctaaccacctcccctaagacaagaccacagaatggctcaatgatactctacaacaggaagaaagtgaaatacaggaaagatgggtattgctggaaaaagaggaaagatgggaaaacgaccagagaggaccacatgaaactcaaggtccagggagtggagtgcttgtacggctgctatgtccattcctccatcatccccaccttccaccggaggtgctactggctccttcagaaccccgacatcgtcctggtgcactacctgaacgtgccggccatcgaggactgcggcaagccttgcggccccatcctctgctccatcaacaccgacaagaaggagtgggcgaaatggacgaaagaagagctcatcgggcagctgaaacccatgttccatggcatcaagtggacctgcagcaatgggaacagcagctcaggcttctcggtggaacagctggtgcagcagatcctcgacagccaccagaccaagccccagccgcggacccacaactgcctctgcaccggcagcctgggagctggcggcagcgtgcatcacaagtgtaacagcgccaaacaccgcatcatctcgcccaaggtggagccacggacaggggggtacgggagccactcggaggtgcagcacaatgacgtgtcggagggcaagcacgagcacagccacagcaagggctccagccgtgagaagaggaacggcaaggtggccaagcccgtgctcctgcaccagagcagcaccgaggtctcctccaccaaccaggtggaagtccccgacaccacccagagctcccctgtgtccatcagcagcgggctcaacagcgacccggacatggtggacagcccggtggtcacaggtgtgtccggtatggcggtggcctctgtgatggggagcttgtcccagagcgccacggtgttcatgtcagaggtcaccaatgaggccgtgtacaccatgtcccccaccgctggccccaaccaccacctcctctcacctgacgcctctcagggcctcgtcctggccgtgagctctgatggccacaagttcgcctttcccaccacgggcagctcagagagcctgtccatgctgcccaccaacgtgtccgaagagctggtcctctccaccaccctcgacggtggccggaagattccagaaaccaccatgaactttgaccccgactgtttccttaataacccaaagcagggccagacgtacgggggtggaggcctgaaagccgagatggtcagctccaacatccggcactcgccacccggggagcggagcttcagctttaccaccgtcctcaccaaggagatcaagaccgaggacacctccttcgagcagcagatggccaaagaagcgtactcctcctccgcggcggctgtggcagccagctccctcaccctgaccgccggctccagcctcctgccgtcgggcggcggcctgagtcccagcaccaccctggagcagatggacttcagcgccatcgactccaacaaggactacacgtccagcttcagccagacgggccacagcccccacatccaccagaccccctccccgagcttcttcctgcaggacgccagcaaacccctccccgtcgagcagaacacccacagcagcctgagtgactctgggggcaccttcgtgatgcccacggtgaaaacggaggcctcgtcccaaaccagctcctgcagcggtcacgtggagacgcggatcgagtccacttcctccctccacctcatgcagttccaggccaacttccaggccatgacggcagaaggggaggtcaccatggagacctcgcaggcggcggaagggagcgaggtcctgctcaagtctggggagctgcaggcttgcagctctgagcactacctgcagccggagaccaacggggtaatccgaagcgccggcggcgtccccatcctcccgggcaacgtggtgcagggactctaccccgtggcccagcccagcctcggcaacgcctccaacatggagctcagcctggaccactttgacatctccttcagcaaccagttctccgacctgatcaacgacttcatctccgtggaggggggcagcagcaccatctatgggcaccagctggtgtcgggggacagcacggcgctctcacagtcagaggacggggcgcgggcccccttcacccaggcagagatgtgcctcccctgctgtagcccccagcagggtagcctgcagctgagcagctcggagggcggggccagcaccatggcctacatgcacgtcgccgaggtggtctcggccgcctcggcccagggcaccctaggcatgctgcagcagagcggacgggtgttcatggtgaccgactactccccagagtggtcttacccagagggaggagtgaaggtcctcatcacaggcccgtggcaagaagccagcaataactacagctgcctgtttgaccagatctcagtgcctgcatccctgattcagcctggggtgctgcgctgctactgcccagcccatgacactggtcttgtgaccctacaagttgccttcaacaaccagatcatctccaactcggtggtgtttgagtacaaagcccgggctctgcccacgctcccttcctcccagcacgactggctgtcgttggacgataaccagttcaggatgtccatcctggaacgactggagcagatggagaggaggatggccgagatgacggggtcccagcagcacaaacaggcgagcggaggcggcagcagtggaggcggcagcgggagcgggaatggagggagccaggcacagtgtgcttctgggactggggccttggggagctgctttgagagccgtgtggtcgtggtatgcgagaagatgatgagccgagcctgctgggcgaagtccaagcacttgatccactcaaagactttccgcggaatgaccctactccacctggccgctgcccagggctatgccaccctaatccagaccctcatcaaatggcgtacaaagcacgcggatagcattgacctggaactggaagttgaccccttgaatgtggaccacttctcctgtactcctctgatgtgggcgtgtgccctagggcacttggaagctgccgtcgtgctgtacaagtgggaccgtcgggccatctcgattcccgactctctaggaaggctgcctttgggaattgccaggtcacggggtcatgtgaaattagcagagtgtctggagcacctgcagagagatgagcaggctcagctgggacagaaccccagaatccactgtcctgcaagcgaagagcccagcacagagagctggatggcccagtggcacagcgaagccatcagctctccagaaatacccaagggagtcactgttattgcaagcaccaacccagagctgagaagacctcgttctgaaccctctaattactacagcagtgagagccacaaagattatccggctcccaaaaagcataaattgaaccctgagtacttccagacaaggcaggagaagctgcttcccactgcactgagtctggaagagccaaatatcaggaagcaaagccctagttctaagcagtctgtccccgagacactcagccccagtgaaggagtgagggacttcagccgggaactctcccctcccactccagagactgcagcatttcaagcctctggatctcagcctgtaggaaagtggaattccaaagatctttacattggtgtgtctacagtacaggtgactggaaatccgaaggggaccagtgtaggaaaggaggcagcaccttcacaggtgcgtccacgggaaccaatgagtgtcctgatgatggctaacagagaggtggtgaatacagagctggggtcctaccgtgatagtgcagaaaatgaagaatgcggccagcccatggatgacatacaggtgaacatgatgaccttggcagaacacattattgaagccacacctgaccgaatcaagcaggagaattttgtgcccatggagtcctcaggattggaaagaacagaccctgccaccattagcagtacaatgagctggctggccagttatctagcggatgctgactgccttcccagtgctgcccagatccgaagtgcatataacgagcctctaaccccttcttctaataccagcttgagccctgttggctctcccgtcagtgaaatcgctttcgagaaacctaaccttccctccgccgcggattggtcagaattcctgagtgcatctaccagtgagaaggtagagaatgagtttgctcagctcactctgtctgatcatgaacagagagaactctatgaggctgccaggcttgtccagacagctttccggaaatacaagggccgacccttgcgggaacagcaagaagtagctgctgctgttattcagcgttgttacagaaaatataaacagtacgcactttataaaaagatgacacaggctgccatccttatccagagcaaattccgaagttactatgaacaaaaaaaattccagcagagccgacgggctgctgtgctcatccaaaagtactaccgaagttataagaaatgtggcaaaagacggcaggctcgccggacggctgtgattgtacaacagaaactcaggagcagtttgctaaccaaaaagcaggatcaagctgctcgaaaaataatgaggtttcttcgccgctgtcgccacagccccctggtggaccataggctgtacaaaaggagtgaaagaattgaaaaaggccaaggaacttgaagacatacagcagcatcccttagcaatgtgacattgcttttcagactgttttcatttctgtttttagcagagacatgcaacaacaacacacacgcacacacgcacacacacacacgtacacacacatacaaaatccctctgcagttttggggagatcagctgcaggattttaacaggaatgttttggtcattgcatttgcactttcatggacaacttttaatttgatcagcaagacatcttggaactcaatcttctgttggatcacgggaaatcaagacacccaggaggaattgaaagaggcttcctcttctcaggaagaagccatttccttctcatatagggctgtattcaaacatcgtgtggaactgtacaaatatttataccaaaaatatagataagaaaaggtggggctatactagcaacaaaaaaagaatgctgttcctgcacctgccggttatttccaagaagctgaatctttgggactgattctcagtggagggcttagatcatacaaaaatctttattgggtccgtgtgttctcatttccttcactgtttatttttgtttgtttgtttgtttgttttaatctctacagcacatttaatgcaacttttgaaatctgcaggtttttaatgtcttgtggaaatttgcagaggggcaggtgtgtggtaaacgggtaatgcatgggaaataatgagaagcagctcacagagtttaaactattttcttgtccccaccaccttccaagaacctgcgagggtagtaatcatcttgtcccctttttcatgttcagcactttaatttttttgccttactttcatgtgcaatgagaattacttaagaattggtaacgcatgtagccttttttagtaaccttggaagctgtagtaattctaaggaatcatgaaccttgcctggacatttgccacctaaacgatcagtgtggtgctgcgttctggccagtaaattccatgtttttggctatatctcatccaaactgagcagtttctgtgtatatatagaaggtagaaatgaaaagtgagaaaatatttgaaagggattatattaattgctaaatattttattcacaaaggtcaataacatggcaagataaaattatttgtatagttttgtctgaatgagcgagaaaaatgtggatgtactgtttgtatatattgtatatattaaaacagagatatgtgcatgaaatcaagaaaaaagaaatgaacaaaagcaaagcattagtggctatggtctgtaaaatgaaacaaaaaaactttatttcactataagagtactttattttaaatgttctttaggagaacattttgctaaagcatgactaaactgcaaaaaaaaaaaaagagctactgtatttagacttaggaaaaaaggcagagtaacattacttaaaaaaaaaaggatatgtttacatttaattttggctaccaggagtttagtttattttatttaaaatttttttgccaatggtgccaagtaatgtgaatgctaatactgcttaagaaaattaagttacttttgcaaaacagataatcataagatgaatcagtatgtagcttaacaccatccactcactccaacaaagaacacttagaatgataaaaaaaaaaaaaaaaaacctgacaaaagaaatagtatgaaaagtagaaaaatgtcacgtttccatatctcctgctggaaatcagaaaatataataaaattgcacaaaaaaaaaaatgaaaaagatgcagactggtcttttagagacggcatggtatattactatttccacataatgaggagccaaagaaatctgatgtttttaacaattaaactgctaatgttaaattgagagaataaagttcgtatttgctgatgccagtttaaaattcccaggttacgtctgaggatcagttggtgtaaagctgagatgttttttcttggttctggctgccaactgtgagttaaaactcaaggcttgttgtgaagcctaaaaatattcacaaataagcttttaaactggtgtctttggaaggaaggtagatacaaaaagattgtggtaaaaactggggtcagtgctcttggtgccttttctataattgtacttgttttttaattacttcctttcactgccaacctcgaattactgtacagtatatgtctttctgcttgtgatcagctttgacaacagtgacagccccacaactagtagccacctgtacatttgtaaactgacctgactccattttgtttttaaatgtgtgggttatgttgcagctgttgcagtcccccagatacctattattttacacaatttgacctataggaggacactgagtaatttacaaacacaactgcattcataaatgggaatagaacgtgaaagccagctctttcagaatatcctctattaatactgaatttagatatctttattccatttattatggtacaaataactgatgttttaaccagagtaatgacctcagtggatttgctttaaccctcacattttttttttaatgtttcacatgttacattattagctgaatacgttagaaaatgacagatggtagagacttccatagaattaagagggttctcatggaggggataggaagtaggtttaaagcctaccagtgtaacctaccagtacaactgtgaatcctaggcgaggcaaaaatgcacttccactgaaacgaagcatttctgaccgctttttcttggttatgaatcttaatttcgaatataagatgataggtaagcgcagctttcttggataatctgaattcccaagtgccaggagtaggatttcattataaaattaatagctaatcttattctatctcctgaagatttaattgctattgttacccattcgaaatcagctgtactgtgtgaacgaaataaagacaataatacgaacccctctctggctgcacggtcgcttatggcagttccacacagtagttggcgcccaatggggggtccctgagacttgcatgtaaaactagtctagatgtcttctttttttgtaagttttatttttgtaattgtgcatgtaaagcatcattgaatcaatggatctgttgaagaactcagctgctggaaaccatgcaaaatgttttgaattgcccttaaaatatggaaaatgttttctgaatgctttatattctttctgctgtaaattaaaaatgaagaaaatttccccaaaaaaaaaaaaaaaa

SEQ ID NO: 145 - DNA, 1563 bp, HOMO SAPIENS
ccgcagcggactgccctttcccaagatggcgtcgaagataggttcgagacggtggatgttgcagctgatcatgcagttgggttcggtgctgctcacacgctgccccttttggggctgcttcagccagctcatgctgtacgctgagagggctgaggcacgccggaagcccgacatcccagtgccttacctgtatttcgacatgggggcagccgtgctgtgcgctagtttcatgtcctttggcgtgaagcggcgctggttcgcgctgggggccgcactccaattggccattagcacctacgccgcctacatcgggggctacgtccactacggggactggctgaaggtccgtatgtactcgcgcacagttgccatcatcggcggctttcttgtgttggccagcggtgctggggagctgtaccgccggaaacctcgcagccgctccctgcagtccaccggccaggtgttcctgggtatctacctcatctgtgtggcctactcactgcagcacagcaaggaggaccggctggcgtatctgaaccatctcccaggaggggagctgatgatccagctgttcttcgtgctgtatggcatcctggccctggcctttctgtcaggctactacgtgaccctcgctgcccagatcctggctgtactgctgccccctgtcatgctgctcattgatggcaatgttgcttactggcacaacacgcggcgtgttgagttctggaaccagatgaagctccttggagagagtgtgggcatcttcggaactgctgtcatcctggccactgatggctgagttttatggcaagaggctgagatgggcacagggagccactgagggtcaccctgccttcctccttgctggcccagctgctgtttatttatgctttttggtctgtttgtttgatcttttgcttttttaaaattgttttttgcagttaagaggcagctcatttgtccaaatttctgggctcagcgcttgggagggcaggagccctggcactaatgctgtacaggtttttttcctgttaggagagctgaggccagctgcccactgagtctcctgtccctgagaagggagtatggcagggctgggatgcggctactgagagtgggagagtgggagacagaggaaggaagatggagattggaagtgagcaaatgtgaaaaattcctctttgaacctggcagatgcagctaggctctgcagtgctgtttggagactgtgagagggagtgtgtgtgttgacacatgtggatcaggcccaggaagggcacaggggctgagcactacagaagtcacatgggttctcagggtatgccaggggcagaaacagtaccggctctctgtcactcaccttgagagtagagcagaccctgttctgctctgggctgtgaaggggtggagcaggcagtggccagctttgcccttcctgctgtctctgtttctagctccatggttggcctggtgggggtggagttccctcccaaacaccagaccacacagtcctccaaaaataaacattttatatagacaaaaaaaaaaaaaaaaaaaaaaaaa

SEQ ID NO: 146 - DNA, 11957 bp, HOMO SAPIENS
ctctttacacagaacagtttaacttttgtgcttctgggcagaggtatggtccttgggacagttctccttccacctaatagttatggcagagatcaggacacttcactttgctgcctgtgcactgaggcctcagaatctgctctacccgacttaacagatcactttgccagctgtgtggaggatggatttgagggagacaagactggaggcagtagtccagaagctttgcatcgtccctatggttgtgatgttgaaccccaggcactaaatgaggctatcaggtggagctccaaggagaacttgctcggagccactgagagtgaccctaatctcttcgttgcactttatgattttgtagcaagtggtgataacacactcagcatcactaaaggtgaaaagctacgagtccttggttacaaccagaatggtgagtggagtgaagttcgctctaagaatgggcagggctgggtgccaagcaactacatcaccccagtgaacagcctggaaaaacactcctggtaccatggacctgtgtcacgcagtgcagctgagtatctgctcagcagtctaatcaatggcagcttcctggtgcgagaaagtgagagtagccctgggcagctgtccatctcgctcaggtacgagggacgtgtgtatcactacaggatcaataccactgcagatggcaaggtgtatgtgactgctgagagccgcttcagcaccttggcagagcttgtacaccatcactccacagtggctgatgggctggtgacaacattacactacccagcacccaagtgtaataagcctacagtctatggtgtgtcccccatccacgacaaatgggaaatggagcgaacagatattaccatgaagcacaaacttgggggcggtcagtatggagaggtttacgttggcgtctggaagaaatacagccttacagttgctgtgaaaacattgaaggaagataccatggaggtagaagaattcctgaaagaagctgcagtaatgaaggaaatcaagcatcctaatctggtacaacttttaggtgtgtgtactttggagccaccattttacattgtgactgaatacatgccatacgggaatttgctggattacctccgagaatgcaaccgagaagaggtgactgcagttgtgctgctctacatggccactcagatttcttctgcaatggagtacttagagaagaagaatttcatccatagagatcttgcagctcgtaactgcctagtgggagaaaaccatgtggtaaaagtggctgactttggcttaagtagattgatgactggagacacttatactgctcatgctggagccaaatttcctattaagtggacagcaccagagagtcttgcctacaataccttctcaattaaatctgacgtctgggcttttggggtattgttgtgggaaattgctacctatggaatgtcaccatatccaggtattgacctgtctcaggtctatgacctactagaaaaaggatatcgaatggaacagcctgagggatgcccccctaaggtttatgaacttatgagagcatgctggaagtggagccctgccgataggccctcttttgctgaaacacaccaagcttttgaaaccatgttccatgactccagcatttctgaagaggtagctgaggagcttgggagagccgcctcctcgtcatctgttgttccatacctgccccggctacctatacttccttccaagactcggacactgaagaaacaggtggagaacaaggagaacattgaaggggcacaagatgccacagaaaattctgcttccagtttagcaccagggttcatcagaggtgcacaggcctctagtggatccccagcactgcctcgaaagcaaagagacaagtcacccagcagcctcttggaagatgccaaagagacatgcttcaccagggataggaaggggggcttcttcagctccttcatgaagaagagaaatgctcctacaccccccaaacgcagcagctccttccgagaaatggagaatcagccccataagaaatacgaactcacgggtaacttctcatctgttgcttctctacagcatgctgatgggttctctttcactcctgcccagcaagaggcgaatctggtgccacccaagtgctatggggggagctttgcacagaggaacctctgtaatgacgacggtggtgggggtgggggcagtggcactgctgggggtgggtggtctggcatcacaggcttctttacaccacgcttaatcaaaaagacactgggcttacgagcaggtaaacccacagccagtgatgacacttccaagccttttccaaggtcaaactctacatcttccatgtcctcagggcttccagagcaggataggatggcaatgacccttcccaggaactgccagaggtccaaactccagctggaaaggacagtgtccacctcttctcagccagaagagaatgtggacagggccaatgacatgcttccaaaaaaatcagaggaaagtgctgctccaagcagggagagaccaaaagccaagttattgcccagaggagccacagctcttcctctcagaacaccctctggggatctagccattacagagaaggaccctccaggggtgggagtggctggagtggcagctgcccccaagggtaaagagaagaatggtggggcacgacttgggatggctggagttccagaggatggagagcagccgggctggccttctccagccaaggctgcccccgtcctcccaaccactcacaaccacaaagtgccagtccttatctcacccactctgaaacacactccagctgacgtgcagctcattggcacagactctcaggggaataaattcaagctcttatctgagcatcaggtcacatcctctggagacaaggaccgaccccgacgggtaaaaccaaagtgtgccccacccccaccaccagtgatgagactactgcagcatccgtccatctgctcagaccctacagaagagccaactgccctaactgcaggacagtccacatcagaaacacaggaaggaggaaagaaggcagctctgggcgcagtgcccatcagtgggaaagctgggaggccagtgatgcctccacctcaagtgcctctgcccacatcttccatctcgccagccaaaatggccaatggcacagcaggtactaaagtggctctgagaaaaaccaaacaggccgctgagaaaatctcagcagacaaaatcagcaaagaggccctgctggaatgtgctgacctactgtccagtgcactcacggaacctgtgcccaacagccagctggtagacactggacaccagctgcttgactactgctcaggctatgtggactgcatccctcaaactcgcaacaaatttgccttccgagaggctgtgagcaaactggaactcagcctgcaggagctacaggtttcttcagcagctgctggtgtgcccgggacaaaccctgtccttaataacttattgtcatgtgtacaggaaatcagtgatgtggtgcagaggtagccactgttagcctggtgggaaaatgcacacatttctgaggggagagggaaaaggacttgttttcctgtgttcttgttttcagaaaatgaaagactcatacttgagtgtgtttatgtgaagtacctcagatccctgagttctcacgtttacagtttcatctcaaaaataagaagcaaaccacataagtataggagaggtaaattaagtgggggcaaggcagtagtggacagggttggaaactgcactggaaaatagggaacatgtgtatgtcataaggaaggcaatgcagcccatccctacctggaatgctgggaagtgctaggcagggctgctctcagcaagactgcagcagctgcacccagacctggggctctggtaggtactaatggtgattatgctccaatttacctaatgaatttggtgggacagcagaaaagaaagctgggaatgtaccaagagaaatttttgttcagggctgttggaagtagctgttagccttgcttccacaaggccattgctgctgtaataagaactgcaaatcagagtgctacaacataaaactgggaaatatggccctatctgaatgcctctgtcctattttccgctggtgtatcagttagtgcaggaagtaaagaatgctggaaagttgaatcagaaattgaaaaccttctaaaatcttacacagattagcagaagtcacttctcccagtctggtatattatttcataatggaccaggatcggcttcctgcctgttggtggctatctgtaaaccataagtacaggggtctccctagtggttcttctctgtcttttgctgggcaggctgtcttcctttattcctggtagcattcagagcattaaccagtgttgattttgaaaatagtagtccctacaggttctcacaaaggaatgaatcctgttctgatacagttcccctgcatactgacatactggccaaggacttgagcagctgtgtatttttctttatcaactaaaataccagggagatggtcttttcttgaaacccagtggcctgtatgtgactgagaggaaaagctggcttggtcctaatggctgtttctctgtacctttcccttcccttaccaccttaagcccaatccaggtagagaatagggagaggcattctcctctctatggatttgaagtgaatcacccccacattattctcacatgcttttcttctctcacatattcctccctactcccccacccaatcattgtgcttatttgtacagatcttattgggaatattctttatttattttgtcatttcacttctattttaagaatgcataattgaaggagtagtcattttcagggagcaccaggtagaccctgggaacctaatgacttaatccttaaatatgttttgcccttgaaaaataggccttttccttccttccttagttataattgtggaagctaattaggatggcatggaagtgaatctaatgagttaggtattattaatgttcttggtatcgggtctaattccagttactgcttcattctctttttaaagctttatgaatacttcccccatcctccccaaggagagctcaatacacacatatttttattttattctctcaaaggaatattagcttaggaagataggaattcaacattgagcactgagttttcttctggctctgtcattgatacactgtcaaaccacagcctcatctcttaatctatttaattaaggtaacagtacatgttctcaagggtgttgcaagtaagtgtgcagctatcccttggagagcctctctggaaagctcttttagtgcagtgttgttatgctgaattgttttccattatcttatttgctgagtagaaaatattaatgaaattaagaattgttgagattatatgaattgggctagaatactaaggggaaaactatgttttgaatagagtttggcatttttgaccaagaacaaaattgagttttcattggaaagaaaggaaaccttgattcttaccattgctgctccaaaggaggcccaggttaagaggattagaggagacacgcggtgctgggcattcctggcaggtgttgggtgatccccgcagtatgtcacctgcagttgcagcacaggcagctagtgattgggttcatctcctcctagtggttggaagagaactcagatgtaaaaaccagcggtccttctcccaccttctttcctgccattcttgctcatcatacatgtccgtaaacttgaagaactcgttttagcagctagccttttaaggtcgaggatgggaaagctaaaactgtagaatattattatgctgctttttaggtttatccctgttgttgtgggatgcaagttaagggattgtaattgtttttcagggtttttttgttttttgttttttaagcaagggctctattttcccttgagagttctggaactaagccttggagaaacactactgagtgtatttaggctccctggttttcttgcccaacaacaatctgaagggtagggggtgggggctgtgtcttactcaggggcagcacctagctgtcttgcctacagtgggtgcacgatatataaatggaattgatttttgtcaacactgtcaagagtggcattgactattggagcataccccgtccacatgatgcttgaactatgtaacttcaggggttgagggctcaaggttcaggttaaagaggcactgtcaacttactatacaagcataatttaggtttttcctttttctacttgaaaaggaccagcttaaacacaaacccttatgtaaattaaaaggtttgaatccaaagcagagagaactgcttctggaaaagtgtagtttaattttaactattctaaaagcaatgagcaaaggcccttgtccaaggcgttgacagttttctaaagtggttatgctgtatatctggatgcatgcctttgggctgccactgcttgattcctttcatgtacagataatattacttcagtttagatttcccactttaaaatgcagtgatttgtgttgaatacatcttgattgtgctttacctaaagtattttcttaaaaggctttgtgtaaaatttaaatgtatatattttcctgtagacttccatcatgattttcagagattagccttaaaaaatttggccctaagaaattcattcagtgtttttctagatgacctctgtacatagaggtcattatagtggagaccctttaccagcagcattttaagatttaaattagatagaaagtttcttaggattcaactgaaaattggctagtaaaatatgtcccaggtaataaagcatgctgactttgctaaggcactgcccatttttatttaactaaagtcatggagattttgagtttaaaggatgcagtatagatagtggtttagtgtttaggctctaatgccagtctaaaaggcaagtcatttaaccttgggagcctcagtttcctcactgtaaaacagggataataatagtaactacctcagggttgttgtaaggattaaatgagatgatatttgtaagatacttagctcaagtgcctggcacacaatgagcacactctataaatgttctactactactattattaacacctagtctagggatgcacagcagaatcccctagggttaaaaaacaaaacaaaacaaacaaaaaaaactgacggaatagccccactccagatcagaattcccagtgggctggggtctcggccagtgtattctccagtaatctcgccaggtgtttgaaacacccagtgctatctgaaaactatcagtaccccaaccctttggtttatagattaagaaactagcagaagatggttaaattacttgcctattgtctcagaacggttaattagtggcggagccaaggctagaattcaagtctcttgactttatggttgtggggtctttccaccatacctgctgccatgtgagacactgcaaaaaagtggctcagaccgacaatcagcctgtgtggtgctgcacactttctaaagcacatgctcctgacactttgaccttaaggggcttgaatgtggagtaatgggaacacaagccaagcaagcactcagtagaattcagtcatttaaaaaattcaatggggtcattcttttggacagacctcagcaacacagcaatgtgcactttgtagtaaagaaataccaacttgagtttttaaaaaacctagttagtcctacattcccttttctttaaaaaaactttattgttcacattattttaatgactatgagataatgtatatgacagcactttgagaaaatatcaactgtaatataactataaggttgtagtattgtctgtttaaaagataagacagttgattcaatgtggatggaccctgtggggtacctgaaaatgtagatacgtaagaatcacctctgtcatttatcacatttagaaatatgaaactgcttaacaggtatgagcaggtatagcaagtgtttgctaaagttgtagttcagagctgaattacttcaggaaactagggaccaactttttggtttaattccgatctttaaaaagtaagaatgtgtactcactccagaacacagaagctcttccaaggaccttgactcaagaaggatgaggtcctcttactcttctccatttatccactatatgcttggccatttatcctaaatgtggtgggaacagacttgttatctgttgatgttgacagtgtcttttttaacctatgtcctgcatagttttgttaggtttacagggggaggtggatggccataaaaccagtgcactttgggaattacttttctaggatttcctaccagttataaatgacattgacatttgtcatcttttttttctttttctaaaaagaatagctgaatttaattcacctattataaaatactcaaaagtaaattgccttggtggccacttctgaattatagctacatttcattatgaccccttctgctcccttccattttgctactgatgtcattcttgttatcaggctgtgcccctaccaggagttcatattgggttgacagggttatctatatttttgttcttgatttttgagtttcatcatcttgcattaaattgttccacctggatttggggttcatctctgtgccctaaggatctgctatgaccaatcctctttttgtaggtgggtctctggcttaagtattgataggcttcagcggtttgtgtctctgtcttagcttgtatcaagccagtagtagctcacttcctttgtaaattcctgcttcagtctgggatccgtaggagtatgtgagaacttctgaaacgtctccaactcttaacagtcaagatatctatatcatttggatagagttctggttttccaactactagacttaaagaaattctggccgggtgcggtggctcacgcctgtaatcccagcactttggggggctgaggcgggtggatcacgaggtcaggagattgagaccatcctggctaacacggtgaaaccccacctctactaaaaatacaaaaacttagctgggcgtggtggcgggcgcctgtagtcccagctactggggaggctgaggcaggagaatggcgtgaacccaggaggcggagcttgcagtgagcccagatcgcgccactgcactccagcctgggtgacagtgagactccgtctcaaaaaaaaaaaaaaaaaaaaaaaaaaaaaaaaaaagaaattctaatgcaaagcttgctttttttttcttttttccagcaagccagtagtaatagttattgttacttgctctgttcagcacaactgtagttcacttgaacttcactgtcattccctacgctcctctcttactgagaagcatgggtgggattcagggctgtgggacaagctacagcctactctggagcactcacccccatgactcagtccagcctgtctcttgggaagtttattgcaatgtgcagacggatgaatttctgcttttcatgccacctctctgaggtatgtattctatcttgagtatgtacaagatgataccttttggctgggcacagtggctcgtgcctgtaatcccagcactttgggagaccaagatgggcggatcacttgaggtcaggagtttgagaccagcctggccaacatggtgaaaccccgtctctactaaaaatataaaaattagccgggcgtagtacatgcctgtaatcccagctactcccgaggctgaggcagaattgcttgaacccaggaggcggaggttgcagtgagctgagatcgcgccgctgcactccagcctaagtgacagagtgagacacgttaagaagaaaaaaaaaaaaaaggataccttcatttctgactcaatatcctagatccaaaggacaggaaattagggaaggcttcaccctgtgggatcaagataagaagatcccatacttcttcccaggtaaggaggcctgtggcaggtcatgattcaaagctgacttggaatggcagaaactgctgagaggccacccttggagatttgtgccttcaaagatgggtttcatgagtctcagagaggaaaagacttgtcagctgggttgattttgcatgattattgaactagagctggtagacacgagcttctcagatggcagtggccagatcctccatctgtgagaatccgccacttgaagtggtttcctgagagtgttcacttggcagttgctgcgtttctcaagcccacctggcgaggtctcgccggacccttccctccaagtgcacttacttcttcatccccatgtacatctctaactttgaaattgtttacctctcctacaaaaatcttaccttttgacctgagcagagtagcaaagccctgttcactctgagggagcagctggcgtgttgaaggggaaaggccaggcacagcactgtcctcagaccacaccatatttggagcagaattgtgatacatgtcatctgtgtctattctggaaggttctttgttcatcactgtactcgcatcagcaaattttcagggtcctacctgtcactccaggctactgagctgaaccctcagaagctgaggtctccgagcatgctaagtaaccttttagaaaagctggaggcaaactgtcgaatgctagcaggctttatgaaaggaaacataaggagtttgtgtagtcagaacttgcttaaatttgcttcggaattaggcaccataaactttagttggagaatgggacttaaattttcacatatatgtatacttaattttcagcaattatgacacaataaaaagaatatgcaaatttattgttgtttcagaaggttttgcaggactgggaacgctttagtgtcatcaacagtaaacctcagatactgttctgcacagttcagaagtaccataccaggtattgtgagtggcaagaacgccaggggacagagatgcttctggtagatgagggccagagaaaccagctctcctccattttgacagcaatttctcactgtggccatttggcctccattatgttttgagaggaatttcttgagatcttgagaaatcaccatgattaggccaattgtcaatcagtattcagaaactagaaaggaacaatgagatacttgtttatggttctttagggcatatgtttgaaaaccctctcatctcagatctgtatagctggtgtgtgtttgtgtccataaatacacgtgcattgctgtcgtgcccattaagaaagggggagtaagtaaaagaggaatcgctcagatctttccttggatgaacagcagtggcgtggttggtgtgttgactgtgaacaggctgacttagctgttgatgtatactcagaacctccatctcctcccagaccctgcacttttccttctctgcagtctgattctctaatgactgtcactggacaaaccccagttttatgctcgcttagtaaaaataagtttaaacatttcatggtggttgacagaactttgtccccaaacatgcggattcaattctttaaaactcgttgaacgtttataccaaaggtcccgccccgcaggtgtgtatgtggtgcacagagggtgaggtttggagcatcgggcactgtgtgcattgctaaggggacatagtgagacaatgtgggatttaactaaaaacacatcaattgtgtgtcacattaccagtgttgtcaggtatttgttcttaattgttattgtaatatattttcagttgtttttctaatttaattctctccgtctgttgtctgactgtgaactgctaacagtgttaaacttgatgtaaataaatgaggcccttgaaagggactgctttctctgtcttctcacaaggtttgccaagttgtgttctgttttaaataaaggttgcaatattttattggcaaagtaaaaaaaaaaaaaaaaaa

SEQ ID NO: 147 - DNA, 2894 bp, HOMO SAPIENS
cggggtcagcaccgcggagacccccctcgcccggccccgcgacagcctccgagcgcccccggatcatggccaccgaggtccacaatctgcaggagctccggcgaagtgcctcactggccaccaaggtctttatccagagagactacagcgatgggaccatctgtcagttccagaccaaattccccccagagctggacagccggatcgagcggcagctctttgaagagactgtgaagaccctcaacggattttacgcagaggctgagaagattgggggcagctcctacctcgagggctgcctggcctgcgccacggcctacttcatcttcctctgcatggagacccactatgagaaggttctcaagaagatttcccgctacatccaggagcagaatgagaagatctttgcacctcgaggcctcctacttacagaccctgtggagcgtgggatgagggttattgagatctccatctacgaggaccggtgcagcagtggcagctccagcagcggcagcagcagcggcagtggcagcagcagcggtgggggtggtggggcgggggcccggtgactggccgagagtccctgtagggaggtgtatggccggagtgagggccttgcagacctgcggcggctgcgctaccagagcacccgcttctgagtcattctttgggctcaccctgctgcccggggtgggagggagggtgacgggcctcatatttcctgtgggccatcaacctatgccccctgtccctcacccccgtctggatcagtccatttcctgacctgggggcttttccttcccgatggggctggtctgggccacacagagacagatcttcctaggaaggctggggtggggagaacacaacctaggcggcccctctcttccacagcccctctcccaaccctgcgaggggggccgaggcctgccacatagaggactcccacactgcatgacccctcatcccaaacccatatccaccaggactctttcccttgggccctgcgtcccgtggctgtctcccagtatctgttccttctcatgcccctgcagggccccggcctgtctatgatcctgcctccaccaaattcaaggtgtggggagacgggtgccgtggttgggagctgttcagcgcactcctgacctcttctagacctatggctttcctgtcctgcattcagagctagaggccagctcggccttgcgagaagcatccaactttgagactttgcaggctgccaggtgctggttggggggcacagagcctggggctctgggaggtaatatgggggtctgggaaactccgtgaagagacatagccatgcggggcctgaatctcctgaactacagccagtttcctgagattagaacctgtgtgtatgcacatgtgaatgtatgtgtgagtgcacatgtgtgtaagtgcagtgtgcgtaaatgtgtgagtctgcgtgtgttagcatgcctgtatgtgagcgcgtgtgtgagcgcatgtgtgtgcaccagtgcacaagtgtatgaatgtggacacatttataagcacacctgtgtgtgtctgagtacatgtgcacacacgtgtgcacaaatgtgcatttatatgagtgtgagtgcatgcatgtgcatgaacatgtgtgcacaagcatgtgtgtatgagtgttcatgtgtatgagtgtgtgtgtatgcaggtgagtgcatgtgtgtgtgagtgtgtttgtgtgttccccttggctgccaggccaacgactgcttctctgcatcctgctgtcttcgctacctgagggtctgtgacttcttccctgtgtgggtccagcctgaccccctgtaagtaaatgtccaaaagccccttgcccctcccctagggctaccagggaacatactctactgcatatgttctagtggaagagaagccggggttctaggaaagaagagccaaactttggtggcctttggtgccccctctcagctccccatgacaagacaacggggctgcagacactgtgtgttcagcctgcccaggggctggggctctttaaggctttgtaggtgaggtttccatggaccttcaaaggtgccagcagcctgcaggggaaaggcaaactccctccttgcaaggaaaggagatgtccagccaatgatgcccggcttctgaggcccagaggagcaggtgggatgggagcagcccctggggctggtgtcccgaagatgaaatgaagggggctgcctatctcagttggcgggaggtgttagaagtggatgtgcaagaccagccactggaggtagctctctggagtcaaagagaggcctgcttttctaccagacatgggagcagcatgtaggatacaagggcctacccagagaccagagagagtcagcctagtccttgcagcctcaggaagtcctcggcccaagtgagtcctggtccaaggatccccctggagagccgcagttcagtgggctccaccgcagcccctggccacggcctatgccctccctgggcccctgtggggctgggcattgtgtctgacctgtgcatctcccatgggagggctgggcacaggcagtgctatggccttttttttttttttctttttccaataaaagaacttgcccagcgtgaagctctgtgatgctttctctgccccgtgacgatggagggtcagttctatgctccaggaccacatgaggggatactcagctgcctgaactggacctgacatggggagcaggatgaactctgtcttcttggagcttgcagtctactgaagaggcagacacctcagcatctctaatctggaatctttggggcacttgtagccttgggtgggggaacaggttggactgaaagcgaggccaaaagtaatcaattaatgatatcaataaatcctcatttcttga

SEQ ID NO: 148 - DNA, 2295 bp, HOMO SAPIENS
aagaacccggaagtggtggagccaacggccagccagacctgtggcagtcccagccccagggtgctctccgcggtcggccatttatcggtgaagcaacagccccttgacgtcaagcttgacgcattggagataaagtccaaggaggtgaactaacctttgaacgtgccactggcagggaaactgtcttccttttctccaagatgtacagaaccaaagtgggcttgaaggaccgccagcagctctacaagctgatcattagccagctgctatatgacggctacatcagcatcgccaatggcctcatcaatgaaatcaagcctcagtctgtgtgtgcaccctcggagcagctcctgcatctcatcaaactcggaatggaaaacgatgacaccgcagttcagtatgcaattggtcgttcagatactgttgcccctggcacagggattgacctggaatttgatgcagatgttcagactatgtccccagaggcttctgagtacgaaacatgctatgtcacatcacataaaggaccatgccgtgtagctacctatagtagagatggacagttaatagctactgggtctgctgatgcttcgataaagatacttgacacagagaggatgttggccaaaagtgccatgccaatagaggtcatgatgaatgagaccgcacaacaaaatatggaaaaccacccagtgattcgaactctttatgaccatgtggatgaagtcacgtgccttgctttccacccaacagaacagatcctggcttctggttcaagggattatactcttaaattatttgattattccaaaccatcagcaaaaagagccttcaaatacattcaggaagctgaaatgttacgttccatctcttttcatccttctggagactttatacttgtcggaactcagcatcctactcttcgcctttatgatatcaacacctttcaatgttttgtctcttgcaatcctcaagatcaacacaccgatgctatatgttccgttaattacaattctagtgccaatatgtacgtaactggaagcaaggacggctgcatcaaattatgggatggtgtttcaaatcgatgcatcacaacttttgagaaagcacatgacggtgctgaagtttgttctgccattttttccaaaaattctaaatacattctctcaagtggaaaagactctgtagctaaactttgggaaatatcaacgggacgaacactggtcagatacacgggcgcgggtttaagtggacgccaggtgcaccggacacaggctgtgtttaaccacaccgaggactatgtgttgctgcccgacgagaggacgatcagtctttgctgctgggactcgaggacagccgagcggagaaacctgctgtcgttggggcacaacaatattgtacgctgcatagtgcactcccccaccaaccccgggttcatgacgtgcagcgatgacttcagagcgcggttttggtaccggagatcgaccactgactgagccaccctctccgtagggttctttctcgaggactctaccctcctcccccacgtcctgtctcagctgcagtcgtaagtccgtgcaccatccttgacgttttgctgccacctctgtccacattcttcttggatttgtataaaagaatctttttttaccttgatgtagaatcatggtggaaaaagttggaaacacagatctgtgcagttctacattcactgattattacagtgtgattttcatcggttttgtaagtacaggacttgccgtttcttttgatctcttgattgaaggaggatagggcattaaagtgcttttgacatgaggaattttcatttggttcttctgtcaactttcttgcttattctgctgaaccctctgtgtatttcccttccaggtatatttgaacagataagcaggcatgcagctctgagactcctgagttttatgccattatcaaaagcattttcaagaatccctcaattctatcctgaaatgatgttattctgataataaagctcagatctgcaactttattgttatatatttttcacttctgtaaaattaatggccagtttttcctgacaatttataggaacagtatctttcaacatactccctacattatccttcaatatctgcaatacttgtctttagtaactgtatttctggtaagattatgatttcatgagaaacaattgaaaatatatccgatctaattaaattaggtcagcctgctattgctctcaggtgttgcctgtcttcacgaatgattagtatcgattgacctctttcttaggtg

SEQ ID NO: 149 - DNA, 7065 bp, HOMO SAPIENS
ccccgaagttgttccgcgctgggcgggcgagcggctgtgggagagcgggcggcgggccggcgggcggaccgggccggtgctggagaagtttgcgctgcggttcgtgagcgcagggtgcgggccccgccggccgctgcgcgcccgctgccatggctttccgcaggaggacgaaaagttacccgctcttcagccaggagttcgtcatccacaaccatgcggacatcggcttctgcctggtgctctgcgtcctcatcgggcttatgttcgaggtcacagccaagactgcctttctatttattttacctcagtataacattagcgtgcctacagcagacagtgagaccgtgcactaccactatggccctaaggacctggtcacaatcttgttctacatcttcatcaccatcatcttgcatgctgtggttcaggagtacattttagataaaatcagcaaacggcttcatctctccaaagtcaaacacagcaagttcaatgaatctggacagctggtcgtctttcatttcacctcggtgatttggtgcttctacgtggtggtgacggaaggatacttaacaaacccaagaagcctctgggaagactacccgcatgtgcacctccccttccaggtgaagtttttctacctatgccagctggcctactggctgcacgcacttcctgagctatacttccagaaggtacggaaggaggaaattccccgccagctccagtatatttgcctgtacctggtgcatatagctggagcatacctcttaaacctgagccgcctgggcctgatcttgctgctgctgcagtactcaactgagttcctcttccacacggctagactcttctactttgcagatgaaaacaacgagaaactgttcagtgcctgggctgctgtttttggggttacccgcctcttcatcctcacccttgccgtgctggccattggctttggactggctcgcatggaaaaccaggcatttgatcccgagaaagggaacttcaacactttgttttgcaggctctgcgtgctgctgctggtgtgtgccgcccaggcctggctcatgtggcgcttcatccactcccagctgcggcactggcgggaatactggaatgagcagagtgcaaagcggagagtcccagccacacccagactaccagccaggctcatcaagagggaatctggttaccatgaaaatggagtggtgaaggcagagaacggaacctccccacggactaagaaactcaagtctccctaaggccaaagtgctaagaacaggaatcctcttggtgggggccgagcagggggcaaggagcccaggccccctccctgcctcctccttcctgcctgtgatgctccgtctcaaacagccgaaacctgtcttgcaatggggggagggggcgtttcgctttccttcttcttggcttcctcttattcttccacaaaccattctcaataaagccaaaaatctttctctttctccccctcaggccacctcctgtcctcactcctgtcctgtgctggcttttctggaacgccaggcgcccatggctggcacctttctgcttgctctgtctcttgccttatggctgctgcttttcctttttacttcctattttcaccttatcttgcaatttttctgtctgatttttacaatgggaggggagctaagattgcagtcctgtccttcggtcccccagggcctgccggtcagaagcctggggctggtaggcccttggtggtcctcatgtggatgggcaagaagagagcggccatctcggatcataatctccttggtgctgattaactgacgagatatatgattccagttctgcatgtaccatcttgaggcacagcagccactgctcgttgtaaatgccaaggcatttggctttgggacgtgacaactcaatccagaaggatggtgtgaactcggttgggtcccgtgactcgagctcctaccagtggctggccgcggattggaagccagcctgctgtcgctctgtggggggggacacgtcttcccactgcttagagcgagagcagagcaaactgcgcagcaggcacctccagaaaggtaatggtggcagaacccacagtggagtcgacctaggcctttctccagcagtcccagtcgccattgctttttcagccattcacaagcattcaaaaccaaaccaaacagcagttcatatacctgcctgagataggctggtcctcacctccagagccagccagccccgtcaggggccaaacttactaccttgacttcatctctagctgcagaaacactaagtctcaagggcttcagccccatgctggtcccttggtgttcagggagggtcacttggaccgctgttcatctggccgcccttgttgagtgttctttggaattgtcgttttttgagcacaactacagcattttagactgcatgaaaccatgactgactgagagtcactctctgggtagatgataggcgcctttctggccccttccctcacagattctttcccctcccctccacctgaagagaaggcctccaagtccttttggtgccttgtgaggacttttagaaggggcgttcagctttaaaaagccggtcctaattacggccggacgcagtagcttacgcctgttatcccagcactttgggaggtcgaggtgggcagatcacctgaggttaggagttcaagaccagcctggccaacatggtgaaaccccatctctactaaaaatacaaaaaattaggtgtagtggcaggcacctgtaatcccagctactcgggaggctgaggcaggagaatcgcttgaacctagaaggcggaggttgcagtgagcggagattgtaccatggcactccagcctggacaacaagagcgaaattctgtctaaaaaaacaaaagtcccaattaagaacctccgaactctgttttgaggcaaaggggagtagttcttggtaggtgcaggaatagtagtgtcatttggaatactggtcatctttctgacatcacagtagaaaccaaaccttggatttagattcaaaaggggggaaatgggtcttttcatcaaggcaactccccttctccaagtcacttacatcatagataaattttagcttcccagtaactgagggatttgtttcctaacgccattggaggccttcatccctctctacgataaggttgcagaaatgggaagagctacccgtggttgcttttgattacccttaggaagtgagacagtgtttttgaaaatatgtatttcccccatttctccctctccttccctgacacttctctgggctgcacagcagaaacgttggtaaaagggcagtttggtttcaacacagcagacctgatatgggatcccttagccactttagtcaaacagccctgacagagtctataattgagttcaggccccccaccttgcctaataactgcaaatcgcatgttcagccagcagcctcctaagcccaccttcctcccccattagagaacacccatcctaggtgctctccaggctgtgtcattggcagggcttcacatgcaggaggcctctctcaggtgagtccaggttaaactgttgagttgtggcttcaacagatatgtatggcatgctgggatgtgccaggtgcctgcgttgtgccagttgctggagaggtagtgtgagcagagcagctgaaatcttgccatcaagcaaccctcattctcatgcctgtaggtttccattgctctgtcccaggacacttgcgtgccagagacgccacaacttcatgtccctgtctcttgcaagctccccgtgctgccagtacttcatgccttggatgtggtcccaccagcccagtggccggggtcagcttaggctctgcttcccagtggacgggtgtgctaagggtttattttatgtaaaaaaaaaaaaaaaaacaaaaaaaaaccctgagaccatgagtggggctggcatcttgccagcctgggcttcagggatgtttggggggggtggttagagggtagttgtagggtactttgtcacccccctccccctgccaccctccctggcacgtttatttcacagcagagccaagtctgtggcaggttgacacagactgtgttgccagagctgaaataattccacttcatcctatgagcgtgttgggctagcttgttctaattttggccactttggctgttttcttcagttttatgcattctctcctgccccaaagtgccaagccatttgtgaaggctctgccagacacctccaagcttgagagctcagcaccatgcaccaagagcaggagaaaagacgtaaacctaccccagcaactgtggcctctcgacagccctggctaactaacttacatttgtggggaagccaacagacacagcaggaggagagggaggtggcgctggtggaccaaggatctgtgctacccgctcccctccttggaggtgcagtgatgatgggagttatttttaccatccgggcgctgatagctgcactattaataaattgcatgtgttccttttgaaggtaggggatggttctgggtgagaggggagcaggctgagccggcgggggatctgctgtcctcccttttgagtcagttctaatcccatgtgtgtctgggccaccagaccgaaatggttgctgagaaacttgtctgttcatgtcccaaggcataacttcccaacatttaagaaaccccaatagacacctctgccctggccacgttcacagatccttctcttgaccggaaaccctgggaccctaagaacccctgaagcttggggtgggtgtgtgcttctggggtctcttttgggacctcctttgtcagtaccccttcttttttctaagcagctaataagaggttgggtgaaagagtgcatctcctcccaggattccacaacaaaattcttatcttccatggatgctttaattggaagtgggttgccgacccccttgtgcctagaaaaggccttcgcttgggtttcctttgtatgcttcagccttcctagttggtttttctaggcctggtgtgagaggtagggaagtctgcacataactaattcttttgcttaagggcctatggcacaagtgcacaaacttcaattcttgatgttctaagctctctcctctaacagagggagtgctgaaagcttttgagtcaagacaatggagtgctcttcctccctcactctgccttccgagcttatggttccttttctcaggagaggattttcaggattattggaggattaggtcattgtcagatgactggaaaacctaaataggatctctctccagctcaaggttgtcccagtgaggaagactttaccaacttctcactctaccccactactcacatgagtgttagctccaccttgcaaaggctgaagaccagttctccccagtgaaagctgcctcattcttttatggagttccctggagtggcagagctataaagacgagcattgggatttgcagtctccatgtagcctttcgtgcttggcaacccctgtagactttttgtcccaagcagattgcgtgcgtgcgcctgtgtgtgagaataagtgccttactttgctgtgtggttttcaacttgtactccgtggccagcccccagttgccagggctcgacggcagccaaggacaccatacctcagtatagttatatataaaagggacacggattgtgacagtttcaccccatttgtttctaaccccgctgcccaggattagggtctgtggtgtgttctgttttgtttttggtttctcccttgtgtcagttctcttctggcccagctgggtggctgtggaagtctgtgaggtggcccaaccacaagcatacctattaagagaagcccagagcttccagcccccacttcgaaaactctcctctggccccacatagcaaactccttctccgttattttccccacccccagattttttttaaaaggcccacttgccgtaacctcttttggtctattttgcttcccattcagcccaaagtttatatgataaaggtgtttacttttacttcccagtctccaagtgctaacacataaacacatacatgtctgactgttgcagaactgttcgagctcctaattcagtgttaccttgttttagtcgcagcaaccctctcccctaccccttgcccgcccacgtttttctcactcttccgggttgtgcaataactctcccagccagtggtcctttccacagcctttctgtcccttaaaacacctgcaactgggggagaaatgggacccatgggagggggagtcgtcatcccttacacaagaaatagccactttccttttgttgtcattcttgtgatcctgggtgggtttctgtggcactcttttagaacatgtagcatcatcttagaggtctatttttaaaaaatgtgttgaagaggaaaaaaccattctcacgatggggcttaagtcattgtccaggaataagattggcgtggtgcccatgacatcaccgtcactctgcctaaaagcactctagagctacttgttcacgtggagaggaaggatattttgcgaagcaacagccgcaggtggagagccctgttcacctgatagggtctagctgtgacagtaaatataataccgctgtttccttgggtacagatttgagtgttcatgtgatgagactgtaaacctcatttttcggttcctctgtttaaaaaaacatctgaaggatgaactaaggctgctggtgccctgagcaactgataatgcaaatgtggacaaagtgtctgttttctactctagcctgttcatatggaccaaatttcaacaaggaactcaaggaaaatttgtacctgccgtatttatgctttcatgtaaaaaagggttggggggaggggtgtctttttgcttttggtgaactttttttcaaaatcatttttccactgtttctgtctggttttaaaacaaattacagttttgtatggattttttaaatgtacattttggaacaaatgatcaaatattttctgaaataacaataaaaggcagaaaattatcagaaaaaaaaaa

SEQ ID NO: 150 - DNA, 426 bp, HOMO SAPIENS
  misc_feature (103)..(103): n is a, c, g, or t
  misc_feature (109)..(109): n is a, c, g, or t
  misc_feature (124)..(124): n is a, c, g, or t
aaggtcacaatcacgcaaccatatcaagctgaaaatgtcacccctatctggagagttggacatgttttattgggaatatattttttatctctgactctgttancgaacncattggttggctagnttcggtaataaatatgtgaaacattttatttaaaaaaaaaaaacgtcgtgagccactgcaactggctcttttaaatgtaattttatttatttatttatttttgagcctgttttgcagcctttacaaaaatcagggttttcccacaagatcatgaagattttcatataagggacctctgaccatttgtgttggcgttggcagtaaaggtcaagcaggaataaggtaataacattcaagctccccacctttggccaggttcctgcctttctagttcatattttggccaaacctagctactcgcc

SEQ ID NO: 151 - DNA, 413 bp, HOMO SAPIENS
  misc_feature (109)..(109): n is a, c, g, or t
  misc_feature (203)..(204): n is a, c, g, or t
  misc_feature (294)..(294): n is a, c, g, or t
gacccactgagccaggcacaggagaaaatctcctggtctgctggttgctaagaccgtgggaaaagtgcagtattagggcagaagtgtcccatttttccaggtacagtcngtcactgcttcccttggctaggaaagggaaatcccccaaccccttgcgcttcccaggtgaggtgatgccccgccttgctttggcttgccctccnngggctgcacccactgtccaaccagtcccaatgagatgaaccaggtacctcagttggaaatgcggaaatcacctgtcttctgcgtcagtcnatgctgggagctgcagatcggagctgttcctatttggccatcttggaacagaaaccccacttgaaagaatttgtgtacatgaaaatttttaaaaatccctccatttcctaatctatgat

SEQ ID NO: 152 - DNA, 537 bp, HOMO SAPIENS
tggttttcttttccagtaaatacatatttctcttaatgtactgctaaaagtaatgtatctttttccttttttttttttaattgagatagagtctcattttgtcacccaggcaggaatgcagtggcacagtcatagctcactgcagccttgaaactcctgaactgaagtgctcctctcacctcacctttctgcactgtcacacctggctaattttaaaatttttttttgtagagacaggtcttgctgtgttgcctaggatggtcttgaacttctggcctcaagtagtcctcccgcctcagccttccaaagcactggaactacaggcatgagccactgcattcacccttctttcttataactgcagttttgaccttatgacttttaaaaacattgttaggaaatgttttcccagtaagatagtccagaatcattcacactttagcataagaaaaaatagggcttagattcagtttatttggcagttcagagaatgttggagaactgttcaaatgaaaacctgacagatcattatatcaa

SEQ ID NO: 153 - DNA, 3686 bp, HOMO SAPIENS
ttcagaggctgcgtctttcaggaggccagccaccattggttcaggcaatcttcagcggtgatccagaggagatccggatgctcatccataaaactgaagatgtgaatactctggattctgagaaacgaacccctcttcatgtggccgcatttctgggagatgcagagatcattgaactcctgattttgtcaggagctcgtgtaaatgccaaggacaacatgtggctgactccactgcaccgggctgttgcttccagaagtgaagaagcagtacaggttttgattaagcactcagctgatgtcaatgcaagggacaagaactggcagacccctcttcatgtggcagcagccaacaaggctgtcaaatgtgcagaagtgatcattcccctgctgagcagtgtcaatgtctccgaccgaggggggcgcacagccttgcaccatgcggctctgaacggccacgtggagatggtcaatttactcttggccaaaggggcaaatatcaatgcatttgacaagaaggaccggcgtgctctgcactgggcagcatacatgggccacttggatgttgtagcattgctcattaaccatggcgcagaagtgacctgtaaggataagaagggttatacccctctgcatgctgcagcctccaatggacagattaatgttgtcaagcatctcctgaacctgggggtggagattgatgaaatcaatgtctatggaaatacagcgcttcacatcgcctgctacaatggacaggatgctgtggttaacgagttgattgactacggtgctaacgtgaaccagccaaacaataatgggttcacccctttgcattttgctgctgcctccactcatggtgctttgtgtcttgaattgttagtaaacaacggggcagatgttaacattcagagtaaagatggcaaaagtccactgcacatgacagctgtccatggaaggttcacacggtcacagaccctcattcagaatggaggtgaaattgactgtgtggataaggacggcaacactcctctccatgtggctgcaagatacggtcatgagcttttgattaacaccttaagaaccagcggagctgacacagccaagtgtggaatccatagcatgttccctttacatttagctgccctaaatgctcactctgactgctgcagaaagttgttatcatcgggctttgaaatagacaccccagataaatttggaagaacgtgccttcatgctgctgctgcaggaggtaatgtggaatgtataaaactcttgcagagcagcggagcagatttccataaaaaggacaagtgtgggaggacccctttgcactatgcagctgcgaattgtcatttccactgtattgagacattagtgaccacaggggccaacgttaatgaaacagatgactggggacgcacagctttgcattacgccgctgcatcagacatggatagaaataagactatcttaggaaatgcccatgataattcagaagaacttgaaagagccagggagctgaaggaaaaggaagccacactatgtctagagtttctgcttcaaaatgatgcaaatccatctatccgggacaaggaaggttacaatagcatacattatgctgccgcctatgggcacaggcagtgtctggaattgcttttggaaagaacaaacagtggatttgaagaatcagattctggtgctactaagagtccactccacttagctgcctacaatgggcaccatcaagccttggaagtccttctgcagtcgttggtggacctggacatcagggatgagaaaggccgcactgctctggatctggctgcctttaaaggacacacagaatgtgtggaagcgcttatcaatccgggcgcatccatctttgtgaaagacaatgtaaccaaaagaaccccacttcatgcctcagtaattaatggtcacacactgtgtttacggctgttgctagaaattgcagacaacccggaggcggtcgatgtgaaagatgccaaaggacaaacaccactgatgcttgcagtagcatatggacatattgacgctgtttcattgttacttgaaaaggaagccaacgtagacactgttgacatcctaggatgcacagctttacacagagggattatgacaggacacgaggaatgtgtgcaaatgctgctggaacaagaagtgtcaattctctgtaaagattccagagggaggacgcccttgcactatgcagctgctcgtggccacgccacgtggctgagcgagctgctccaaatggctctttctgaggaggactgttgtttcaaagataaccaaggctacacgccgctgcactgggcttgttacaatggtaatgaaaactgtatagaggtacttttggagcaaaaatgttttcgcaaatttatcggtaatccctttactccactgcactgtgcaataatcaatgatcatgggaattgtgcatcattgctgcttggggccatagattccagtatcgtcagttgtagagatgacaaaggcaggacaccccttcgtgcggcagcatttgctgatcatgtggagtgcttgcagcttcttctgagacacagtgctccagtgaacgcagtagataattcagggaaaacagcactgatgatggctgctgagaatgggcaggcaggcgctgtggatattttggtgaacagtgcccaggctgatctgactgtaaaggataaggacttgaatacacccttacatttggcttgtagtaaaggtcatgaaaaatgtgccttgttaatacttgacaagatacaagacgagagccttattaatgaaaaaaataatgcactgcagacgtaagtgtaactactaaagttggacttgaacccagggtcatagtcatttattcaataagtattaagagcctgctgtgtgccagactagctctggggagcacagtggtgaaagatgcagtcctggcttcccctgcatgaaggtgacagtcacatacctacaagtgctgaccaagctgggcagttttagttagaatcctccttttgatatgtcttcatttaattttgtgaagtctctgtttttctttgctgatatttctggggtaatattataaatttagtgggctgttagaaaaattttatggactgacatatttggggaaactatttgtattatgtattagcattatgtattctgactggaaaatgacagttttgcaaatcaggttcccagaatacatttgaagagtttctaagctatttgtcttgattatattttaatataattcagtgtaacccttggtgtgaaagatctaaaagctgtttcattttccgctttaggaaattatttatgcatttgttttaaaggcaaaggaatttttttcatttaagattcttaagccgggcgtggtggctcatgcctttaatcccagcactttgggaggccgaggcagttggattacttgaggccaggagttcatgacccgcctggccaacatggtgaaaccccgtctctactaaaaatacaacaacaacaaaattagctgggcatgatggtgggtgcctgtaacctcagctacttgggaggctgaggcaggagaatcacttgaacctgggaggtggaggttgctgtgagctgagatcgtgccactgcaccactccagcctgggcaacaagagcgagactgtccccccac

SEQ ID NO: 154 - DNA, 4240 bp, HOMO SAPIENS
gcggccgcctttgcaaggttgctggacagatggaactggaagggcagccgtctgccgcccacgaacaccttctcaagcactttgagtgaccacggcttgcaagctggtggctggccccccgagtcccgggctctgaggcacggccgtcgacttaagcgttgcatcctgttacctggagaccctctgagctctcacctgctacttctgccgctgcttctgcacagagcccgggcgaggacccctccaggatgcaggtcccgaacagcaccggcccggacaacgcgacgctgcagatgctgcggaacccggcgatcgcggtggccctgcccgtggtgtactcgctggtggcggcggtcagcatcccgggcaacctcttctctctgtgggtgctgtgccggcgcatggggcccagatccccgtcggtcatcttcatgatcaacctgagcgtcacggacctgatgctggccagcgtgttgcctttccaaatctactaccattgcaaccgccaccactgggtattcggggtgctgctttgcaacgtggtgaccgtggccttttacgcaaacatgtattccagcatcctcaccatgacctgtatcagcgtggagcgcttcctgggggtcctgtacccgctcagctccaagcgctggcgccgccgtcgttacgcggtggccgcgtgtgcagggacctggctgctgctcctgaccgccctgtccccgctggcgcgcaccgatctcacctacccggtgcacgccctgggcatcatcacctgcttcgacgtcctcaagtggacgatgctccccagcgtggccatgtgggccgtgttcctcttcaccatcttcatcctgctgttcctcatcccgttcgtgatcaccgtggcttgttacacggccaccatcctcaagctgttgcgcacggaggaggcgcacggccgggagcagcggaggcgcgcggtgggcctggccgcggtggtcttgctggcctttgtcacctgcttcgcccccaacaacttcgtgctcctggcgcacatcgtgagccgcctgttctacggcaagagctactaccacgtgtacaagctcacgctgtgtctcagctgcctcaacaactgtctggacccgtttgtttattactttgcgtcccgggaattccagctgcgcctgcgggaatatttgggctgccgccgggtgcccagagacaccctggacacgcgccgcgagagcctcttctccgccaggaccacgtccgtgcgctccgaggccggtgcgcaccctgaagggatggagggagccaccaggcccggcctccagaggcaggagagtgtgttctgagtcccgggggcgcagcttggagagccgggggcgcagcttggagatccaggggcgcatggagaggccacggtgccagaggttcagggagaacagctgcgttgctcccaggcactgcagaggcccggtggggaagggtctccaggctttattcctcccaggcactgcagaggcaccggtgaggaagggtctccaggcttcactcagggtagagaaacaagcaaagcccagcagcgcacagggtgcttgttatcctgcagagggtgcctctgcctctctgtgtcaggggacagcttgtgtcaccacgcccggctaatttttgtattttttttagtagagctgggctgtcacccccgagctccttagacactcctcacacctgtccatacccgagggtggatattcaaccagccccaccgcctacccgactcggtttctggatatcctccgtgggcgaactgcgagccccattcccagctcttctccctgctgacatcgtcccttagttgtggttctggccttctccattctcctccaggggttctggtctccgtagcccggtgcacgccgaaatttctgtttatttcactcaggggcactgtggttgctgtggttggaattcttctttcagaggagcgcctggggctcctgcaagtcagctactctccgtgcccacttccccccacacacacaccccaccctgttgctgaccaaggtgatttttggcacatttgttctggcctggcttggtgggaccccacccctattctgcttctgtgagtccctgatagagaaggaggtcccatcaggcccctggaacacactcaggcttccctgactcaggacaaggaccacgggaggcccaggtgcggaaaggaggctccgtgagatggggtccagcccatcccaacacaagggtgcagcttgattcgggagttccccacctcctgcccattctccgcgtccttttaccccatggagagcctcagccatggcaagtccatctggagtccaggaagcaggcaactggcctgacccatgagaccgtttggagaccaagcagcagatgcaggtgtggaccccaggaacctacaggggtgtcagccgctgagccccctccctgctgtgtgggtggtgagcaggctgggtctttgtctgtcttcttctacacggcatgtgcctgcaccagccccaacacctgagctggtttagcgcaaagaagagctctgactctccaggggtgctgggacatcacgtggaattggatcccaggctctcttgggcgagaaagaccattctggaggtgggagtgggagagctgcctgtctgcccacgggctctgcgtctccgcagtgggtggccttggatgcccggcccctccctttctgtgcactggggacgctgatggaggctgaagctgctgttcggaggccctctattggtgcctctctcctgccgtcatcactatggcaggaaaacagagatggtttagtaatgaattatcattcccaaacccgtgtccacctggaacatcaggatgggaccatgtttgaaaatcgggtctttccaaatgtaattaagtaaggcgaggccatactgcatttacaatgggcccaatccagtgtccctatgagagacggaagaggagacacagacacaaagcaggaggccacataaagacagaggcagagactgaagtgatgctgccccaagcccagggatgcctggagtccccaggagctgggagaggcaggaaggaccctcccctagagtctctggagggaactggatacaattgcagagtgcactaaacagttgccccagaaagacatgtcttgttttaaagcccagaacctgaaattattatagattttattcggtaataaggaactttgcatgtgtaattacttaaggatatgaagatgagattgtgctggattattaagcaccctaaatgccatgacaggtgtccttccaagagacagaagaggagacacagacacagagcaggaggacacgtggagacagaggcagactggagtgatgcggccacaagcccagggacacctggagcccccaggagctgggagaggcaggaaggatcctcccctagagcctccagggggaactggaggatgcgtaagagacccagaacttccacagaaggaggaaaattaacctcctgcttctctagactgttccaaagctgaaccctagaaagcaaagctgatacagaagcatccaggctgcaggagtacaggtcgcaagtgctgagcgtgggccttgggtgtgtctcatgggggaaaaaaaactgtgaaaaacctcagagtagcatcttcacagtaacgcacggacgatccctaaactgccttgtaaacaaaaatgagagcttgagtcagaggaagccgagacaatatccttcctcgacaacgtgcgagaaccctgacgtcccccagcaaaggaagacgttgcaagcaggcaaaatgcgtcgattttttttttttgtcagtatgatgatttttgcagccacttggctatggagagcagccgacaccccctcttacagccgtggatgtttcctggaagctgactcagtctgttcactggttgagctttgagtgaaaagataacacaggtctattgactcacacacatgttttaagatggaaaactttacttctgttcttggcaggacatggagagagggagggattccaaaaagtctcagcctccatcaaggcgtggcagctcatgccggtaatctcagcactttgggaggctcaggcgggaggactgattgagtccgggtgttcaagggccaacctaggcaacacagtgagaactcatctctgtaaaaaataaaaataaaacattaaaaaaaaacatgagctttgaagtgcacagggcaaaaaaaa

SEQ ID NO: 155 - DNA, 2806 bp, HOMO SAPIENS
gcacttcgcggagggcgctaggggccgggacgcggccgccgagcgtaggttccggcctttactccgagttgcgcacggagccccagctgcggttgtccgctctggggatcacaggccgcggagacccgggagccacccgccgggccccttcagacgacccgcttccgcaaaccggccgtgggactccggcgccgggcggacgaagcggctccgggaagactcggtcttccccgcccgcctgaggtcgccggggcggggcttcagtgacaggcccgcgcgctaccgcggaaacaggaagttggctgggtgcgcgccggctccggctgcagttcccgggtccctcggccaccgaagccaccctgccctggtgaaagggctcccgcaccgcccggtgctccccatctgcctggcgttgtgcgcagagctggaaagcatggctgttataaatgaattctgattttggggagcagatgccaacttagagcctcgtaccaatctctctgtctttaaaagatgaggtgacttggtgattttcctggaaaattataggtgcccagctaagacctgaatgccatcaccctccccagggctctgcagttttctcgtggtgaacccttgatggatttgttgttgcttgagaaatggcgatgatcgaattggggtttggaagacagaattttcatccattaaagaggaagagttcattgctgttgaaactcatagctgttgtctttgctgtgcttctattttgtgaatttttaatctattacttagcgatctttcagtgtaattggcctgaagtgaaaaccacagcctctgatggtgaacagaccacacgtgagcctgtgctcaaagccatgtttttggctgacacccatttgcttggggaattcctaggccactggctggacaaattacgaagggaatggcagatggagagagcgttccagacagctctgtggttgctgcagccggaagtcgtcttcatcctgggggatatctttgatgaagggaagtggagcacccctgaggcctgggcggatgatgtggagcggtttcagaaaatgttcagacacccaagtcatgtacagctgaaggtagttgctggaaaccatgacattggcttccattatgagatgaacacatacaaagtagaacgctttgagaaagtgttcagctctgaaagactgttttcttggaaaggcattaactttgtgatggtcaacagcgtggcgctgaacggggatggctgtggcatctgctctgaaacagaagcagagctcattgaagtttctcacagactgaactgctcccgagaggcacgtggctccagccggtgtggacctgggcctctgctgcccacgtctgcccctgtcctcctgcagcattatcctctgtatcggagaagtgatgctaactgttctggggaagacgctgctcctgcagaggaaagggacatcccatttaaggagaactatgacgtgctttcacgggaggcatcacaaaagctgctgtggtggctccagccgcgcctggttctcagtggccacacgcacagcgcctgcgaggtgcaccacgggggccgagtccccgagctcagcgtcccatctttcagttggaggaacagaaacaaccccagtttcatcatgggtagcatcacgcccacagactacaccctctccaagtgctacctcccacgtgaggatgtggttttgatcatctactgtggagtggtgggcttccttgtggtcctcacactcactcactttgggcttctagcctcaccttttctttctggtttgaacttgctcggaaagcgtaagacaagatgaagagcaggcgccattataaatatcaaagcccaagaaatggaactttgggcagagatcatgttagaatcaagtggatgatgagaccaattacaggccgtctctctgcacagcacagaaattctcaatcactgaaatgagtaactgcaaaataaatagttgattgtactgttctcatgctataaaagtggacaggtactctacaacaaatctgttttctcatttttatcaaatatatgtatcatcaaaggttgcatctgtacagtatgtaaatgctattaatgtcgtcactcacatgcacgacagtccttgttcccccaggaagggcctggtggccccagcacacacttgggattatgtgtatacataaataaatattgggctgtttccctcttcctgtgaagtggttctcaaattcctatgtactgtaaagctgtacccttaaaagtacagatgtggccgggcacagtggctcacacctgtaatcccagcactttgggaggctgaggcgggtggatcacttgaggtcaggagttcaagaccagcctggccaacatggtgaaacctcgtctccgctagaaatacaaaaattagccaagcatggtagcaagtgcctataataccagctgaggctgaggcaggagaatcccttgagcccgggaggcggaggttgcagtgagccaagatcatgccactgcactccagcctgggcaacagagtgagactccgtctcaaaaaatatatttaaaaaaaaaaaagtacagatgtgatgtgcagaacatattgttttcgtagatttttatacttgatcaattaatggaatcagatttttagataagtgtaattttctctataggagaccacgttgctacatctgttaatgcctgtcagtgatcaaaagaaacttaaaaagtggaatgggatatggcttttggtacctgaaaataaatgctttaataattgtaagccagataaaa

SEQ ID NO: 156 - DNA, 1982 bp, HOMO SAPIENS
aaatgtccggcgccggaatgtctgggtgctttggttggagagggtcccatttccagtcattcttcagcctggtgattcccgcgctcccctgaggagcatatgaagtacgtcggttctgccaggttggaacgcgctgctggacactcggccgtaaggcggatcccggatcccctcccactccgacccttccctccagaagggccggttcccaaacggcccctttagacacatccaagcggttgccgacggccctcacgatgaaaactgctgtccgttggtgaaggcagcctcttctgtgctcctcgccgctgacttcctgaggcggacctacctgtggaggcataccaggaaccagacgatgaccccctccaaaagttgggtctttgaggagagctactaacttgggttcctggtacaccctctacatgcagtggtgaagcttatctaacagtcattcatagaatcagtttgggaaggggaattttcactgaactctcatagagaaactgtgttttagataacagaaagttctgcacggttaaaatggaacagaaatttttttgcacagaaattaggattaccgaaaatactgaagaaagactacctctgattggactcttctcaaggaattaataattcaagaactaaggaaagaaaaaagtgattatatgaaaatactgaagttgatcgtagcagctgaaggctgatcctgtgtgggtaaatgtaaacgctgaattcccacattccaatgtgcgacctgggattaaggcagcaattgagcagggctgaagtacattggtgcaatcttggctcactgcatctccaccccaggttcaagcgattctcctgcctcagcctcccaagcagctgggattacagaatgtcacataaatggaatcatactgtgtccggaattggtgggttcttggtctcactgacttcaagaatgacgccatgggccctcgcggtgagtgttacagctcttaaggtggcgcgtctggagtttgttccttctgatgttcggatgtgttcggagtttcttccttctggtgggttcgtggtctcgctggctcaggagtgaagctgcagactttcgcgggctggccgactgctccgagtgcggggccgccaagcccacgcccacccggaactccagctggcccgcaagcgcctcacgcagccccggttcccgctcgcgcctctccctccacacctccctgcaagctgagggagtgggctccagccttggccagcccagaaaggggctcccacagtgcagtggtgggctgaagggctcctcaagtgccgccaaactgggagcccaggcagaggaggtgccgagagcaagcgagggctctgaggactgccagcacgctgtcacctctcaatacaatttcatctctctctctgctatggacacagatggcttcactccatcctgtattcttcggaccatgataaaattccagactctcgaagcatcagattccttcaagcaagggtttatgttggggtctctcaatctctgcgttagcacaggcatccagtcttcttatggagggggacggggaggtggaatggagaaacgagagaggcgaatcagagacctcactgccttctgcccattggtgctgcccgtggacggctggcacaggggagcaccccatgcttctgccttcaatgcagcttccggcttcggtcccgccccgccccctgtggccccgccccgcccccgcccccgcccctggctggcggtccagccccgcggcgccgcttccggtgcgggccccgccccggctgtggcccccggctgcggaggagtccgagacgcagctgccgcgccggggcctgagctgccgcctcctccgccgcccgaaaacccggagtgccccgcacagcattcagagaagatggtgccacaagacaagaagcagttgttcagtgactggcaggacttggttgagaagttattccgatcgtga

SEQ ID NO: 157 - DNA, 629 bp, HOMO SAPIENS
cttctaggtggtgtgggcgaagtttgggactggtttagggcggggacaagaccaagaacacaagtttccttgtactacgggagagagggaggggaggaaattggagaccccagcacccccttgctcactctcttgctcacagtccacgatggcccggtccctggtgtgccttggtgtcatcatcttgctgtctgccttctccggacctggtgtcaggggtggtcctatgcccaagctggctgaccggaagctgtgtgcggaccaggagtgcagccaccctatctccatggctgtggcccttcaggactacatggcccccgactgccgattcctgaccattcaccggggccaagtggtgtatgtcttctccaagctgaagggccgtgggcggctcttctggggaggcagcgttcagggagattactatggagatctggctgctcgcctgggctatttccccagtagcattgtccgagaggaccagaccctgaaacctggcaaagtcgatgtgaagacagacaaatgggatttctactgccagtgagctcagcctaccgctggccctgccgtttcccctccttggctttatgcaaatacaatcagcccagtgcaaaaaaaaaaaaaaaaaa

SEQ ID NO: 158 - DNA, 4314 bp, HOMO SAPIENS
gagagcagaggacgagccgggacgcggcgccgcggcaccagggcgcgcagccgggccggcccgaccccaccggccatacggtggagccatcgaagcccccacccacaggctgacagaggcaccgttcaccagagggctcaacaccgggatctatgtttaagttttaactctcgcctccaaagaccacgataattccttccccaaagcccagcagccccccagccccgcgcagccccagcctgcctcccggcgcccagatgcccgccatgccctccagcggccccggggacaccagcagctctgctgcggagcgggaggaggaccgaaaggacggagaggagcaggaggagccgcgtggcaaggaggagcgccaagagcccagcaccacggcacggaaggtggggcggcctgggaggaagcgcaagcaccccccggtggaaagcggtgacacgccaaaggaccctgcggtgatctccaagtccccatccatggcccaggactcaggcgcctcagagctattacccaatggggacttggagaagcggagtgagccccagccagaggaggggagccctgctggggggcagaagggcggggccccagcagagggagagggtgcagctgagaccctgcctgaagcctcaagagcagtggaaaatggctgctgcacccccaaggagggccgaggagcccctgcagaagcgggcaaagaacagaaggagaccaacatcgaatccatgaaaatggagggctcccggggccggctgcggggtggcttgggctgggagtccagcctccgtcagcggcccatgccgaggctcaccttccaggcgggggacccctactacatcagcaagcgcaagcgggacgagtggctggcacgctggaaaagggaggctgagaagaaagccaaggtcattgcaggaatgaatgctgtggaagaaaaccaggggcccggggagtctcagaaggtggaggaggccagccctcctgctgtgcagcagcccactgaccccgcatcccccactgtggctaccacgcctgagcccgtggggtccgatgctggggacaagaatgccaccaaagcaggcgatgacgagccagagtacgaggacggccggggctttggcattggggagctggtgtgggggaaactgcggggcttctcctggtggccaggccgcattgtgtcttggtggatgacgggccggagccgagcagctgaaggcacccgctgggtcatgtggttcggagacggcaaattctcagtggtgtgtgttgagaagctgatgccgctgagctcgttttgcagtgcgttccaccaggccacgtacaacaagcagcccatgtaccgcaaagccatctacgaggtcctgcaggtggccagcagccgcgcggggaagctgttcccggtgtgccacgacagcgatgagagtgacactgccaaggccgtggaggtgcagaacaagcccatgattgaatgggccctggggggcttccagccttctggccctaagggcctggagccaccagaagaagagaagaatccctacaaagaagtgtacacggacatgtgggtggaacctgaggcagctgcctacgcaccacctccaccagccaaaaagccccggaagagcacagcggagaagcccaaggtcaaggagattattgatgagcgcacaagagagcggctggtgtacgaggtgcggcagaagtgccggaacattgaggacatctgcatctcctgtgggagcctcaatgttaccctggaacaccccctcttcgttggaggaatgtgccaaaactgcaagaactgctttctggagtgtgcgtaccagtacgacgacgacggctaccagtcctactgcaccatctgctgtgggggccgtgaggtgctcatgtgcggaaacaacaactgctgcaggtgcttttgcgtggagtgtgtggacctcttggtggggccgggggctgcccaggcagccattaaggaagacccctggaactgctacatgtgcgggcacaagggtacctacgggctgctgcggcggcgagaggactggccctcccggctccagatgttcttcgctaataaccacgaccaggaatttgaccctccaaaggtttacccacctgtcccagctgagaagaggaagcccatccgggtgctgtctctctttgatggaatcgctacagggctcctggtgctgaaggacttgggcattcaggtggaccgctacattgcctcggaggtgtgtgaggactccatcacggtgggcatggtgcggcaccaggggaagatcatgtacgtcggggacgtccgcagcgtcacacagaagcatatccaggagtggggcccattcgatctggtgattgggggcagtccctgcaatgacctctccatcgtcaaccctgctcgcaagggcctctacgagggcactggccggctcttctttgagttctaccgcctcctgcatgatgcgcggcccaaggagggagatgatcgccccttcttctggctctttgagaatgtggtggccatgggcgttagtgacaagagggacatctcgcgatttctcgagtccaaccctgtgatgattgatgccaaagaagtgtcagctgcacacagggcccgctacttctggggtaaccttcccggtatgaacaggccgttggcatccactgtgaatgataagctggagctgcaggagtgtctggagcatggcaggatagccaagttcagcaaagtgaggaccattactacgaggtcaaactccataaagcagggcaaagaccagcattttcctgtcttcatgaatgagaaagaggacatcttatggtgcactgaaatggaaagggtatttggtttcccagtccactatactgacgtctccaacatgagccgcttggcgaggcagagactgctgggccggtcatggagcgtgccagtcatccgccacctcttcgctccgctgaaggagtattttgcgtgtgtgtaagggacatgggggcaaactgaggtagcgacacaaagttaaacaaacaaacaaaaaacacaaaacataataaaacaccaagaacatgaggatggagagaagtatcagcacccagaagagaaaaaggaatttaaaacaaaaaccacagaggcggaaataccggagggctttgccttgcgaaaagggttggacatcatctcctgatttttcaatgttattcttcagtcctatttaaaaacaaaaccaagctcccttcccttcctcccccttcccttttttttcggtcagaccttttattttctactcttttcagaggggttttctgtttgtttgggttttgtttcttgctgtgactgaaacaagaaggttattgcagcaaaaatcagtaacaaaaaatagtaacaataccttgcagaggaaaggtgggagagaggaaaaaaggaaattctatagaaatctatatattgggttgtttttttttttgttttttgttttttttttttgggtttttttttttactatatatcttttttttgttgtctctagcctgatcagataggagcacaagcaggggacggaaagagagagacactcaggcggcagcattccctcccagccactgagctgtcgtgccagcaccattcctggtcacgcaaaacagaacccagttagcagcagggagacgagaacaccacacaagacatttttctacagtatttcaggtgcctaccacacaggaaaccttgaagaaaatcagtttctagaagccgctgttacctcttgtttacagtttatatatatatgatagatatgagatatatatataaaaggtactgttaactactgtacaacccgacttcataatggtgctttcaaacagcgagatgagtaaaaacatcagcttccacgttgccttctgcgcaaagggtttcaccaaggatggagaaagggagacagcttgcagatggcgcgttctcacggtgggctcttccccttggtttgtaacgaagtgaaggaggagaacttgggagccaggttctccctgccaaaaagggggctagatgaggtggtcgggcccgtggacagctgagagtgggattcatccagactcatgcaataaccctttgattgttttctaaaaggagactccctcggcaagatggcagagggtacggagtcttcaggcccagtttctcactttagccaattcgagggctccttgtggtgggatcagaactaatccagagtgtgggaaagtgacagtcaaaaccccacctggagcaaataaaaaaacatacaaaacgtaaaaaaaaaaaaaaaa

SEQ ID NO: 159 - DNA, 12998 bp, HOMO SAPIENS
gacgcggggggaggggggtgcggcgagcggccccgctctctccccaccgctccgctcgcaccccagtgtaatgagggtcaccccctccccccagctggcccgggagggggcgcggggcacggttgatgccggcccaggatggatcagacctgtgaactacccagaagaaattgtctgctgcccttttccaatccagtgaatttagatgcccctgaagacaaggacagccctttcggtaatggtcaatccaatttttctgagccacttaatgggtgtactatgcagttatcgactgtcagtggaacatcccaaaatgcttatggacaagattctccatcttgttacattccactgcggagactacaggatttggcctccatgatcaatgtagagtatttaaatgggtctgctgatggatcagaatcctttcaagaccctgaaaaaagtgattcaagagctcagacgccaattgtttgcacttccttgagtcctggtggtcctacagcacttgctatgaaacaggaaccctcttgtaataactcccctgaactccaggtaaaagtaacaaagactatcaagaatggctttctgcactttgagaattttacttgtgtggacgatgcagatgtagattctgaaatggacccagaacagccagtcacagaggatgagagtatagaggagatctttgaggaaactcagaccaatgccacctgcaattatgagactaaatcagagaatggtgtaaaagtggccatgggaagtgaacaagacagcacaccagagagtagacacggtgcagtcaaatcgccattcttgccattagctcctcagactgaaacacagaaaaataagcaaagaaatgaagtggacggcagcaatgaaaaagcagcccttctcccagcccccttttcactaggagacacaaacattacaatagaagagcaattaaactcaataaatttatcttttcaggatgatccagattccagtaccagtacattaggaaacatgctagaattacctggaacttcatcatcatctacttcacaggaattgccattttgtcaacctaagaaaaagtctacgccactgaagtatgaagttggagatctcatctgggcaaaattcaagagacgcccatggtggccctgcaggatttgttctgatccgttgattaacacacattcaaaaatgaaagtttccaaccggaggccctatcggcagtactacgtggaggcttttggagatccttctgagagagcctgggtggctggaaaagcaatcgtcatgtttgaaggcagacatcaattcgaagagctacctgtccttaggagaagagggaaacagaaagaaaaaggatataggcataaggttcctcagaaaattttgagtaaatgggaagccagtgttggacttgcagaacagtatgatgttcccaaggggtcaaagaaccgaaaatgtattcctggttcaatcaagttggacagtgaagaagatatgccatttgaagactgcacaaatgatcctgagtcagaacatgacctgttgcttaatggctgtttgaaatcactggcttttgattctgaacattctgcagatgagaaggaaaagccttgcgctaaatctcgagccagaaagagctctgataatccaaaaaggactagtgtgaaaaagggccacatacaatttgaagcacataaagatgaacggaggggaaagattccagagaaccttggcctaaactttatctctggggatatatctgatacgcaggcctctaatgaactttccaggatagcaaatagcctcacagggtccaacactgccccaggaagttttctgttttcttcctgtggaaaaaacactgcaaagaaagaatttgagacttcaaatggtgactctttattgggcttgcctgagggtgctttgatctcaaagtgttctcgagagaagaataaaccccaacgaagcctggtgtgtggttcaaaagtgaagctctgctatattggagcaggtgatgaggaaaagcgaagtgattccattagtatctgtaccacttctgatgatggaagcagtgacctggatcccatagaacacagctcagagtctgataacagtgtccttgaaattccagatgctttcgatagaacagagaacatgttatctatgcagaaaaatgaaaagataaagtattctaggtttgctgccacaaacactagggtaaaagcaaaacagaagcctctcattagtaactcacatacagaccacttaatgggttgtactaagagtgcagagcctggaaccgagacgtctcaggttaatctctctgatctgaaggcatctactcttgttcacaaaccccagtcagattttacaaatgatgctctctctccaaaattcaacctgtcatcaagcatatccagtgagaactcgttaataaagggtggggcagcaaatcaagctctattacattcgaaaagcaaacagcccaagttccgaagtataaagtgcaaacacaaagaaaatccagttatggcagaacccccagttataaatgaggagtgcagtttgaaatgctgctcttctgataccaaaggctctcctttggccagcatttctaaaagtgggaaagtggatggtctaaaactactgaacaatatgcatgagaaaaccagggattcaagtgacatagaaacagcagtggtgaaacatgttttatccgagttgaaggaactctcttacagatccttaggtgaggatgtcagtgactctggaacatcaaagccatcaaaaccattacttttctcttctgcttctagtcagaatcacatacctattgaaccagactacaaattcagtacattgctaatgatgttgaaagatatgcatgatagtaagacgaaggagcagcggttgatgactgctcaaaacctggtctcttaccggagtcctggtcgtggggactgttctactaatagtcctgtaggagtctctaaggttttggtttcaggaggctccacacacaattcagagaaaaagggagatggcactcagaactccgccaatcctagccctagtgggggtgactctgcattatctggcgagttgtctgcttccctacctggcttactgtccgacaagagagacctccctgcttctggtaaaagtcgttcagactgtgttactaggcgcaactgtggacgatcaaagccttcatccaaattgcgagatgctttttcagcccaaatggtaaagaacacagtgaaccgtaaagccttaaagaccgagcgcaaaagaaaactgaatcagcttccaagtgtgactcttgatgctgtactgcagggagaccgagaacgtggaggttcattgagaggtggggcagaagatcctagtaaagaggatccccttcagataatgggccacttaacaagtgaagatggtgaccatttttctgatgtgcatttcgatagcaaggttaagcaatctgatcctggtaaaatttctgaaaaaggactctcttttgaaaacggaaaaggcccagagctggactctgtaatgaacagtgagaatgatgaactcaatggtgtaaatcaagtggtgcctaaaaagcggtggcagcgtttaaaccaaaggcgcactaaacctcgtaagcgcatgaacagatttaaagagaaagaaaactctgagtgtgcctttagggtcttacttcctagtgaccctgtgcaggaggggcgggatgagtttccagagcatagaactccttcagcaagcatacttgaggaaccactgacagagcaaaatcatgctgactgcttagattcagctgggccacggttaaatgtttgtgataaatccagtgccagcattggtgacatggaaaaggagccaggaattcccagtttgacaccacaggctgagctccctgaaccagctgtgcggtcagagaagaaacgccttaggaagccaagcaagtggcttttggaatatacagaagaatatgatcagatatttgctcctaagaaaaaacaaaagaaggtacaggagcaggtgcacaaggtaagttcccgctgtgaagaggaaagccttctagcccgaggtcgatctagtgctcagaacaagcaggtggacgagaattctttgatttcaaccaaagaagagcctccagttcttgaaagggaggctccgtttttggagggccccttggctcagtcagaacttggaggtggacatgctgagttgccgcagctgaccttgtctgtgcctgtggctccggaagtctctccacggcctgcccttgagtctgaggaattgctagttaaaacgccaggaaattatgaaagtaaacgtcaaagaaaaccaactaagaaacttcttgaatccaatgatttagaccctggatttatgcccaagaagggggaccttggcctttctaaaaagtgctatgaagctggtcacctggagaatggcataactgaatcttgtgccacatcttattcaaaagattttggtggaggcactaccaagatatttgacaagccaaggaagcgaaaacgacagaggcatgctgcagccaagatgcagtgtaaaaaagtgaaaaatgatgactcgtcaaaagagattccaggctcagagggagaactaatgcctcacaggacggccacaagccccaaggagactgttgaggaaggtgtagaacacgatcccgggatgcctgcctctaaaaaaatgcagggtgaacgcggtggaggagctgcactcaaggagaatgtctgtcagaattgtgaaaaattgggtgagctgctgttatgtgaggctcagtgctgtggggctttccacctggagtgccttggattgactgagatgccaagaggaaaatttatctgcaatgaatgtcgcacaggaatccatacctgttttgtatgtaagcagagtggggaagatgttaaaaggtgccttctacccttgtgtggaaagttttaccatgaagagtgtgtccagaagtacccacccactgttatgcagaacaagggcttccggtgctccctccacatctgtataacctgtcatgctgctaatccagccaatgtttctgcatctaaaggtcggttgatgcgctgtgtccgctgtcctgtggcataccacgccaatgacttttgcctggctgctgggtcaaagatccttgcatctaatagtatcatctgccctaatcactttacccctaggcggggctgccgaaatcatgagcatgttaatgttagctggtgctttgtgtgctcagaaggaggcagccttctgtgctgtgattcttgccctgctgcttttcatcgtgaatgcctgaacattgatatccctgaaggaaactggtattgcaatgactgtaaagcaggcaaaaagccacactacagggagattgtctgggtaaaagttggacgatacaggtggtggccagctgagatctgccatcctcgagctgttccttccaacattgataagatgagacatgatgtgggagagttcccagtcctcttttttggatctaatgactatttgtggactcaccaggcccgagtcttcccttacatggagggtgacgtgagcagcaaggataagatgggcaaaggagtggatgggacatataaaaaagctcttcaggaagctgcagcaaggtttgaggaattaaaggcccaaaaagagctaagacagctgcaggaagaccgaaagaatgacaagaagccaccaccttataaacatataaaggtaaaccgtcctattggcagggtacagatcttcactgcagacttatctgaaataccccgttgcaactgtaaagctactgatgagaacccctgtgggatagactctgaatgcatcaaccgcatgctgctctatgagtgccaccccacagtgtgtcctgccggagggcgctgtcaaaaccagtgcttttccaagcgccaatatccagaggttgaaattttccgcacattacagcggggttggggtctacggacaaaaacagatattaaaaagggtgaatttgtgaatgagtatgtgggtgagcttatagatgaagaagaatgcagagctcgaattcgctatgctcaagaacatgatatcactaatttctatatgctcaccctagacaaagaccgaatcattgatgctggtcccaaaggaaactatgctcggttcatgaatcattgctgccagcccaactgtgaaacacagaagtggtctgtgaatggagatacccgtgtaggcctttttgcactaagtgacattaaagcaggcactgaacttaccttcaactacaacctagaatgtcttgggaatggaaagactgtttgcaaatgtggagccccgaactgcagtggcttcttgggtgtaaggccaaagaatcaacccattgccacggaagaaaagtcaaagaaattcaagaagaagcaacagggaaagcgcaggacccagggtgaaatcacaaaggagcgagaagatgagtgttttagttgtggggatgctggccagctcgtctcctgcaagaaaccaggctgcccaaaagtttaccacgcagactgtctcaatctgaccaagcgaccagcagggaaatgggaatgtccgtggcatcagtgtgacatctgcgggaaggaagcagcctccttctgtgagatgtgccccagctccttttgtaagcagcatcgagaagggatgcttttcatttccaaactggatgggcgtctgtcttgtactgagcatgacccctgtgggcccaatcctctggaacctggggagatccgtgagtatgtgcctcccccagtaccgctgcctccagggccaagcactcacctggcagagcaatcaacaggaatggctgctcaggcacccaaaatgtcagataaacctcctgctgacaccaaccagatgctgtcgctctccaaaaaagctctggcagggacttgtcagaggccattgctacctgaaagacctcttgagagaactgactccaggccccagcctttagataaggtcagagacctcgctgggtcagggaccaaatcccaatccttggtttccagccagaggccactggacaggccaccagcagtggcaggaccaagaccccagctaagcgacaaaccctctccagtgaccagcccaagctcctcaccctcagtcaggtcccaaccactggaaagacctctggggacggctgacccaaggctggataaatccataggtgctgccagcccaaggccccagtcactggagaaaacctcagttcccactggcctgagacttccgccgccagacagactgctcattactagcagtcccaaaccccagacttcagacaggcctactgacaaaccccatgcctctttgtcccagagactcccacctcctgagaaagtactatcagctgtggtccagacccttgtagctaaagaaaaagcactgaggcctgtggaccagaatactcagtcaaaaaatagagctgctttggtgatggatctcatagacctaactcctcgccagaaggagcgggcagcttcacctcatcaggtcacaccacaggctgatgagaagatgccagtgttggagtcaagttcatggcctgccagcaaaggtctggggcatatgccgagagctgttgagaaaggctgtgtgtcagatcctcttcagacatctgggaaagcagcagccccttcagaggacccctggcaagctgttaaatcactcacccaggccagacttctttctcagcctcctgccaaggcctttttatatgagccaacaactcaggcctcaggaagagcttctgcaggggctgagcagaccccagggcctcttagccaatccccgggcctggtgaagcaggcgaagcagatggtcggaggccagcaactacctgcacttgccgccaagagtgggcaatcttttaggtctctcgggaaggccccagcctccctccccactgaagaaaagaagttggtaaccacagagcaaagtccctgggccctgggaaaagcctcatcacgggcagggctctggcccatagtggctggacagacactggcacagtcttgctggtctgctgggagcacacagacattggcacagacttgctggtctcttggaagagggcaagaccccaaaccagagcaaaatacacttccagctcttaaccaggctccttccagtcacaagtgtgcagaatcagaacagaagtagtaccaatcaatgtcacatgaacaaacaagctgcccccagggtaccatttggggaggggaaatcttttctttctttcccccttaaaaaaaaacacatctgccccgaacactttcccactgttattctttcctcatatcccaacactcagaactcttgtgacattagccagtgggggcttatggttgtgtgaaccatgtatgaaaatccagtgggccccaaccaaggagacagacagacttgggtctctttcccccaacttttccacatggtcatcgtgaaataaaaagtccactctggagtcaagtatggaattcaattccgctggtcaggttggaaggtataggggctctcaaagcgatttccccaaccagacagagccccattgagggcacctaggaacccttgggaggaaatggtgttctttcaaatcagtggcgatttcctgagcattcacgtgttctaggccgggtgctagtcactgatgagagatacaggcctcatccctgtgagcctggattccaaggctttcaggaacctttgaccaggaagtaacaggaagttctgaggggccctggggctttagactcattttgaaatgtcctttgtggcaccagaagtggttgtgttgaggaagtgtctcttggctgcggtgtgcatgggtgcgtgtgcatgcgcgcacactcacagaggtctcctctatagatgcaagggtgctgcattgaggccagcaaggctgttggctgtggggtcgccgctgctgcttttgtctgggctgtgcagagtctcaagatcagtccttggaggagcaggtggtcaggggcagtcgggctctgtgcgaatgtagatttccagcagtggaagaaggcatttggcaagcttctctttctttgcttttgtttctacctatttttctctttgtacatgaatccaccccatccctatttccctaaaacactcaggtgctttcagatttcagagcctcgggcagtggacatagggaatctctggcaagctctgagctagacacaccagcttcaggaagagtaccagatcctgatgggaaatttcttttccccattccttttccctcctgagtggagggagtcctcttcttcgcctccctgagaattgctgtgctctgtattgagagcacctgcctgctgacttagctcaaaggcaagccagaacccttccctgaagactggcaagaggtggtgtttagagcaacgtccaggctaagagatgactcctattaactgctgattatctgttactgctgccctgagctggggcccaagggctgggaaatctgttggtgctaccctgccctaccattcacccagctcacagactgccaacaggaagtgctgtttggctagtttcctcccacttgtctacccctcctttgtccttagaccaacatgtttacctctctgctttgccaacttagccagcaggccatccccggccctaacgtctcctggccattatctcttagttatggctttcacgctctcaataggattctgtatttggtcccaatttcctcaagttcttattgaggttactcccatcaattccacggagggaacagtagttattatagaagcatttgcgctttatctaaagattaaaaatagaatctgcttttatttcccaaagtctgtctctgaggttgagacacttgaactcaggcagagggacgaggctgggcagggctgtcctgagtttaggggcctatccctgcatttcactgagacctcggaatctcctctgtgaattccacctgcctagttctcccctttcatcctctctctcttcccacatcatcaaagaggaaaagctctttgttcaaaaggaagagaaaacgtaaagcatcttattttcttttaaaagaattttaaaccatgaaaaagatatttttaaagaaattcaccgagaacattaaagttcattatattaagtatttatcatgtgtgagaataataaatatataactgcagctagtaggtccctttccctaatcttttaggtcatatgagtagggtttgcttggtgccagtcctgtgcccttttctctccagtcatctgtagttgtgatcagaaaaaggtatctgcactgcactgtcagagtctcctttcactatgttgtgtgttaaattaccgtagctctttgtttcatgaaataaactgtgaatttggggggggcggggggagggcgtgcaggccatgtaaaaattttccgtggagaagtttgattctaaagtagcttctctaaagtaggctttggtaggtaatcaacttgacagcagtctagatgtctcacaggacaggagggagtgagggaaaggggccatgattggctgctttgtggttttattttggttctttccattctccgccattcattggaggcttcgttccagacctgcctgggaaaacagcttctgagccattttggggagcagttcttcatctgaatggatggacatctgggcttccttcaagggccattgaatgggaactagaaaaccactggaaactagaaatttgagctattgggcccaccagtagcagcatgtgatactagatggttaaaatcatgaaagcagtcactatccaattagaagcagagtcacaacaactgttgggaaatgtgactcttggaggaaggtggggagggagtggccttgccagccctgtgggacgtcccctgaagtttgtaataagaccccttttccaaagggatgtgaattggagtgaaaaggaaatctttcatcttagaaaacttctggtccttaacgcagggtggtatttgggtatgtgcttggaaattgagatctcaagagtgtttgccttggagccagctccccaggaggccttttccagggacaaggcaaaagttgaaattctccatgggtagctagaaagccaatacatctagccctgctaagtcagaaaaagattatgaaaaatgttgaaatttacattcaaagcctcatttgcttatcttgctggagccaacccagtctaatagcaaaatagctgtcattgatacagaaacatcctcatttttaaatgtctgctttaccctgttactgagtttgagatgacttaaatcactgtgttgaccctcttctgaaccaaatctttagcattgatgaaaatagttattttattctttacatccttcaccccacactatggtcagggcatgaaacaccctgttgatcccttcccaggctcggcactgtctgctcactggagccggactcccaggttgtaattctaatgttgcctcatgagaacagaatggcagaaagtttagtcctgacagattcccccatagggagtaatgaggacagcatgaaacttggataggttttacccttagtccctataaggtggattttactaaggttttttaaatgatactgtcatcctcttggggtttatcagccaggttagaggagcccagtgtcctaacctctctcagatcatggcagagaaggagctgcctccagcccctttcttgctgagtttcatttgagcagttccatgtgtagacattccaagtcactgcttggtagttgctgtgggagcctgtcattggctatggccagttagttctcagctgagcttcctagggccagtgcaacagggccagaggctgctatagtgtaaattgaaataagaatagatcattgttttgtacacacacacaataaaatgtaatgatggtgctaatttcacggtataaataagcactgccaagggttgagggactggcagctcaagaaacccgggttcctgtttgggaggagattttatgtagaaaagtttgaggctttgttaaaagtggggagaaggaagatcctcagtgaagcctgcacccaaccctggagtggcccagtgcaatccagaggtggaagagatcctatatccaggtgaaggtggccattgagtttctcagggctggggccaccttgtccatagcctccgtccacgctgcctggagcaggttgttagagagctctggttgttgggtcttcctcagctcccttctgcccctctctacctcttccactcatggaagcccctctactgcttatgaagattaagggtagtattttctaaggaagtggaaagaattaaactagaaatccacaacctcggaagaagtgtttcgagtttaacatgcgctgtttctgcttatgtggttccttctctagagctgctttcccatggctttcaaaacatcaggttattgtggggcttcaggtgtaaggtcctggaagttcagcaaagtttcgtggacaagacatgggcacagagagtagaagcagaaataaatggttctatgttttcaacttccagggttggggcaggccagagcaaggcggtctcatcgaggtgggtgctacctgtgtgtgtgtagatgagtgtgctgaaggtggggagggcagcacacagcagctcatggcagagccgcctcctaggtcttggcaaagaggcaagctgacgatagacatctacctatattgttaagaaaggggtcggggggatcagccaaggtccatcattgcttttttgccgcgcccccccccccccgcccccatagattgtcagctgtaagtgaaactcctagtgaaaaagaggggagccctgtgttaggagtccccataaacatgtactgtaattctttgtatatagaaaaaaaatttactgtaaagtaaagtttaactttactcataaaaaaaaaaaaaaaa

SEQ ID NO: 160 - DNA, 3900 bp, HOMO SAPIENS
agatcagttacctcctagcctttcctagtcacattatccccaggctacagatgaggaaactgaggcccaaggattccagagagcctgccccggggtcaccggtgcggtccggatgtctccaaaggctctcccactactctggaattcagaggcccttcctcgtgctgccgccgctgatggagtggatccgggtggccgtggcgcacgccggccaccgccgcagcttctccatggacagcgacgacgtccgccaggcggcccggctgctgctgcccggcgtggactgcgagccgcgccagctcagggccgacgactgcttttgtgcatctcgaaagctggatgcggtggccatcgaagccaagtttaagcaggacctgggtttccggatgctgaactgtggacgaacagacctggtgaagcaggcagtgtctctgctggggcccgatgggatcaacaccatgagcgaacagggcatgactcccctgatgtatgcctgcgtccgtggggacgaggcgatggttcagatgctgctggatgccggagctgacctgaatgtggaggttgtcagtactcctcataaatatccatccgtccaccccgagacccgccattggacggctctgacttttgctgtgttgcatggacatattcctgtagttcagctcctcctggatgctggggccaaggtggaaggctcagtggagcatggcgaggagaactactcggaaacacccctccagctggcagctgctgtaggaaattttgagctggttagtttgctgttggagcgtggtgccgatcccctgataggaaccatgtacaggaatggaatttctacaaccccccagggtgatatgaactctttcagccaggctgcagcccacggacacaggaatgtgttccgcaaactgctcgcccagccagagaaggagaagagtgatatcctgtccctggaggagattctggccgaggggactgacctggcggagacagccccgccccccttgtgcgccagccgcaacagcaaggccaaactgagggccctgagggaggccatgtatcacagcgctgagcatggctacgtggatgtcacaattgatatcaggagcataggcgtcccgtggactctgcacacgtggctggagtctttgcggatcgccttccagcagcaccgcaggcctctcatccagtgcttgttaaaggagtttaagaccattcaggaggaggaatacacggaggagctcgttacccaaggcctgcccctgatgtttgagatcctgaaagcgagcaagaatgaagtgatcagccagcagctgtgcgtcatcttcacacactgctacgggccctaccccatccccaagctcacagaaatcaaacggaaacagacctcgcgcttggatcctcattttcttaacaataaagaaatgtctgatgttacatttctggtagaaggaagaccattttatgctcacaaagtgctgttatttacagcctctccaaggttcaaagcactcctctccagcaagccgacaaatgatggcacctgcatagagattggttatgtgaaatactccatctttcagctggttatgcagtatctctactatggtggcccagagtcactgctcattaaaaacaatgagatcatggagcttctgtctgctgctaagtttttccagctggaggctttgcagcgacactgtgagattatctgtgcgaaaagcatcaataccgacaactgtgtggatatttacaaccatgccaagtttcttggagtcacagagctctcagcatattgcgaaggctactttctcaaaaacatgatggtcctcattgaaaacgaagcattcaagcagctcctgtatgacaaaaatggtgaagggaccggccaggatgtgctccaggacttacagaggacgttggccatcagaattcagtccatccacttgtcgtcttccaaaggttccgtggtatgaaacgcctagtgcagggaatgcttcccgggaactttccagttctcctgccgcattggctttacacaaacacagacaaattccacctggcacctgtttttggctgggccaaggagctgcctctactgctcccacgtgttcctgttgaaaaacaaaggactttccactggtctgcagatcagatcagctgggtccagagtttaatgggcaactggacaaccaagttaaccccaattgaaagcacccctaggaccattgaacacccactgccggggaccactgtccagtgaatggattgaggccttttaaaggtcactcaggttccaggttgacagttggaggacttcaccgtaccaaccctgaagagattgtattacacattaaggaccttggtagctgtgcttcagcaaacgtcaaccatggtagcaaattggtgaggctgtgaccaataatgaggaaataatctggcaaatttttaggggtgggaacttttttaaatgttcatttaaaaaaaaacaaaaacagggcagtcttgtagtttaaaatatatttctaaaagcttaacagttcgttttcaactaaattgtgtttagggatctgtgtttgagatttttctttatttcttttttttttttaaatagtaagtcacaggtccacactgtgtaaacatgcatctgataagatactgctgatattctaaacaagttgaaataatcttgccttagtgatcatgattacacaaaagaggtgcactgccaataagtatctctaattcaatagttgaaagcaacctgcatgctaatcgtggtttcggggtgagaataaaacacccccacataacatgcatttgcatgggcccgaacctgtgaaatgttacgtttgtgcttcatttttgccaaggtaaaaatgttccatcatttctagctaaaactccatttggtgaaaccaacatatccatttcttttcctagttacggatgatttggggatgcttttgcagaaatgtgttcatagatgatgctgaatgggggaggggggcagcacgtcagagaatttactattaatcccagagttttctctgtattctcagaagatgttaatagtttgttactagccagagagtatgactatgttagattatttttaaagatgaaacatgtatgataggatggattctttctgtattctgagagtgtacagtacaggattattataatgaaagtttatatcaacagggtttcgttggctctgccatatattataagcaaaagagattggtaaagtgccacagtattccagataacttttcagttgcggcctttcttctcgttctttaatttgaaacctagatacatgcagtaaaaactaggagaatgacttttacccttggggacagccaagttttgttgataaacctatttcctagcatgccttcaggaagttgtgccagaccctagattgtgaaggacccactgttcttctgttgtacgagctccctgaaccattgttcagaggaccaatgtcacatcgcttcatgggcatggcccatggagcatctgggtgatatctgtctacagtattggctcttctgcgaggctgatacacaaggcctctcttccacatgatcatttgcaaacctcccccagcccctaccatccaatgtggaaggaaaacaagaactgcctgaagaagagtccaagctacagatacacagcgtgtgcattgcggctgtcaccttcctcctcccacttctgtatcctcagagatgctgcgtggatgtttccttaacctcagctgacttccctgtgaatgtctaatgctagttcagggcctccaggcattgatttgtacagtggtaactcccaatgaggcttctgttatcatttggtgtgctttctctgtcattaaaagaaatgattttcccaggc

SEQ ID NO: 161 - DNA, 241 bp, HOMO SAPIENS
  misc_feature (88)..(88): n is a, c, g, or t
gctgcctttgcactggcgaagggaggggcactggttatgttgtttccattcgacagtccttccaaaggcttccctccagcgccactanccaaatccagaaaagcgtcctcctccagaaggtaccaccaaacctttaaaacctttaaaggctcctccagtgtcagattcaaatccaacatttctgcgctttgctttctttatggctctattcttcaagacttcctcactggccatggagaat

SEQ ID NO: 162 - DNA, 366 bp, HOMO SAPIENS
  misc_feature (81)..(81): n is a, c, g, or t
  misc_feature (201)..(201): n is a, c, g, or t
  misc_feature (221)..(221): n is a, c, g, or t
  misc_feature (271)..(271): n is a, c, g, or t
gatttcagattgagtctcttgccctaattgatgcaatttacactccatgcatctccttccctggaccttctccagttcttngggactacagatgaacttacttttaatgcattttatggcatttggaggccctccagtggacaaatactatacctgaaaaaaatccttttgctgtgctaaagtgttcaggtgtgaagtgtnactcatgtttgcaaatcacntttgaaatatataaacaaaaatgaattaatggatgaatagagtgatgcanagatcattagacatgtgataaaaataactgttaattgtagaatctagatgatgagtatattatatgatatggcccactgtataattctttcaact

SEQ ID NO: 163 - DNA, 967 bp, HOMO SAPIENS
tttcttgaaagaggcatttaccgagcgcccaatgtatgcctggcactgggctgggtgctgccacctaagcgagcacgaccaatgcagtctatcagggaggcccagatcgccaagcagcggacccctgcggtccgccatgccactcccggctcctagagcgccgctcagcacaccgtgagcgcccaataactgttgggcttcaatgacgccgcggaggcggccccgtccccgcgctcccgcccctcccgccagggcagcccgggaggccagacgttgacgctgcagggagagggtggtgggcgcagccgctagggggcgcggcggggcggagcgcacctttccgcgggccgcggggatggcggcgcagggcgtagggcctgggccggggtcggcggcgcccccggggctggaggcggcccggcagaagctggcgctgcggcggaagaaggtgctgagcaccgaggagatggagctgtacgagctggcgcaggcggcgggcggcgctatcgaccccgacgtgttcaagatcctggtggacctgctgaagctgaacgtggcccccctcgccgtcttccagatgctcaagtccatgtgtgccgggcagaggctagcgagcgagccccaggaccctgcggccgtgtctctgcccacgtcgagcgtgcccgagacccgagggagaaacaaaggcagcgctgccctcgggggagcattggccctggcggaacgcagcagccgcgaaggatccagccagaggatgccacgccagcccagcgctaccaggctgcccaaggggggcgggcctgggaagagccctacacggggcagcacctaggatggggcagagacttgttgcatctttgtccccagcaaaggctacatgttacctccttcaattgataataaacctttctgagatgcagagggtccaggtcaaaaaaaaaaaaaaaaaaaaaaaaaaaaaaaaaaa

SEQ ID NO: 164 - DNA, 2555 bp, HOMO SAPIENS
gaagtgatgtgagtggtggctggtgcaaggagccacagtgggctgcctggggggctgatgccaccattccaggagcctcggtgaagagaggatatccatctgtgtagccgcttctctatacgggattccagagcccaagtgccccctgtctctgcagctccatggcagcccgtctgctcctcctgggcatccttctcctgctgctgcccctgcccgtccctgccccgtgccacacagccgcacgctcagagtgcaagcgcagccacaagttcgtgcctggtgcatggctggccggggagggtgtggacgtgaccagcctccgccgctcgggctccttcccagtggacacacaaaggttcctgcggcccgacggcacctgcaccctctgtgaaaatgccctacaggagggcaccctccagcgcctgcctctggcgctcaccaactggcgggcccagggctctggctgccagcgccatgtaaccagggccaaagtcagctccactgaagctgtggcccgggatgcggctcgtagcatccgcaacgactggaaggtcgggctggacgtgactcctaagcccaccagcaatgtgcatgtgtctgtggccggctcacactcacaggcagccaactttgcagcccagaagacccaccaggaccagtacagcttcagcactgacacggtggagtgccgcttctacagtttccatgtggtacacactcccccgctgcaccctgacttcaagagggccctcggggacctgccccaccacttcaacgcctccacccagcccgcctacctcaggcttatctccaactacggcacccacttcatccgggctgtggagctgggtggccgcatatcggccctcactgccctgcgcacctgcgagctggccctggaagggctcacggacaacgaggtggaggactgcctgactgtcgaggcccaggtcaacataggcatccacggcagcatctctgccgaagccaaggcctgtgaggagaagaagaagaagcacaagatgacggcctccttccaccaaacctaccgggagcgccactcggaagtggttggcggccatcacacctccattaacgacctgctgttcgggatccaggccgggcccgagcagtactcagcctgggtaaactcgctgcccggcagccctggcctggtggactacaccctggaacccctgcacgtgctgctggacagccaggacccgcggcgggaggcactgaggagggccctgagtcagtacctgacggacagggctcgctggagggactgcagccggccgtgcccaccagggcggcagaagagcccccgagacccatgccagtgtgtgtgccatggctcagcggtcaccacccaggactgctgccctcggcagaggggcctggcccagctggaggtgaccttcatccaagcatggggcctgtggggggactggttcactgccacggatgcctatgtgaagctcttctttggtggccaggagctgaggacgagcaccgtgtgggacaataacaaccccatctggtcagtgcggctggattttggggatgtgctcctggccacaggggggcccctgaggttgcaggtctgggatcaggactctggcagggacgatgacctccttggcacctgtgatcaggctcccaagtctggttcccatgaggtgagatgcaacctgaatcatggccacctaaaattccgctatcatgccaggtgcttgccccacctgggaggaggcacctgcctggactatgtcccccaaatgcttctgggggagcctccaggaaaccggagtggggccgtgtggtgagaacagtgagcttggaaaggaccagtatgcttggactgaaggggttctcacagtgggagccagggctgtcttcgtattcccattagaccaagcttgtccaacccgaggcccgcatgcggcccaggatggctttgaatgcggcccaacgcaaattcgcaaactttcttaaaacattatgagtttctttttgctattttttttttttttttagctcatcggctatcgttagtgctagtggattttacatgtggcccaacacaattcttcttccaacgtggcccagagaagccaaaagattggatacgcatcagacagatggaaaagggagattcagactgtttttcagggaggtggctgggtttacacgctaatcccgattcaccctgtccaaactgcctaagccctccgccattctcaagccctgcagtcacagctacacagatcacagcttcagccaggagctgggcagaaggccaagaggctgttcccaccaggctgctcagggctggtcttttaggacccttcccttgagccctctatggtgtggcaaagccttcattgccttaactggagccccatcagctccagctgctctgtcttctttgcccacaatgctttgcccctgagacaaatggaggcctgtcctgacctgtctcaccatgtacatagcttgataaagggccaataaatatgatgttatggtgaaaaaaaaaaaaaaaaaaaaaa

SEQ ID NO: 165 - DNA, 3220 bp, HOMO SAPIENS
tcactggagaggaggcagggacagacccagcagcacccacctgagcgagaagagcagacaccgtgctcctggaatcacccagcatgttgcaaggtctcctgccagtcagtctcctcctctctgttgcagtaagtgctataaaagaactccctggggtgaagaagtatgaagtggtttatcctataagacttcatccactgcataaaagagaggccaaagagccagagcaacaggaacaatttgaaactgaattaaagtataaaatgacaattaatggaaaaattgcagtgctttatttgaaaaaaaacaagaacctccttgcaccaggctacacggaaacatattataattccactggaaaggagatcaccacaagcccacaaattatggatgattgttattatcaaggacatattcttaatgaaaaggtttctgacgctagcatcagcacatgtaggggtctaaggggctacttcagtcagggggatcaaagatactttattgaacctttaagccccatacatcgggatggacaggagcatgcactcttcaagtataaccctgatgaaaagaattatgacagcacctgtgggatggatggtgtgttgtgggcccacgatttgcagcagaacattgccctacctgccaccaaactagtaaaattgaaagacaggaaggttcaggaacatgagaaatacatagaatattatttggtcctggataatggtgagtttaaaaggtacaatgagaatcaagatgagatcagaaagagggtatttgagatggctaattatgtcaacatgctttataaaaagctcaatactcatgtggccttagttggtatggaaatctggactgacaaggataagataaagataaccccaaatgcaagcttcaccttggagaatttttctaaatggagggggagtgttctctcaagaagaaagcgtcatgatattgctcagttaatcacagcaacagaacttgctggaacgactgtgggtcttgcatttatgtctacaatgtgttctccttattctgttggcgttgttcaggaccacagcgataatcttcttagagttgcagggacaatggcacatgaaatgggccacaactttggaatgtttcatgacgactattcttgcaagtgtccttctacaatatgtgtgatggacaaagcactgagcttctatatacccacagacttcagttcctgcagccgtctcagctatgacaagttttttgaagataaattatcaaattgcctctttaatgctccattgcctacagatatcatatccactccaatttgtgggaaccagttggtggaaatgggagaggactgtgattgtgggacatctgaggaatgtaccaatatttgctgtgatgctaagacatgtaaaatcaaagcaacttttcaatgtgcattaggagaatgttgtgaaaaatgccaatttaaaaaggctgggatggtgtgcagaccagcaaaagatgagtgcgacctgcctgaaatgtgtaatggtaaatctggtaattgtcctgatgatagattccaagtcaatggcttcccttgccatcacgggaagggccactgcttgatggggacatgccccacactgcaggagcagtgcacagagctgtggggaccaggaactgaggttgcagataagtcatgttacaacaggaatgaaggtgggtcaaagtacgggtactgtcgcagagtggatgacacactcattccctgcaaagcaaatgataccatgtgtgggaagttgttctgtcaaggtgggtcggataatttgccctggaaaggacggatagtgactttcctgacatgtaaaacatttgatcctgaagacacaagtcaagaaataggcatggtggccaatggaactaagtgtggcgataacaaggtttgcattaatgcagaatgtgtggatattgagaaagcctacaaatcaaccaattgctcatctaagtgcaaaggacatgctgtgtgtgaccatgagctccagtgtcaatgtgaggaaggatggatccctcccgactgcgatgactcctcagtggtcttccacttctccattgtggttggggtgctgttcccaatggcggtcatttttgtggtggttgctatggtaatccggcaccagagctccagagaaaagcagaagaaagatcagaggccactatctaccactggcaccaggccacacaaacagaagaggaaaccccagatggtaaaggctgttcaaccccaagagatgagtcagatgaagccccatgtgtatgatctgccagtagaaggcaatgagcccccagcctcttttcataaagacacaaacgcacttccccctactgttttcaaggataatccagtgtctacacctaaggactcaaatccaaaagcatgaagcaacagctaagcaagaactaatggctaaattatcaacttggaaaactggaaaatctggatggcagagaaatatactatctatctcaccagtatttgctctcgactcaagaaggttaacattttctgattcatgttagactttgaagagactaaagaaaattttcaagaggaacatatgcctgagaacctttgcatgaatttaaaatttcaattatccattcttataagaaggaagatgattgtaaagaaatatctccgaagttaaaatctgtaataggaattgattcattctctaatgaaaacaaaacataaaaacatcacactaatcttggaggaataagaaaaattgtacatccattaaatgtacaattgattgcaacatcttgattgttttaaccattaacttgtcaaattacaatcacagttaagaaaatgatgtaaaattctgttttgtggatctctttcctagattagcttctgaaatcattattagctatatcatttgaggttttctacaatttggtataactaagaatttaaaaatgttttatcatatatatttgtataattaattactggcatggttaaagtggttttcactttttaaatggagaaaatttcagttaaattaataggataaaccaggttgcgaactggtgacctgtaggccatgtttgcactgcaaatatatttggtctgaatgatattgatattggacacatagtacttttacatgttttgaatgtattgctaatatttaaaaattgagagatcttgcataaacaatagattcccagctttgtcaga

SEQ ID NO: 166 - DNA, 4336 bp, HOMO SAPIENS
agttcgccctgccggaaagcagcacgccgccgcggcattttacgacgtcggcggtgacaggccctgggactctgggaatacccagcttcctccccgcaacccggtgaaagccaacgcaatgttcggtgcgggggacgaggacgacaccgatttcctctcgccgagcggcggtgccagattggcctcactttttggactggatcaggcagctgctggccatggaaatgaatttttccagtacacagccccaaaacagcctaagaaaggccagggaacggcagcaacaggaaatcaggcaacaccaaaaacagcaccagccaccatgagcactcccacaatactggtcgcaacagcagtccatgcatatcgatacacaaatggtcaatatgtaaagcagggcaaatttggtgctgcagttctggggaaccacacagccagagagtataggattcttctttatatcagtcaacaacagccagttacggttgctaggattcatgtgaactttgagctaatggttcggcccaataactatagcaccttttatgatgaccagagacagaactggtccatcatgtttgagtcggaaaaggctgctgtggagttcaataagcaggtgtgcattgctaagtgcaacagtacctcttccctggatgcagtgctctcccaggacctcattgtggcagacggccctgctgtagaagttggagattctttggaagtggcctataccggctggctctttcagaatcatgtgctgggccaggttttcgactccactgctaacaaagataagttgcttcgcttgaagttaggatcaggaaaagtcatcaagggctgggaggatggaatgctgggcatgaaaaaaggaggaaagcgattgcttattgtccctccagcctgtgctgttggctcagaaggggtaataggctggactcaagcaacggactcgatcctggtgttcgaggtggaggttaggcgggtgaagtttgccagagattctggctctgatggtcacagtgttagttcccgcgattctgcagctccgtctcccatccctggtgctgacaacctctctgctgatcctgttgtgtcaccacccacatcaatacctttcaaatcaggggagccagctcttcgtaccaaatctaactccctcagtgaacaacttgcaataaatacaagtcccgatgcagtcaaagccaagttgatctctcggatggctaaaatgggccagcccatgctgcccatccttccaccacagctggattccaatgattcagaaatcgaagatgtgaacactctgcaaggaggtgggcagcctgtggtgactccgtccgtccagccctctcttcatccggcccatccagcgttaccacagatgacctcacaggcacctcagccatctgttactgggctccaggcaccttctgctgccttaatgcaagtgtcatctctcgattcccactcagctgtatctggaaatgcccaatcctttcagccctatgcaggtatgcaagcctacgcttatccccaggcatctgccgtcacctcccagctgcagcccgttcggcctttgtacccagcaccgctctctcagcctccccatttccaaggatcaggtgatatggcttcatttctcatgactgaagcccggcaacataacactgaaattcgaatggcagtcagcaaagtggctgataaaatggatcatctcatgactaaggttgaagagttacagaaacatagtgctggcaattccatgcttattcctagcatgtcagttacaatggaaacaagcatgattatgagcaacatccagcgaatcattcaggaaaatgaaagattgaagcaagagatccttgaaaagagcaatcggatagaagaacagaatgacaagattagtgaactaattgaacgaaatcagaggtatgttgagcagagtaacctgatgatggagaagaggaacaactcacttcagacagccacagaaaacacacaggcaagagtattgcatgctgaacaagagaaggccaaggtgacagaggagttagcagcggccactgcacaggtctctcatctgcagctgaaaatgactgctcaccaaaaaaaggaaacagagctgcagatgcagctgacagaaagcctgaaggagacagatcttctcaggggccagctcaccaaagtgcaggcaaagctctcagagctccaagaaacctctgagcaagcacagtccaaattcaaaagtgaaaagcagaaccggaaacaactggaactcaaggtgacatccctggaggaggaactgactgaccttcgagttgagaaggagtccttggaaaagaacctctcagaaaggaaaaagaagtcagctcaagagcgttctcaggccgaggaggagatagatgaaattcgcaagtcataccaggaggaattggacaaacttcgacagctcttgaaaaagactcgagtgtccacagaccaagcagctgcagagcagctgtctttagtacaggctgagctacagacccagtgggaagcaaaatgtgaacatttgttggcctccgccaaggatgagcacctgcagcagtaccaggaggtgtgcgcacagagagatgcctaccagcagaagctggtacaacttcaggaaaagtgtttagccctccaggcccaaatcacagctctcaccaagcaaaatgaacagcacatcaaggaactagagaagaacaagtcccagatgtctggggttgaagctgctgcatctgacccctcagagaaggtcaagaagatcatgaaccaggtgttccagtccttacggagagagtttgagctggaggaatcttacaatggcaggaccattctgggaaccatcatgaatacgatcaagatggtgactcttcagctgttaaaccaacaggagcaagagaaggaagagagcagcagtgaagaagaagaagaaaaagcagaagagcggccacgaagaccttcccaggagcagtcagcctcagccagttctgggcagcctcaagcacccctgaatagggagaggccagagtcccccatggtgccctcagagcaggtggtcgaggaagctgtcccgttgcctcctcaggccctcaccacttcccaggatggacacagaaggaaaggggactcagaagctgaggcactctcagagataaaagatggttcccttccacccgaactgtcttgcatcccatcccacagagttctagggcccccgacttcaattccacctgagcccctaggccctgtatccatggactctgagtgtgaggagtcacttgctgccagcccaatggcagctaagcccgacaacccatcaggaaaggtctgtgtcagggaagtagcaccagatggcccactacaagaaagctccacaagactgtccctgacttcagaccccgaggagggggacccactggccttagggcctgaaagcccaggagagcctcagcctccacagctcaagaaagatgatgtcactagctccaccggtccccacaaggagctgtcaagcacagaggcaggttccacagttgcaggagcagccctcagacccagccatcattcccagcgttccagtctctctggggatgaagaggatgaactgtttaaaggggcaactctgaaagctctgaggcccaaagcacagcctgaggaggaggatgaagacgaggtgagcatgaagggacgcccgcccccaacgcccctttttggagatgatgatgatgacgatgacattgactggctgggatgaagacccaggaaactggtgcaaaggtttctctgcaacccttccctaagcatgattttgcacagccaaccctgggtctaggcgaaccacagggtgaggtcaaggtgagcattctgggaacaatatttgggctcagagggtgggttggccaccttctgagccccacccccgccagacctggtgaagaggatcataaccctgtcttcaagaacactgggatttcagcagcaagttggaagaaggactggtaggttcccctccaagccagtcacctgtaagagtcctgtcctctgccagactttttaatctcttcattaactctcagactgacctgggagccctcctctacctgaatccagtgctcaactgtgccccggcaacaagacctgggctgaggtctccctggtagaactaagggagattacaccatctaaatcccagtgcagtcaacagcctggcctatagtcctgggacatgtatcttcttctttgccttaaatctgatacaagaggtcaatgactttgaaaataaaactaaaataaatgtctataatgaaacttg

SEQ ID NO: 167 - DNA, 392 bp, HOMO SAPIENS
aattaatattagaacctgggtacaggacagattctgaaagtgaatagtattacataaagcttggtaggaaaatcgcactagttcaccagtaatggatccaaaccaagaagaaatccctgatttacctgaaaaagagttcacgaagttagttattaagctaatcagggagggaccagagaaagacaaagcccaatgcaaggaaatccaaaatatgatacaagaagtgaagggggaaatagtcaagggaataaagaaaaaaccatcaaaaattcaggaaattttggacacgcttttagaaatgcaaaatgctccggaaagtctcagtaatagagctgaacaagtagaagaaggaaattcagagctcgaagataagttcttctaattaactcaat

SEQ ID NO: 168 - DNA, 9479 bp, HOMO SAPIENS
tgaactgaggcgaactccgccgccaagtgagtgaggaggaggaggaggagaaggaggaggaggaagaggaggagcgcagtcggagcgcggcggcagcggcagaggcgccgcggcggggaccagcccagagagaccccccgagcccgcggcacaggcggcggcggcgctgagcgggctcgaccagccgagcgagcggcggccccggctcctcctcgtccggcgccagcagcccgcgccccgcgcccgcactcggccagccgagacccgcctcccgcccgcccgccggcctcgtgagggacgcgccgagccgggcggccgagagcggcggcggctgggagcgcgtcgggcccgggcggaaagtgcctgcggggggcgggcgagcgcgcggtgccggccgccccggggctcggcgcgggagccagagcgggagccggcgcggagcgggacgccgggtcccgagcggcccgcggccggggctcgcccccgcccctccctcctctccggcggcggcggcggcggcggcgggcggagtgagctgcggagcctggaatatggtcggggaaatggaaacgaaggagaagccgaagcccaccccagattacctgatgcagctgatgaacgacaagaagctcatgagcagcctgcccaacttctgcgggatcttcaaccacctcgagcggctgctggacgaagaaattagcagagtacggaaagacatgtacaatgacacattaaatggcagtacagagaaaaggagtgcagaattgcctgatgctgtgggacctattgttcagttacaagagaaactttatgtgcctgtaaaagaatacccagattttaattttgttgggagaatccttggacctagaggacttacagccaaacaacttgaagcagaaaccggatgtaaaatcatggtccgaggcaaaggctcaatgagggataaaaaaaaggaggagcaaaatagaggcaagcccaattgggagcatctaaatgaagatttacatgtactaatcactgtggaagatgctcagaacagagcagaaatcaaattgaagagagcagttgaagaagtgaagaaattattggtacctgcagcagaaggagaagacagcctgaagaagatgcagctgatggagcttgcgattctgaatggcacctacagagatgccaacattaaatcaccagcccttgccttttctcttgcagcaacagcccaggctgctccaaggatcattactgggcctgcgccggttctcccaccagctgccctgcgtactcctacgccagctggccctaccataatgcctttgatcagacaaatacagaccgctgtcatgccaaacggaactcctcacccaactgctgcaatagttcctccagggcccgaagctggtttaatctatacaccctatgagtacccctacacattggcaccagctacatcaatccttgagtatcctattgaacctagtggtgtattaggtgcggtggctactaaagttcgaaggcacgatatgcgtgtccatccttaccaaaggattgtgaccgcagaccgagccgccaccggcaactaacctatgaccttctgacctctgaactcttcacccaatgatgacctgaccatgcctgcctgctgatcagttaactggtaatcgcctttgcttgcctgtcgtcagtgcagcgagctgaggcacttgtccgttcgtcttaccatctaaccaaacaaaagacaaagaaattgttgtcctccaactcagctttttttttttttttttcctgtttgggtgaaagtggttctagaaactgcactgaatagtagtaaagcaataaggcccaattcatcccacagcactgatcatcttttaatatcccaccctaagcgaacggtaagaaggcctctcttaagaaggggagacagatggtccttaactactcaatgacagaggcagttactgtgagagacttctaggaatctttttcttctcatagcgaagtcaaagctctctctgaatgtactgtgtgatgatgcatcatgcatgaaccttcggtcagggatatcattggtgaagtgatttcaaaaagtattcaaaatttgatatgctgtttagtcactacagtgccctcaaagggcagaagttgcagccttttttatattgcctgccaaaatttgaagtattagaagaaagtgtgccatgagagaaaaacttaaggagttttgaaaagtaatgcaaataacaaaactgcaacactatttttaaaaagataaatatctgagttaaaattactgaatctttattttacacctaaaaaaatatgagaacaaggtacatgcattatgtgtcacattactgggcaaactgttcaagtatttttttttaaacctccctgtatagaaaaaaatcattaaggatgtaaaagccatgcttgcctatttgctgtatacatgtaatgaaattgtagataaagtgtagtgcattgaaacaaatgaacaaaaagtagatacttttactatacaagggtgctggtgcagaaaaaaatatatatatttttggaaatgtagcattttatactttcaagtgttataaaaaaaaagaaaaagaacaaagaaaccctttatttcattaaatgattttttctggtggttgtcaagaaacaaaagaccaaaagagcctttttgtctttcttttttattttttaagtattggaataagtctaaagaaaagaaagtgccttattttccttcatggtcattcagtcaagtgtctcataaagatcagctcctccctcagaatacaagttaatgcatgttactcagtcgcccagtatgtgaaagaagatatgagggagacaaatgagttgatagtttgaattataggatttttgccacgttaccttgatgcaaatttgccaaatctgatactgtgaaaagatttgataacttttctaatgcctgactagtaagttttaaaacatcattctttaaaagaatagtttaatacttttggttattccaatcttcaatgttaacccaaaggattctgagataaaaattatgtgtcatctaaacttcagtttacagacaaaattagagctttgttttatttggagaagggggatgcattcatttgattttgttttttgtttttaattaattgaatataataggatacctagcaaatgttttcacaaaagtgaatctttgtgattttcattctagaaaacaatgttttaaatcacccaaatttaatcacatgtctttatatcataccagataactggtgtagtgtatccttttactgtttcaataacctctgcctcccccaccccttaactttaaaagaatgtgaaaaactagcatcatagtgcatataaatactcaaccacatttcagcttaagcttctaatttctcaagaagttgaaacagttagttatgtagttgaagcaatttgtgtgcaaagcctacatctaaacacttgagtgaataatcattaactgctcagtaccagacgtggcaaatctcaagtgacagtggacccccccccccgcccagcttatcaactcgtcccctcttccacaccttcccagcatcacagtcagaggtcagcaggaagctgagtcattaccttcttggtgacctcccccaccatcttgtctcacttggaaaccgttgtcagtttatttactatgcaatagacattcattgttttgtatccagctagctttggtttaatatgccactgctttgtctttctgttacacatacagttttgatttatttacaatatatgctgtgccattttgatttttatattgtttggttggttgaataaatttgcgacactcaaacacttgaggtgatagttgttaaaaacaataccagtatttgatccagtttcatctcaactatgttatacctggacattttagatgtttatcaaaggtcttttatggggaagaaagtaaatgtatgaaataataaatgtgtgacatttatagggaatgttggctctgaacaaacttttgaaaacttggttgacaaaattttggatcaactgaaaaaagcatgacttttgaaatctctgaatgccttggttctcagtattatcattctttattgaatttatttcttattaaaatatgtagtttttaagactttttttctgacagtattatgtaattttttagcgtgggtagatgggagtgtcgcttgtatgttatcgtacagctgacatgtatttttgtctattctttattatcttagtttcatgctatgtatgtaccataaccaacctattgcctatgagaaacatgtaagataatgtatttacagccattgttacaagtttataatgtatttttctatcttgttttatatgtatgttatataacattcaaaaagaatttttttcttgattgagaaaaggatacaaaatgcaaaatccacaattttgataactgaaaattgccaattgttttgcagtactttattatattgggtgtcttgtcttttttgggcttttagttagctaatgaatgaatacattagacacttttgggttttagttgggattttacatagcttgcattttaattctttggttctttgctgtttctattaacccacagcattattttaataaatgttataataccaacctactaactctggactttgtctgtttattaacctttatatgtttaattaaaataaacaaataaagacaaaagaatgtaaagtcttgagttactggactaaccctgaagaacgtgaccacagataacatagtgtgacttgtttttatgttgtttgtcagctgacagttttgcacactactgttaaaatggctttggttattctggtcttttagcttgggggccggggcgggtgtgggtgtaggtgcagtagagatgggaacaaagtagcctttgtttgaggcattcttctcttgccacttgcctttcagcatctgcattactaattccacaccttatttttccttctccaaaataatcactgtctgctcacagcatcgagtaaaaagatacattgtcatggtatatacctggagaaaccagtttgattctttgttgaaccatttcttttaatttctgtaaataagtaattttatggtcacattgtaaagcagagaaactgttgatattttacctttatttagatttttgttttaacttgacctttttcctttggaaagcgttgaacttgtttagctaactactcctattaggggagcttaacttgggtaaagtcaaaggcccactggctgtttctcatggtggcctgaagccccgctgctttccagtgaggaaaagaaccctcagcacgttactgagctttcctcaggtatttttttctctgtcacctactttacaaatacagtcagactaaaacattaaacaagaagtttaagggggaataacattgggatttgaaaagttgtatgtgattaatttcttgcatgcaaatcaatttaagatttcttaaatatcttcatgcttttcttggctggaacttgggtaaattaacctgtaattatgaattatttagtttaactcaaggtgcatttttatttcacagattgatacttgcttttttctgtgaaacagttctcctagataccaaaatcctcaggatgaatttttgcatttgtaaataacaatttatctttgtaaattacattttatttatttagagttctaaaattgagggctgaaatgaatgacatgtaatagaagacaaaactgtaccaatacgctgttaaccaatcagactgtccaggtattctcatttcataaatatgtatacacacatataaatacacagagtagtgttagctgatgtgagtgataacagcgaatcaccattgagatggtcatttggatcatgtaaacaaaccgtgtcatgtctctgatgggagcggtgggtagtgtactgttaggtggacaggtcttttaacatgctactatttgtaaaagtttccgttgccataacagttcatgtagtagtctgtgaaaattcgaagctgtctgtcaagctgctaatatacaagttgtcatggtaccatgtaacttaaattgatgaatttctatgcaatttactattctctgaagcctatgaatgcagcctcatctcattttcagttaagggtactttatgtataattatgtcattgctgccttttatgtaggaaatgtaaaaaagttttaaaaggcgaaaataacattacagatttcatttttatacaggttacaatattaaacatgaaactaccaaattccaagaatagtaaaattctagagtcagttgattgattgaaactatttgacaaaacagttgaaagctgagctttcagtcaagaagttggtgaaattaatgtccttaaacttttcctttaggcaaaatgtcagggaaaacttaacatgaaagtagttactcccatacgcaccagtgcagtagctccaggtgtaagaggtcacgaaggcaccctgcccataaaaccaggatgtgcatacgtacacacaatcggtgtctggttatggttttctaaacactacataaggatctgaattttttagtgtgccaaaagcaaacgataggtttaaatgaaattgctcactaccaaatcaagactcttcatatatatacgtgtgtgtatatatatatgtcataacactttcacgtgtgacagcctaaggtttctttagttttaggatggggtggggtgggagtggttttgcatgtttgaccaggatgtgatgcctgtctttattccttgataagaagtagctgttacagcatttcaagcaaattattttaggtagaatagaacttactgccaaatgattatttatttagcaaaaattattctccaacttttcgaattcacaatttttctaagtgcatagagtagttttttacattgtcacgaattccttaatacctttatttaaaatggaaaaaatatggacaatattttagaaatatgtgctacacatctaattttatctgtagtttaagtgatctaaattgagatgcctttgatatgaagagatttaccaacattatatgcactcgtgccttcaatgtggaatcaaactggttaacctcagcacagtcctctcgtttctgtgtttctgctgcactaattgccagggggtgggggagaaggcgaatgaattaattcatagtagaaggaggcgataggtgcagcaaagggcagccacagtgttgattccacattataatgttgttgcctcttcttggcaaaagacaccacattgtgggaagatctcagcttccagggtaaaagttaatttataacttaaaagtgctattaagtttttattaccaaatatatcttttatggtttatattgtagtggtatgtatgaaacatttaaaattttactgtggaaattgtgtatatatatatatatagtcgaaataggtgttcacaggtcacatgtgaacggagaactgcatgaccgtacatgaaatgcaataaaccaactggaaaaagtgcatgtgcttcatcctctcaagccaactgcagctggaaagtgctgcttatcctccacccccagaaaatgcatgtatcaatatgagaataaagaacgcacactttcaattttattgaggctttcaacactatttaaaagaaaatgtaagaatttgacattctggagttattataacattagaaaatgagcataacattcactctgattttagccattaagggagattagtaaacagactgctacagtgttccatagttggactgtgcatccaaaacatttttttatctttaataaatggtacagtttttatgtagttttcgaatgtaagaagaaaggaatgctgaccaaaacttgatttcatcagcttcatgaaaaggactagtgtcattaacctgttgaacagaattggtttattaaaaaaatcatttccagtagtgtgaaacctttacgagtctttaacatctaaatgttatgactccttgtaccttaagttttccagtctttcttatttatatcatctccaagtacctctggctcctttcctcttgctcaccggaaccttagttttcctcaacagaatgctttgttaaagtagcccacagttgcaggatccatagcaccgtcgtgcagactagcagcccaaaggtgtgtttggtttggcttatacggtgttttgctttttaaactacttgccataatttaaaagtggcaacactagacttaaaaaaaaaaaagtctgattgcccatattagattttttttttaattcttcacaaaatctgctcttcctgaaagatcaaagtgtctagaaagcccaaacatgtattcttaacatagtaggcaccagctgaaactgagtaattaaacggtcccctgaagccaagtattccctggttagtcgccaccccaccactccttcctgtctctagtgtcacacttgggctgttgattttcttactcttctcttgctttaatccttccccccggctctctggctcctgtggatatctgtgcttgtttcctggtccaggatggtgatctgactttcaaaccagcttctcaaaaggggtgacataaaatcagttttgatgtttttcctcctgaaaaatcagatgaatattttagtcactgttactcatgcacattgtgttcttatgtttacagaagtgcttaagtgaatggaagcactagacatttggatttccttcctaacgtaatttttaatgattaccccttttatacagtaatttgtggtctttagaaagcagttaaactaattgaccatctaatagttgtactatacatatgtctaaaataatagtcatggtaagtttggcatcatatcttccccaaaaaatgtttattaaaattagattattccagtttaatgctattttgtgaactgtataccctctgaaagcgcttatttttacatgctacacaacagttccaattttaaggagtgtctcctaaaattgggatgaaaatctactgtagtctgttttaaagtatgctatactatgttcattggttacttaactggatattaatataaaggttattacaagaaaaatgatgaagagcaaaaggagaagaaaatatttgcaagtgaatccacaattcttgcagaactatttgagttgatactaaagattttatgttcactcctttaccttagaactgtcaagcttgggaatgaggaaagtgccttggctgtgcttgaaacctgaattttagtgcttcccttattacattcattgttttcaatgattgatttataaaattaagacatactggtagtacaagttgaaagttggtttgaatacattttaattaaatgataatatgttaatatgcttttgttcattgctttctcactgaggtaaaacagcattaaaaagttgtccagaatttaaactgaaaaaaaaaaaaaaaaa

SEQ ID NO: 169 - DNA, 3745 bp, HOMO SAPIENS
cggcggcgggcccaaggcgtgaggcgccgcccgggtgtccccgcggcgcaggaggcggtggagcgcagagcgggcgagcgcgaaaaatcactaccaatataatggattttatatatcagattgctttattctggatatcatggtaacaatacagaaagtatacataatttcccatttctgcaagtagtcatgactgctgaagaaagaaaaacttaaagctacggcagaattattttatggaaattctgattttgtttttaatttttgataactttttactaaaggtatgaacacacaaagagcttattttgttaggcaaatacacattaataagaatgcctagaagaggactgattcttcacacccggacccactggttgctgttgggccttgctttgctctgcagtttggtattatttatgtacctcctggaatgtgccccccagactgatggaaatgcatctcttcctggtgttgttggggaaaattatggtaaagagtattatcaagccctcctacaggaacaagaagaacattatcagaccagggcaaccagtctgaaacgccaaattgcccaactaaaacaagaattacaagaaatgagtgagaagatgcggtcactgcaagaaagaaggaatgtaggggctaatggcataggctatcagagcaacaaagagcaagcacctagtgatcttttagagtttcttcattcccaaattgacaaagctgaagttagcataggggccaaactacccagtgagtatggggtcattccctttgaaagttttaccttaatgaaagtatttcaattggaaatgggtctcactcgccatcctgaagaaaagccagttagaaaagacaaacgagatgaattggtggaagttattgaagcgggcttggaggtcattaataatcctgatgaagatgatgaacaagaagatgaggagggtccccttggagagaaactgatatttaatgaaaatgacttcgtagaaggttattatcgcactgagagagataagggcacacagtatgaactcttttttaagaaagcagaccttacggaatatagacatgtgaccctcttccgcccttttggacctctcatgaaagtgaagagtgagatgattgacatcactagatcaattattaatatcattgtgccacttgctgaaagaactgaagcatttgtacaatttatgcagaacttcagggatgtttgtattcatcaagacaagaagattcatctcacagtggtgtattttggtaaagaaggactgtctaaagtcaagtctatcctagaatctgtcaccagtgagtctaattttcacaattacaccttggtctcattgaatgaagaatttaatcgtggacgaggactaaatgtgggtgcccgagcttgggacaagggagaggtcttgatgtttttctgtgatgttgatatctatttctcagccgaattccttaacagctgccggttaaatgctgagccaggtaagaaggtgttttaccctgtggtgttcagtctttacaatcctgccattgtttatgccaaccaggaagtgccaccacctgtggagcagcagctggttcacaaaaaggattctggcttttggcgagattttggctttggaatgacttgtcagtatcgttcagatttcctgaccattggtggatttgacatggaagtgaaaggttggggtggagaagatgttcatctttatcgaaaatacttacatggtgacctcattgtgattcggactccggttcctggtcttttccacctctggcatgaaaagcgctgtgctgatgagctgacccccgagcagtaccgcatgtgcatccagtctaaagccatgaatgaggcctctcactcccacctgggaatgctggtcttcagggaggaaatagagacgcatcttcataaacaggcatacaggacaaacagtgaagctgttggttgaaatcataattaatgcgttactgtatgaaccacaaaacagcactatttatttagccttacttctacttccagatgcagtgcctcttttggagaagacatgtttatttttcatgttctttctgacattactttagcaattcaacttgatgtgagaagaaaaaacaaatgtttcaacacaaaatctctgttttgtgagaatactgcactatggaataattgacaaattgaaatctcatatttgtcccaaaagttgttttgagttagttctacctggtgcccatgttctgattgtgtgtgggattgcatggtgtcctgattgcatctaggtggagcggatggaatgtgctgggccactgttgggtggagagcagcacattcttacagaggagatggagcgttatgagcatagtatgtggataggtatcttcacctgcccgcccctgagtcagcctccttgacttgatagcttgaagaatccttttccactgaaatagaggataattaattgacacatctgaaatccccaatcaatcaatcaagagaaaggtagaactaaaaactccttaacttactgttgcttacacccctgaaagtctgtttttaagcaaatgggtaatagtagaaaataggttagaatctatggcttgattaaaaatatgttattacattatcatgttcaggattaggattagtagtcagttgctgtaaactattttgaacaaacagaaaagaacacggaaacatttttaacagagcatttaattatgttggaatacaggatcctagctctgtctgggaacattagtttatgtgagccagctctatcagggtcttcccatggtggttcagaatagatgagcatagcatggttttgtttgtttttgctttcaattttctaatttggcatggatccatatgtatttactatcctttttctaatatattaatatatgctacatttgtatttgcattactataatactttgagttgaaaaagagtttcattgtggagagaaaaagcaaatggtatgccacaagatcactctgatttgagaaaagggaggaggggaagatagtctgaatggaaatctgaaatacggaatgttttagagaaatatgtcacttgcatatagaatgttttaattgaggtataaattaatgagacaaagtgaaaaagaaattatattcagataggactgcactacattatttgtcacacatggatctgttaccatcaggtcaattcctagtatgcataaattttttaacccttttaaaagagacctatgttgaaaacccctgaaaattcactgaagaaaaatcattactctttttctcagtaaatcatatcatctgaaatattacaaatttcaaatttctaggtgctatattaattcaatattacaataactcttacctaattattcttacaagttttaagttgtggtagtttagtgatttttttaaaagatgtgtgaaatgttctctgcaaaataattcaggccactgtctccttttatatattattataattatttattatgaagaccagtgaattacgatatttaaagtgagagaacttaattatttgcaaaggtaagttacagcttgttttttgagagaatcaaatgagtttacttttgttcctgttgtttttaactagctttaagtttaaagatggaagctaagcaatggaaatgctatacgtttttgacatttattaaatggtaccaataaagtattttattaccaaaagttaaaaaaaaaaaaaaaaaaaaaaaa

SEQ ID NO: 170 - DNA, 2892 bp, HOMO SAPIENS
caaagatggctgccacattggcgctgtcattttggtactgagcagagcgacgggcttaattcgacccaatccaggccagagtctttctctcaggggcttcctcgtgctcagctaatcctccgatcaatccttgggaatccctgggacctcttcggtatccctactctcagccagggatcatgtcttgggccgctcgcccgcccttcctccctcagcggcatgccgcagggcagtgtgggccggtgggggtgcgaaaagaaatgcattgtggggtcgcgtcccggtggcggcggcgacggccctggctggatcccgcagcggcggcggcggcggcggtggcaggcggagaacaacaaaccccggagccggagccaggggaggctggacgggacgggatgggcgacagcgggcgggactcccgaagcccagacagctcctccccaaatccccttccccagggagtccctcccccttctcctcctgggccacccctacccccttcaacagctccatcccttggaggctctggggccccacccccacccccgatgccaccacccccactgggctctccctttccagtcatcagttcttccatggggtcccctggtctgccccctccagctcccccaggattctccgggcctgtcagcagcccccagattaactcaacagtgtcactccctgggggtgggtctggcccccctgaagatgtgaagccaccagtcttaggggtccggggcctgcactgtccaccccctccaggtggccctggggctggcaaacggctatgtgcaatctgcggggacagaagctcaggcaaacactacggggtttacagctgtgagggttgcaagggcttcttcaaacgcaccatccgcaaagaccttacatactcttgccgggacaacaaagactgcacagtggacaagcgccagcggaaccgctgtcagtactgccgctatcagaagtgcctggccactggcatgaagagggaggcggtacaggaggagcgtcagcggggaaaggacaaggatggggatggggagggggctgggggagcccccgaggagatgcctgtggacaggatcctggaggcagagcttgctgtggaacagaagagtgaccagggcgttgagggtcctgggggaaccgggggtagcggcagcagcccaaatgaccctgtgactaacatctgtcaggcagctgacaaacagctattcacgcttgttgagtgggcgaagaggatcccacacttttcctccttgcctctggatgatcaggtcatattgctgcgggcaggctggaatgaactcctcattgcctccttctcacaccgatccattgatgttcgagatggcatcctccttgccacaggtcttcacgtgcaccgcaactcagcccattcagcaggagtaggagccatctttgatcgggtgctgacagagctagtgtccaaaatgcgtgacatgaggatggacaagacagagcttggctgcctgagggcaatcattctgtttaatccagatgccaagggcctctccaaccctagtgaggtggaggtcctgcgggagaaagtgtatgcatcactggagacctactgcaaacagaagtaccctgagcagcagggacggtttgccaagctgctgctacgtcttcctgccctccggtccattggccttaagtgtctagagcatctgtttttcttcaagctcattggtgacacccccatcgacaccttcctcatggagatgcttgaggctccccatcaactggcctgagctcagacccagacgtggtgcttctcacactggaggagcacacatccaagagggactccaagccctggggcagggtggggggccatgttcccagaaccttgatggggtgagaagtacagggcagaaccaagaacataaaccctccaagggatctgcttgatatcccaagttggaagggaccccagatacctgtgaggactggttgtctctcttcggtggccttgagtctctgaatttgtcgggttctcccatgatttggggtgatttctcaccctctgtccttcccccagcacaaagcactggccttgcctccaggaccttgcttccttctcatcttgcctcattttgcttcccatctgaagagtggaaatggggaactcccccagaggtggatactggggggcaggcctcccaagctgatggacatgagagtagggccctgacaggccttcctcctctcaaacctggcagatgggggcctctctggaagagggaggggccctgtcactgtccagagtctctttttacacttcacctccttctgcagtcagactgaaatataaaaaaggtggtggtggtggtgaaggggctggtggagatgtaggaaccgatctgctatttttaatttcctgtgaggatagagacttgcagttagactcaaagaagtactgtactttcccaggttgactaagaaatgccagtggtggaggtgggtgtttgggaaaggcagggccctgaaatggcctgtccctagggctctccaagcactagccttcccagcttcccgccgccccccctatctcttcctgtctaacttggggaaggggcctgggctgtgaggacagggcccccacaggggatggtttcacgagtgtagtcccggaggccttccctttacagctctcctccagccctgggcacatagcataggctggggacacaggatcctggcctgagaattgaggggaggtggccagcccgcagaggtggggtgctggggctgcatgatttttgccctgcgtcccttctctttggggctcctttcccctctcatacataaaatcgctttcaaattaaaatcgctgttttctggaaaaaaaaaaaaaaaaaa

SEQ ID NO: 171 - DNA, 3484 bp, HOMO SAPIENS
tgccctcccgcggctgcagccggagccgaaggtggtggctgcacagtagacgccccctcacggcttcccccacacgctcccgccccctcgctcgcccatcgcgcttccctcacaggctctgcagtcctcccccacagacgccttcccccttggactctcattcccttttccacggagccccgcgctttcgtgagccccctcgaggaacctggtctccgcatccagttaccacctcctgcctcagaggccatctgagcccttcgcacctcgcccctcagtccccccttccccccccgcccgcgtcgcctcgctccctcccgcccccccatcatcccttccctcgcagttcccctgtcctgaggggagccccgccacgggcagcgcggcggcggcggcaggagggagaaagtgaagcggtagctcgcgcacactcgcgccctcactcccggctaggcggcacccaccgccgggaggaggaggaggagccgagaggagctgagcgagcgcggaagtagctgctgctggtggtgacaatgtcaaataacggcctagacattcaagacaaacccccagcccctccgatgagaaataccagcactatgattggagccggcagcaaagatgctggaaccctaaaccatggttctaaacctctgcctccaaacccagaggagaagaaaaagaaggaccgattttaccgatccattttacctggagataaaacaaataaaaagaaagagaaagagcggccagagatttctctcccttcagattttgaacacacaattcatgtcggttttgatgctgtcacaggggagtttacgggaatgccagagcagtgggcccgcttgcttcagacatcaaatatcactaagtcggagcagaagaaaaacccgcaggctgttctggatgtgttggagttttacaactcgaagaagacatccaacagccagaaatacatgagctttacagataagtcagctgaggattacaattcttctaatgccttgaatgtgaaggctgtgtctgagactcctgcagtgccaccagtttcagaagatgaggatgatgatgatgatgatgctaccccaccaccagtgattgctccacgcccagagcacacaaaatctgtatacacacggtctgtgattgaaccacttcctgtcactccaactcgggacgtggctacatctcccatttcacctactgaaaataacaccactccaccagatgctttgacccggaatactgagaagcagaagaagaagcctaaaatgtctgatgaggagatcttggagaaattacgaagcatagtgagtgtgggcgatcctaagaagaaatatacacggtttgagaagattggacaaggtgcttcaggcaccgtgtacacagcaatggatgtggccacaggacaggaggtggccattaagcagatgaatcttcagcagcagcccaagaaagagctgattattaatgagatcctggtcatgagggaaaacaagaacccaaacattgtgaattacttggacagttacctcgtgggagatgagctgtgggttgttatggaatacttggctggaggctccttgacagatgtggtgacagaaacttgcatggatgaaggccaaattgcagctgtgtgccgtgagtgtctgcaggctctggagttcttgcattcgaaccaggtcattcacagagacatcaagagtgacaatattctgttgggaatggatggctctgtcaagctaactgactttggattctgtgcacagataaccccagagcagagcaaacggagcaccatggtaggaaccccatactggatggcaccagaggttgtgacacgaaaggcctatgggcccaaggttgacatctggtccctgggcatcatggccatcgaaatgattgaaggggagcctccatacctcaatgaaaaccctctgagagccttgtacctcattgccaccaatgggaccccagaacttcagaacccagagaagctgtcagctatcttccgggactttctgaaccgctgtctcgagatggatgtggagaagagaggttcagctaaagagctgctacaggtgagaaaactgaggtttcaagtgtttagtaacttttccatgatagctgcatcaattcctgaagattgccaagcccctctccagcctcactccactgattgctgcagctaaggaggcaacaaagaacaatcactaaaaccacactcaccccagcctcattgtgccaagccttctgtgagataaatgcacatttcagaaattccaactcctgatgccctcttctccttgccttgcttctcccatttcctgatctagcactcctcaagactttgatccttggaaaccgtgtgtccagcattgaagagaactgcaactgaatgactaatcagatgatggccatttctaaataaggaatttcctcccaattcatggatatgagggtggtttatgattaagggtttatataaataaatgtttctagtcttccgtgtgtcaaaatcctcacctccttcataaccatctcccacaattaattcttgactatataaatttatggtttgataatattatcaatttgtaatcaattgagatttctttagtgcttgcttttctgtgactcaactgcccagacacctcattgtacttgaaaactggaacagcttgggaatgccatggggtttgataatctgccagggacatgaagaggctcagcttcctggaccatgactttggctcagctgatcctgacatgggagaacaaccacatttttctttgtgtgtgcttctagcagctgttcgggaggaccttgacccaatagtgttcccatgctgtttcttgtgaaatgctctcggctatgtagcagcttttgattccctgcataccctaggctgctgcccctatcctgtcccttgtttataacattgagaggttttctagggcacatactgagtgagagcagtgttgagaagtcggggaaaatggtgactacttttagagcaaggctgggcatcagcacctgtccagctctacttgtgtgatgtttcaggaactcagcccctttttctgcctaggataaggagctgaaagattaacttggatcttctaatggtccaaatcttttggtcacaataaagagtctccaaattagagactgcatgttagttctggatggatttggtggcctgacatgataccctgccagctgtgaggggaccccgtttttaagatgcatggccaagctctctgcaaatggaaatgcttacactgggtgttggggatgtttgctacctcctgctatttttgtggttttggttctcccactatggtaggacccctggccagcattgtggcttgtcatgtcagccccattgactaccttctcatgctctgaggtactactgcctctgcagcacaaatttctatttctgtcaataaaaggagatgaaaatattctaaaaaa

SEQ ID NO: 172 - DNA, 4224 bp, HOMO SAPIENS
ctttcccctccctcgcccgccccgccgcccgcaggcgccccgagtcgcggggctgccgcttggacgtcgtcctgtctgggtgtcgcgggccggccccgcggggagcgcccccggcgcgatgcccttcaggaaagcctgtgggccaaagctgaccaactcccccaccgtcatcgtcatggtgggcctccccgcccggggcaagacctacatctccaagaagctgactcgctacctcaactggattggcgtccccacaaaagtgttcaacgtcggggagtatcgccgggaggctgtgaagcagtacagctcctacaacttcttccgccccgacaatgaggaagccatgaaagtccggaagcaatgtgccttagctgccttgagagatgtcaaaagctacctggcgaaagaagggggacaaattgcggttttcgatgccaccaatactactagagagaggagacacatgatccttcattttgccaaagaaaatgactttaaggcgtttttcatcgagtcggtgtgcgacgaccctacagttgtggcctccaatatcatggaagttaaaatctccagcccggattacaaagactgcaactcggcagaagccatggacgacttcatgaagaggatcagttgctatgaagccagctaccagcccctcgaccccgacaaatgcgacagggacttgtcgctgatcaaggtgattgacgtgggccggaggttcctggtgaaccgggtgcaggaccacatccagagccgcatcgtgtactacctgatgaacatccacgtgcagccgcgtaccatctacctgtgccggcacggcgagaacgagcacaacctccagggccgcatcgggggcgactcaggcctgtccagccggggcaagaagtttgccagtgctctgagcaagttcgtggaggagcagaacctgaaggacctgcgcgtgtggaccagccagctgaagagcaccatccagacggccgaggcgctgcggctgccctacgagcagtggaaggcgctcaatgagatcgacgcgggcgtctgtgaggagctgacctacgaggagatcagggacacctaccctgaggagtatgcgctgcgggagcaggacaagtactattaccgctaccccaccggggagtcctaccaggacctggtccagcgcttggagccagtgatcatggagctggagcggcaggagaatgtgctggtcatctgccaccaggccgtcctgcgctgcctgcttgcctacttcctggataagagtgcagaggagatgccctacctgaaatgccctcttcacaccgtcctgaaactgacgcctgtcgcttatggctgccgtgtggaatccatctacctgaacgtggagtccgtctgcacacaccgggagaggtcagaggatgcaaagaagggacctaacccgctcatgagacgcaatagtgtcaccccgctagccagccccgaacccaccaaaaagcctcgcatcaacagctttgaggagcatgtggcctccacctcggccgccctgcccagctgcctgcccccggaggtgcccacgcagctgcctggacaaaacatgaaaggctcccggagcagcgctgactcctccaggaaacactgaggcagacgtgtcggttccattccatttccatttctgcagcttagcttgtgtcctgccctccgcccgaggcaaaacgtatcctgaggacttcttccggagagggtggggtggagcagcgggggagccttggccgaagagaaccatgcttggcaccgtctgtgtcccctcggccgctggacaccagaaagccacgtgggtccctggcgccctgcctttagccgtggggcccccacctccactctctgggtttcctaggaatgtccagcctcggagaccttcacaaagccttgggagggtgatgagtgctggtcctgacaggaggccgctggggacactgtgctgttttgtttcgtttctgtgatctcccggcacgtttggagctgggaagaccacactggtggcagaatcctaaaattaaaggaggcaggctcctagttgctgaaagttaaggaatgtgtaaaacctccacgtgactgtttggtgcatcttgacctgggaagacgcctcatgggaacgaacttggacaggtgttgggttgaggcctcttctgcaggaagtccctgagctgagacgcaagttggctgggtggtccgcaccctggctctcctgcaggtccacacaccttccaggcctgtggcctgcctccaaagatgtgcaagggcaggctggctgcacggggagagggaagtattttgccgaaatatgagaactggggcctcctgctcccagggagctccagggcccctctctcctcccacctggacttggggggaactgagaaacactttcctggagctgctggcttttgcacttttttgatggcagaagtgtgacctgagagtcccaccttctcttcaggaacgtagatgttggggtgtcttgccctggggggcttggaacctctgaaggtggggagcggaacacctggcatccttccccagcacttgcattaccgtccctgctcttcccaggtggggacagtggcccaagcaaggcctcactcgcagccacttcttcaagagctgcctgcacactgtcttggagcatctgccttgtgcctggcactctgccggtgccttgggaaggtcggaagagtggactttgtcctggccttcccttcatggcgtctatgacacttttgtggtgatggaaagcatgggacctgtcgtctcagcctgttggtttctcctcattgcctcaaaccctggggtaggtgggacggggggtctcgtgcccagatgaaaccatttggaaactcggcagcagagtttgtccaaatgacccttttcaggatgtctcaaagcttgtgccaaaggtcacttttctttcctgccttctgctgtgagccctgagatcctcctcccagctcaagggacaggtcctgggtgagggtgggagatttagacacctgaaactgggcgtggagagaagagccgttgctgtttgttttttgggaagagcttttaaagaatgcatgtttttttcctggttggaattgagtaggaactgaggctgtgcttcaggtatggtacaatcaagtgggggattttcatgctgaaccattcaagccctccccgcccgttgcacccactttggctggcgtctgctggagaggatgtctctgtccgcattcccgtgcagctccaggctcgcgcagttttctctctctccctggatgttgagtctcatcagaatatgtgggtagggggtggacgtgcacgggtgcatgattgtgcttaacttggttgtatttttcgatttgacatggaaggcctgttgctttgctcttgagaatagtttctcgtgtccccctcgcaggcctcattctttgaacatcgactctgaagtttgatacagataggggcttgatagctgtggtcccctctcccctctgactacctaaaatcaatacctaaatacagaagccttggtctaacacgggacttttagtttgcgaagggcctagatagggagagaggtaacatgaatctggacagggagggagatactatagaaaggagaacactgcctactttgcaagccagtgacctgccttttgaggggacattggacgggggccgggggcgggggttgggtttgagctacagtcatgaacttttggcgtctactgattcctccaactctccaccccacaaaataacggggaccaatatttttaactttgcctatttgtttttgggtgagtttcccccctccttattctgtcctgagaccacgggcaaagctcttcattttgagagagaagaaaaactgtttggaaccacaccaatgatatttttctttgtaatacttgaaatttatttttttattattttgatagcagatgtgctatttatttatttaatatgtataaggagcctaaacaatagaaagctgtagagattgggtttcattgttaattggtttgggagcctcctatgtgtgacttatgacttctctgtgttctgtgtatttgtctgaattaatgacctgggatataaagctatgctagctttcaaacaggagatgcctttcagaaatttgtatattttgcagttgccagaccaataaaatacctggttgaaatacatggacgaagtaaa

SEQ ID NO: 173 - DNA, 1004 bp, HOMO SAPIENS
ggaggcgcgaccgggccggcgctggggtaagaagcctgctgagggatgcccaagaagttccagggtgagaacaccaagtcggcagcggcccgggcacgtagggcagaggccaaggcggccgctgatgccaagaagcagaaggagctggaggatgcctactggaaggacgacgacaaacacgtcatgaggaaggagcagcgcaaggaggagaaggagaagcggcgcctcgaccagctggaacgtaagaaggagacgcagcgcctactggaggaggaggactccaagctcaagggcggcaaggcgccgcgggtggccacgtccagcaaggtcacccgggcccagatcgaggacacgctgcgccgagaccatcagctcagggaggccccggacacagccgagaaagccaagagccatctggaggtgccgctggaggagaacgtgaaccgccgcgtgctggaggagggcagcgtggaggcgcgcaccatcgaggacgccattgcagtgctcagcgtggcggaggaggcggccgaccggcacccagaaagacgcatgcgggcagccttcacagcctttgaggaagcccagctgccgcggctcaaacaagagaaccccaacatgcggctgtcgcagctgaaacagctgctcaagaaggagtggctccgctctcctgacaaccccatgaaccagcgggccgtgcccttcaatgcccccaagtgagcccagaacttggggagccagttcacccacgggtggtccaggtcacgactctgcacgcccttaggccaggtcagctgcgagggtcacagagcgttccgggggccaaggcgccgggccccggggccatgctcttatcaccagccacccgtcctcccgccagagggtccctgccccgagtgacaccccatcccctcccatcccccggcgcgtgtgtgtagagcctcagggctgagtgcccaataaaggtggcggcaaggctgcggtgaggcaaaaaaaaaaaaaaaaaa

SEQ ID NO: 174 - DNA, 2982 bp, HOMO SAPIENS
aggtctggacctgaaccgagacaaggaggtaccacactattcactgctgcgtcgcagagcgggctgggcggctgtctggacctcgagaggcctgaggcaaggatcgcgtcagaccccgaaagctggtttgttgattagtgatctaagaccgccggaagcgcttcttctcaatcaagctatgcaacaggaagtcattacgatcccgttgtaacctctaaatatgtccccgttctgcacagcatcccgataaccgttttgtttttctcatattatgaccttctcatgttagcaccacttcgcaacgctccaggtcgtgaaggagcaacttcaccatcgccgcctacagacgccactgggagcttgggagagtgggacgtggacaggaacgtaaagaccgaagggtgggtttcgaaggagcggatttcgaagttgcaccggttgaggatggctgacattctctctcagtcagagaccctggcgtcgcaagacctcagtggggacttcaagaagccagctctgccggtgtccccagcggcgcggagtaaggccccggccagcagttcttcaaaccctgaggaggtacagaaggaagggcccactgcgttgcaggactccaattctggggagcccgacatccctcctcctcagccggactgcggtgattttaggagtctacaggaggagcagtcgcgccccccgacagcggtttcttcccctggcggtccagcccgggctcccccctaccaagagcctccatggggtggccctgccacagccccctacagcttagagaccctgaagggcggcactatccttggcacccgtagcttgaaagggacgagttactgccttttcgggaggctgtctggctgcgacgtgtgcctggagcacccttcggtgtctcggtaccacgcagtgctgcagcacagggcgtccggccctgacggagaatgcgacagcaacgggccgggcttctacctctacgatctgggaagcacccatggcacttttctcaacaaaactcgcatcccacctcgcacctactgtcgagtccacgttgggcatgttgttcgctttggaggcagcacccggctctttatcctgcagggaccagaggaagaccgagaggcagaatccgagttaacagtaacacagttgaaggaattgcgcaagcagcagcaaatattgttggagaagaagatgctaggagaagactcagatgaagaagaggaaatggatacctctgaaaggaagataaatgctggtagccaagatgatgagatgggttgcacctggggaatgggagaagatgcagtagaggatgatgctgaagagaaccctattgtcttagagtttcagcaggaaagggaggccttttatataaaggatcccaaaaaggctctccaaggcttttttgaccgagaaggagaagaattagaatatgaatttgatgaacagggacatagcacttggctctgcagggtgagattacctgtggacgattcaactggaaaacaactggtggctgaggccattcactcaggaaagaaaaaagaagcaatgatccagtgctcattggaagcttgtcggattcttgacactttgggattgcttcggcaggaagcagtatctcggaaaaggaaagccaagaactgggaagatgaagacttttatgatagtgatgatgacacatttcttgataggactggcctgattgagaagaagcgtctgaacagaatgaagaaggctggcaagattgatgagaagccagagacctttgaatcattggttgcaaaattaaatgatgctgaaagggaactttctgaaatttctgagagattgaaagcctcaagccaagttctatcagagtctccatctcaggattctttagatgcgttcatgtcagaaatgaaatcaggcagtacattagatggtgtgtcccggaagaaacttcacctgagaacttttgaactgaggaaagaacaacagagacttaaagggttaataaaaattgtaaagccagcagagattccagaactaaaaaagactgaaactcagactacaggtgcagaaaacaaagctaaaaagcttacattgcctctatttggtgccatgaaaggaggaagcaaattcaaattaaaaactggaacagtagggaagttaccccccaagcgtccagaactccctccaactctaatgagaatgaaagatgagcctgaagtagaagaggaggaggaagaggaagaggaagaagagaaagaaaaggaggagcatgaaaagaaaaaactggaggatggaagcctcagtaggccacagccagagatagagccagaagcagcagtgcaggaaatgaggcctcccacagatctcacacattttaaagaaacccaaacccatgaaaacatgtctcaacttagcgaggaagaacagaataaagattatcaagactgtagcaaaaccacttcattgtgcgcaggaccctcagcatcaaagaatgaatatgagaaaagcagaggtgaattgaagaaaaagaaaacacctggtccaggcaaacttccaccaacactttcttccaaatatcctgaagatgacccagactactgtgtgtgggtcccacctgaaggtcaaagtggagatggcagaacccatcttaatgacaagtatggctattgattgcttcagaatcccaaaagaaaaccttgtggaccatgtgacatggaatatttgggataatgtatcaaattgaatggccagagaagtttagatgattatttgtaagatctggtgactggcttttcgttctgtgttcttggcttcctaaatttatctgcccatatgattctcatgcatttgatatttatgtttaaaagtgtttatatatgtatgtaaaaagggaaccatatgttttgagaatttgtaaagtgagagacatgatcctattaaaataagaaggcaaaaatgttcctaataaaaaaaaaaaaa

SEQ ID NO: 175 - DNA, 371 bp, HOMO SAPIENS
atcttctgcccataatgtacccataaagtgtacccataatgacagaacaatttgggcaaatgtgcttgtactccaggagtcctgaaggcatagttcaatgtgaccctttgagaaatctatgattctttgcagtcttcatttttatcttaagaattcatgcagattttgcatctgctactccataatgtttattttagtataaaaatatttaaatttttaaaattaacatcacttatccccactgctgtataccttgatttggaaagtaaggtggtatgcacaatcacattgaattcatagtaagtgctgagcagattggtatcttatgtttgtcgaatgtttgagttgcacacacaaattaggcttctaga

SEQ ID NO: 176 - DNA, 767 bp, HOMO SAPIENS
ttaatacttctatttcttacaaaacaaccgtataggggttaaagtatcagtgcaaagtcccgttcaaatattgactcagtaatgagctctacaagccagcctttgtggcatgttaaattcaaaacaagcttagcatttttttttttttttttggatagaaactggtgggggtggggaaagaaagagggaactgggaagagaaggaggggaacttaaaccttgcttcctgctctgtctttctcagaaaaccaaatatggcatcttccatgaggagcttgttttctgaccacgggaaatatgttgaatctttccggaggtttctcaaccattccacggaacaccagtgcatgcaggaattcatggacaagaagctgccaggcataataggaagataccagaattgctgttaacaaataaaatactggccagatgtgttggttcacgcctgtaatcctagcacttcgggaggctgaggcgggaggattacttgagcctaggagtttgagaccagcctgggcaacatagcaagatcccatctctacaaaaaagtgaaaaagttagctgaacaaggcggcatgcacatgctactccagacgctgaagtgggaagatcacttaagtccgagagatcgaggcttcagtgagatatggctgagacactgctctcagcctggatgacagagtgagaacctgtctcaaacaagagaaaaaaataaatcaaatgctactcaaaattctcaaaaaaaaaaaaaaaaaaaaaaaaaaaaa

SEQ ID NO: 177 - DNA, 3325 bp, HOMO SAPIENS
ggggtccttggctgggcggggcttgctcgcggtggcttgtggctccttcctgcggtgcttctctctttcgctcaggcccgtggcgccgacaggatgggcaagtgtcgtggacttcgtactgctaggaagctccgtagtcaccgacgagaccagaagtggcatgataaacagtataagaaagctcatttgggcacagccctaaaggccaacccttttggaggtgcttctcatgcaaaaggaatcgtgctggaaaaagtaggagttgaagccaaacagccaaattctgccattaggaagtgtgtaagggtccagctgatcaagaatggcaagaaaatcacagcctttgtacccaatgacggttgcttgaactttattgaggaaaatgatgaagttctggttgctggatttggtcgcaaaggtcatgctgttggtgatattcctggagtccgctttaaggttgtcaaagtagccaatgtttctcttttggccctatacaaaggcaagaaggaaagaccaagatcataaatattaatggtgaaaacactgtagtaataaattttcatatgccaaaaaatgtttgtatcttactgtcccctgttctcaccacgaagatcatgttcattaccaccaccacccccccttattttttttatcctaaaccagcaaacgcaggacctgtaccaattttaggagacaataagacagggttgtttcaggattctctagagttaataacatttgtaacctggcacagtttccctcatcctgtggaataagaaaatgggatagatctggaataaatgtgcagtattgtagtattactttaagaactttaagggaacttcaaaaactcactgaaattctagtgagatactttcttttttattcttggtattttccatatcgggtgcaacacttcagttaccaaatttcattgcacatagattatcttaggtacccttggaaatgcacattcttgtatccatcttacaggggcccaagatgataaatagtaaactcaaaattgctccccactctgtttattatttaaaggtgtcaggatctgtgttgtaatgtgtctacattaatgtgtttaggagaatacaggcattggatcatttagttgatggaagtatatgccaggcaagggagataaggtatacgacaagactgatgttttcagtatcttctcatgaggttgtcagagaccttcatgtcttcaaagactagtcagcaaatgaagtggtttagtgtagagacaagattggttgtgttttgataatttaagctaggtattgagtacatgtggattttgctgtccacaaatacttgtttcagagttttcatggatacagtggcatggttgaaatgaagctgtgagccttctgctttaaatctgatgtaagaaactcctgttaacaaatagtaagtatgggttaattagccctttgatcaaagcctagctttacattgtttaggatctttggaaaacaattggtttggttgcccactttccgtaggatcaagagcagaacctttcacatggcacagaagaacccaggttgcgcttcatacctgcatattccagccttagcctgccatttctctccttggcactttgtgctccagcaacactggtctcagttggtcatcctcaaacttgggttccatatccagcctcaggacctctgttcctgttactatggttccttgcatgtcgcctgctcttactaaagagctcgtgtgttttccagcacacttcggtttatctcttgatgatgatgctagtctctccctccgcaagggcggaaaggctgcctgttggtttgtaccagtgtttcctaacgtgtagctgcagtcagtatttggctaagctgttcccaggggctcaacagatgctttcggatgagccttaactgacccaatcctttgtgatgcgggagagattgctaggcctcgctcacctggccagaaccagggaaagaggccgcggttgcagcgcgattccaggccctgggcgtcaggcgcggggtgggcagctctccccgggcggtggggcccttgtgaccgcgaggcggggcgcaccaggaagggagtgggacagcgcgggcgcccagggatgtggcctggttacctgccttctctgatacgtcaagacaccttcaacaatggcttgcagctgtaccctgttggctgcacccaggacgcccttttcactgctaagcagtcctacctgaggcccaggggctgccagattgacccataaataatctccggcgcctcagatccagaagctgctgagcctgatcttagtgccttctcctttctctgtgtggccccccagcccctttccccactgccttgtgtccaaggccctttccttcatgtatccatggaggagagacaaaaatacacatcaataaaataagatagggaatccataaatagacattcagaagtatggccaacggatttatcttaaaaccaatggaggaagaagagtttcaataaatgttgtggacttccatttgtcaaagaccaaaacaaaggaaccccaaccttacatgtaatacaaacttaactcaaaatggatcatatatctaaatgtaaaatggaaagctataaaactgaaaacagactatctttacaacctaggcgtaggtatagtttttagacattacaccaaaagcacatgccgtaaaagaaaaaatagataaattggtggatttcattaaaattaaaaaactttttctctctgaaaaatcctgttaagctgggcgctgtggttcatgcctgtaatcccagcactttgggaggctgagttgggaagaaattaatagcttgaggccaggagttcaagatcatcctgggcagcaaagtcatacactcttgagggaagagagagaccttctcatattgttttatattgttttatactcagtacctgttttaagaaaaaaacaaggaagtgaaatcaaagacaggcagcccggcaccaggcctgaaaccagccctgggcctgcctggcctaaacctagtagttaaaaatcaacttacgacttagaacctgatgttatccgtagattccaagcattgtataaaaaaattgtgaaactccctgttgtgttctgtaccagtgcatgaaacccctgtcacatatcccctagattgctcaatcaatcacgaccctttcatgtgaaatctttagtgttgtgagcccttaaaagggacagaaattgtgcacttgaggagctcagattttaaggctgtagcttgccgatgctcccagctgaataaagcccttccttctacaaaaaaaaaaaaa

SEQ ID NO: 178 - DNA, 381 bp, HOMO SAPIENS
  misc_feature (223)..(223): n is a, c, g, or t
  misc_feature (256)..(256): n is a, c, g, or t
  misc_feature (333)..(333): n is a, c, g, or t
  misc_feature (336)..(336): n is a, c, g, or t
gtaccacaggaccagcacagattgctccagcacattgtccagccacgagacagaatttccctcttacagatccattgaatagccctggcctgtgggtttgctgtaaagatgcaaaagccctgaagcattatctgccaaacctcagccctgaccatggttaggctgacatcaggggaggcagcaggagagggagagaaaagggtatctcattgtggaactgggncagtggtgggcaggggctgatgcaggaggggtnccatggcccaactgctcttcacccacggtccttacacagacctgatcctgctaattctgactcagctttcagactcnagnctgcggacactcaatttttagtaataagcagtctcctcataattt

SEQ ID NO: 179 - DNA, 1377 bp, HOMO SAPIENS
gccagccctcggaaacggaagtgagcggcggggtcgactgacggtaacggggcagagaggctgttcgcagagctgcggaagatgaatgccagaggacttggatctgagctaaaggacagtattccagttactgaactttcagcaagtggaccttttgaaagtcatgatcttcttcggaaaggtttttcttgtgtgaaaaatgaacttttgcctagtcatccccttgaattatcagaaaaaaatttccagctcaaccaagataaaatgaatttttccacactgagaaacattcagggtctatttgctccgctaaaattacagatggaattcaaggcagtgcagcaggttcagcgtcttccatttctttcaagctcaaatctttcactggatgttttgaggggtaatgatgagactattggatttgaggatattcttaatgatccatcacaaagcgaagtcatgggagagccacacttgatggtggaatataaacttggtttactgtaatagtgtgctgttcatggaaaccgagggctgcatcttgtttatagtcatctttgtactgtaatttgatgtacacaacattaaaagtactgacacctgagaatttctgctcaagtagtatcagtgatcatttaaaatttggaggggtctttggtttacagccatgtgacaattaaaagcactaaagggagatcatgttaaagctcttaatttatattaaaacagtagcctttgtctttaaaaaagttgttgctcatgaatattataaaatgatctacaggtttcaattcaacctgtttctaggtttttttgtaaatttagttttgattaagcattataagcatttgagtctataaactttatagtagcatctttcagaataaacatttttaattgatttcagtggcaactctcaaattgattacaatatgagatatatcagtgtcgtccattaacactcataagaataatatttactgtgtcagtgctattttaggattatagttattgtttgattatttcaggttgaaaagtagaagttccaaggttttgattttggtctggtctttaagtgaaaaattaaagcaaccagtagatgtaggttaaacttttacttcatagacttaatatgtaattaatatattgccaagcaacactgttaaagaaaagtaaaactcattttttcttgttcttaatttatatattacaagatactgtaaggtattctttatgaagttgatatataaaaatttacatttttagaacattagtgaatggatcatcttttacaattaaaagtatattttgattatcagtttcttaggaacatctttgattagataaattactgatttgaaaaaaaaaaaaaaaaaa

SEQ ID NO: 180 - DNA, 3214 bp, HOMO SAPIENS
gggtgggaggagccagcggccggggaggttctagtctgttctgtcttgcggcagccgcccccttctgcgcggtcacgccgagccagcgcctgggcctggaaccgggccgtagcccccccagtttcgcccaccacctccctaccatggacccccgcaaagtgaacgagcttcgggcctttgtgaaaatgtgtaagcaggatccgagcgttctgcacaccgaggaaatgcgcttcctgagggagtgggtggagagcatgggtggtaaagtaccacctgctactcagaaagctaaatcagaagaaaataccaaggaagaaaaacctgatagtaagaaggtggaggaagacttaaaggcagacgaaccatcaagtgaggaaagtgatctagaaattgataaagaaggtgtgattgaaccagacactgatgctcctcaagaaatgggagatgaaaatgcggagataacggaggagatgatggatcaggcaaatgataaaaaagtggctgctattgaagccctaaatgatggtgaactccagaaagccattgacttattcacagatgccatcaagctgaatcctcgcttggccattttgtatgccaagagggccagtgtcttcgtcaaattacagaagccaaatgctgccatccgagactgtgacagagccattgaaataaatcctgattcagctcagccttacaagtggcgggggaaagcacacagacttctaggccactgggaagaagcagcccatgatcttgcccttgcctgtaaattggattatgatgaagatgctagtgcaatgctgaaagaagttcaacctagggcacagaaaattgcagaacatcggagaaagtatgagcgaaaacgtgaagagcgagagatcaaagaaagaatagaacgagttaagaaggctcgagaagagcatgagagagcccagagggaggaagaagccagacgacagtcaggagctcagtatggctcttttccaggtggctttcctgggggaatgcctggtaattttcccggaggaatgcctggaatgggagggggcatgcctggaatggctggaatgcctggactcaatgaaattcttagtgatccagaggttcttgcagccatgcaggatccagaagttatggtggctttccaggatgtggctcagaacccagcaaatatgtcaaaataccagagcaacccaaaggttatgaatctcatcagtaaattgtcagccaaatttggaggtcaagcgtaatgtccttctgataaataaagcccttgctgaaggaaaagcaacctagatcaccttatggatgtcgcaataatacaaaccagtgtacctctgaccttctcatcaagagagctggggtgctttgaagataatccctacccctctcccccaaatgcagctgaagcattttacagtggtttgccattagggtattcattcagataatgttttcctactaggaattacaaactttaaacactttttaaatcttcaaaatatttaaaacaaatttaaagggcctgttaattcttatatttttctttactaatcattttggatttttttctttgaattattggcagggaatatacttatgtatggaagattactgctctgagtgaaataaaagttattagtgcgaggcaaacataactcatttgaggataaagtttgtgttggatatgtggttcctgatgcattttgacttgtctttttaaatgctttatctttttctttaaagatttatttcaataaaactaattgggaccacccgtatttcagtaggacctgggtagggattggaagtacttggcagggcagcagcaatcttgctgtgtttgatataacatgcatccttgggcaggttgcccttaaatcttacactgtggtgaagggatgttttttttgtaatgctgcagtagagttggagtacttagttctcttgttgtccagtatatctaataagtgtttttcatattatttccacgtaagggaaataaggtagtacttttctttttatatttctatgcttaaaattctctttcctagtcaaaaattgcccaaatctgtgtttgctttctgcttgctacatttgtctcccttacttttcttgagctaaagacaggctttttccaccggcatcatcactgctatcatcattaacagcgtaattatacaagcatatttaatgctgagtttaatttaatatgtaatacatatggtaattgtagggtaatacccacaacaactgtagtttcttacttggccaagagaatgcttatttaagtgttagacttccattctggcaaaatcttgccttatcagaagacattggaaagagggattccctttggtgtttggtcttctacttagaaaaacctattgcagttagtttatcttgtagtattcatctttgtattctgaagataaggtttgaattaaattgatacacacagaggggaaccgattttttttatccaatgtgaattataaatgagataatccacagttattcattgtggagttgttgagactatgaaagactcattgtctttgtattcagctcttaaatagtgtaactatatccccacctctgcttgctttctttccctcccctccaatgataaagaaaatgataaattttctgttgtgcattcaattcttattttaaataagactaagtataggcattgtacctgacattgctacgtttctaccagtgtttcaatttaaagtgctagtgtttaaaaacattttcaagggataaggccttctgtactttgcttatttgaagaatcagtggtaggagcagtgaagtaaattctatggagtacatttctaaaataccacatttctgaaatcataaataagtttattcaggttctaaccctttgctgtacacaagcagacagaaatgcatctgttacataaatgagaaaaagctattatgctgatggagcatgctttttaaatcctttaaaaacactcaccatataaacttgcatttgagcttgtgtgttcttttgttaatgtgtagagttctcctttctcgaaattgccagtgtgtacttggcttaactcaagaacagtttcttctggattccttatttgatttatttaacctaattatattctaatattgcaaatattaccataagtgggtaaaagtaaaattcctcttctgaaaaaaaaaaaaaaaaaaaaaa

SEQ ID NO: 181 - DNA, 561 bp, HOMO SAPIENS
cttttccctccttgcttttctgccagttcctacctggcacggagaagtgcagggtggagagatctccgagaagcgccagccttctggggcttcctgttccttacagcgggaagcttggtagatggacgtattattgacacctccctgaccagagaccctctggttatagaacttggccaaaagcaggtgattccaggtctggagcagagtcttctcgacatgtgtgtgggagagaagcgaagggcaatcattccttctcacttggcctatggaaaacggggatttccaccatctgtcccagcggatgcagtggtgcagtatgacgtggagctgattgcactaatccgagccaactactggctaaagctggtgaagggcattttgcctctggtagggatggccatggtgccagccctcctgggcctcattgggtatcacctatacagaaaggccaatagacccaaagtctccaaaaagaagctcaaggaagagaaacgaaacaagagcaaaaagaaataataaataataaattttaaaaaacttaaaaaaaaaaaaaaaaaa

SEQ ID NO: 182 - DNA, 2733 bp, HOMO SAPIENS
ggcagaggagcgagtgcagcggccagcagcacatccccgctccacagtcgccgcagtcgccgcagccgccgccgccgccccgcgcgcccaaccgccgcggccccctgccccgccggcctgccagtgagagagcggcgagggggcgcccggccggactctgagcctagtcctctcgcgctgcggccgcccgcgcctcctcggccgcctgtcgggcatgaaaaccaaattctgcaccgggggcgaggcggagccctcgccgctcgggctgctgctgagctgcggtagcggcagcgcggccccggcgcccggcgtggggcagcagcgcgacgccgccagcgacctcgagtccaagcagctgggcggccaacagccgccgctcgcgctgccccctccgccgccgctgccgctgccgctgccgctgccccagcccccgccgccgcagccgcccgcagacgagcagccggagccccggacgcggcgcagggcctatctgtggtgcaaggagttcctgcccggcgcctggcggggcctccgcgaggacgagttccacatcagtgtcatcagaggcggccttagcaacatgctgttccagtgctccctacctgacaccacagccacccttggtgatgagcctcggaaagtgctcctgcggctgtatggagcgattttgcagatgaggtcctgtaataaagagggatccgaacaagctcagaaagaaaatgaatttcaaggggctgaggccatggttctggagagcgttatgtttgccattctcgcagagaggtcacttgggccaaaactctatggcatctttccccaaggccgactggagcagttcatcccgagccggcgattagatactgaagaattaagtttgccagatatttctgcagaaatcgccgagaaaatggctacatttcatggtatgaaaatgccattcaataaggaaccaaaatggctttttggcacaatggaaaagtatctaaaggaagtgctgagaattaaatttactgaggaatccagaattaaaaagctccacaaattgctcagttacaatctgcccttggaactggaaaacctgagatcattgcttgaatctactccatctccagttgtattttgtcataatgactgtcaagaaggtaatatcttgttgctggaaggccgagagaattctgaaaaacagaaactgatgctcattgatttcgaatacagcagttacaattacaggggattcgacattggaaatcacttctgtgagtggatgtatgattatagctatgaaaaatacccttttttcagagcaaacatccggaagtatcccaccaagaaacaacagctccattttatttccagttacttgcctgcattccaaaatgactttgaaaacctcagtactgaagaaaaatccattataaaagaagaaatgttgcttgaagttaataggtttgcccttgcatctcatttcctctggggactgtggtccattgtacaagccaagatttcatctattgaatttgggtacatggactacgcccaagcaaggtttgatgcctatttccaccagaagaggaagcttggggtgtgactgtggggaggactccatccacctcatcactggactgcatggggaggcagcagagcggggtcccctctgtgcttcgactactgctcctgtggcaggaggctttgggtggctcactactgaacacatgtgtatgatactaaagacggtattaaaatggagcgacgtttatttcatctcttgtttacgatttcactaggactcagaaacgagatcgggaagcagaaatatagtgcaatagtgcaacatctctgaatccttttaatctagagaaggcatttcatatttgggggctaaggtttccagtcagatgaggcaaacagcaagagtaagcagtgttacttgcaggtactttggttaatgttgatttaaattttcatgaatgtgctggtgaacactgtgaccaggcttttgtagatggcgatgtgttatagacggtgctcactcccaagggacagcaagtgagcagagatgtactgcaaagtcgccagtcactgctgcaaggtggcctctgcctggggcctccagaagctgctcctttaccctcttggtcccatggctgaagctggagcagcggattgctctggagcagccaaggccgccagcgtgtggagcagagctctcccctcctgctgggcgtgtgtgacactgatgagtttcactgtactgcatgtgacttctcccctgcccttcctcctgatggagtgtgcagacagccatgcgtggccacgggggcagtgtgaggacctccctgtctcccggctcccctcccaggggagccagctgcttgacctagctctttgggcctctcctgccctctgctctgcctggagtgtcggatcctgtgagtaggctgggcctcccctgggcagggttctccaagggcccggtttcccggcccttacctttcctgatgcccctgacatcatcattcttgtgggagacagcagcctgtatgtggtgtggggcgtggatcgagtgtagctgtgaaatccatatatatgaaatgtcctgcgggatacagtcttagctgacttttttttactctgaactcttatttgaattgttttttgtgcatatatttctgctaccacagagattgtactatacaaataaaaaaataaaaacccaaaaaaaaaaaaaaaaaa

SEQ ID NO: 183 - DNA, 2475 bp, HOMO SAPIENS
gacgggggcgccccggcctaagcgggactaggagggcgcgccacccgcttccgctgcccgccggggaatcccccgggctggcgcgcagggaagttcccgaacgcgcgggcataaaagggcagccggcgcccgcgcgccacagctctgcagctcgtggcagcggcgcagcgctccagccatgtcgcgcggcctccagcttctgctcctgagctgcgcctacagcctggctcccgcgacgccggaggtgaaggtggcttgctccgaagatgtggacttgccctgcaccgccccctgggatccgcaggttccctacacggtctcctgggtcaagttattggagggtggtgaagagaggatggagacaccccaggaagaccacctcaggggacagcactatcatcagaaggggcaaaatggttctttcgacgcccccaatgaaaggccctattccctgaagatccgaaacactaccagctgcaactcggggacatacaggtgcactctgcaggacccggatgggcagagaaacctaagtggcaaggtgatcttgagagtgacaggatgccctgcacagcgtaaagaagagacttttaagaaatacagagcggagattgtcctgctgctggctctggttattttctacttaacactcatcattttcacttgttttgcacggctacagagtatcttcccagatttttctaaagctggcatggaacgagcttttctcccagttacctccccaaataagcatttagggctagtgactcctcacaagacagaactggtatgagcaggatttctgcaggttcttcttcctgaagctgaggctcaggggtgtgcctgtctgttacactggaggagagaagaatgagcctacgctgaagatggcatcctgtgaagtccttcacctcactgaaaacatctggaaggggatcccaccccattttctgtgggcaggcctcgaaaaccatcacatgaccacatagcatgaggccactgctgcttctccatggccaccttttcagcgatgtatgcagctatctggtcaacctcctggacattttttcagtcatataaaagctatggtgagatgcagctggaaaagggtcttgggaaatatgaatgcccccagctggcccgtgacagactcctgaggacagctgtcctcttctgcatcttggggacatctctttgaattttctgtgttttgctgtaccagcccagatgttttacgtctgggagaaattgacagatcaagctgtgagacagtgggaaatatttagcaaataatttcctggtgtgaaggtcctgctattactaaggagtaatctgtgtacaaagaaataacaagtcgatgaactattccccagcagggtcttttcatctgggaaagacatccataaagaagcaataaagaagagtgccacatttatttttatatctatatgtacttgtcaaagaaggtttgtgtttttctgcttttgaaatctgtatctgtagtgagatagcattgtgaactgacaggcagcctggacatagagagggagaagaagtcagagagggtgacaagatagagagctatttaatggccggctggaaatgctgggctgacggtgcagtctgggtgctcgcccacttgtcccactatctgggtgcatgatcttgagcaagttccttctggtgtctgctttctccattgtaaaccacaaggctgttgcatgggctaatgaagatcatatacgtgaaaattatttgaaaacatataaagcactatacagattcgaaactccattgagtcattatccttgctatgatgatggtgttttggggatgagagggtgctatccatttctcatgttttccattgtttgaaacaaagaaggttaccaagaagcctttcctgtagccttctgtaggaattcttttggggaagtgaggaagccaggtccacggtctgttcttgaagcagtagcctaacacactccaagatatggacacacgggagccgctggcagaagggacttcacgaagtgttgcatggatgttttagccattgttggctttcccttatcaaacttgggcccttcccttcttggtttccaaaggcattttattgcttgagttatatgttcactgtccccctaatattagggagtaaaacggataccaagttgatttagtgtttttacctctgtcttggctttcatgttattaaacgtatgcatgtgaagaaagggtgtttttctgttttatattcaactcataagactttgggataggaaaaatgagtaatggttactaggcttaatacctgggtgattacataatctgtacaatgaacccccatgatgtaagtttacctatgtaacaaacctgcacttatacccatgaacttaaaatgaaagttaaaaataaaaaacatatacaaataaaaaaatcccgactttgggatgagtgctaggatgttgtaaa

SEQ ID NO: 184 - DNA, 9068 bp, HOMO SAPIENS
cggcgcgcgcgcggggcgggggcgcgcggaggggggggctgccccggggcggcccccccaggtcggggcgcggcgggcggcggcggcgggcgcgcgtcccgtccaggtccggagtaaccgccgccgccgccgccaaagctcgccaacatggcggacctggaggctgtgctggccgatgtcagttacctgatggccatggagaagagcaaggcgaccccggccgcccgcgccagcaagaggatcgtcctgccggagcccagtatccggagtgtgatgcagaagtaccttgcagagagaaatgaaataacctttgacaagattttcaatcagaaaattggtttcttgctatttaaagatttttgtttgaatgaaattaatgaagctgtacctcaggtgaagttttatgaagagataaaggaatatgaaaaacttgataatgaggaagaccgcctttgcagaagtcgacaaatttatgatgcctacatcatgaaggaacttctttcctgttcacatcctttctcaaagcaagctgtagaacacgtacaaagtcatttatccaagaaacaagtgacatcaactctttttcagccatacatagaagaaatttgtgaaagccttcgaggtgacatttttcaaaaatttatggaaagtgacaagttcactagattttgtcagtggaaaaacgttgaattaaatatccatttgaccatgaatgagttcagtgtgcataggattattggacgaggaggattcggggaagtttatggttgcaggaaagcagacactggaaaaatgtatgcaatgaaatgcttagataagaagaggatcaaaatgaaacaaggagaaacattagccttaaatgaaagaatcatgttgtctcttgtcagcacaggagactgtcctttcattgtatgtatgacctatgccttccataccccagataaactctgcttcatcctggatctgatgaacgggggcgatttgcactaccacctttcacaacacggtgtgttctctgagaaggagatgcggttttatgccactgaaatcattctgggtctggaacacatgcacaatcggtttgttgtctacagagatttgaagccagcaaatattctcttggatgaacatggacacgcaagaatatcagatcttggtcttgcctgcgatttttccaaaaagaagcctcatgcgagtgttggcacccatgggtacatggctcccgaggtgctgcagaaggggacggcctatgacagcagtgccgactggttctccctgggctgcatgcttttcaaacttctgagaggtcacagccctttcagacaacataaaaccaaagacaagcatgaaattgaccgaatgacactcaccgtgaatgtggaacttccagacaccttctctcctgaactgaagtcccttttggagggcttgcttcagcgagacgttagcaagcggctgggctgtcacggaggcggctcacaggaagtaaaagagcacagctttttcaaaggtgttgactggcagcatgtctacttacaaaagtacccaccacccttgattcctccccggggagaagtcaatgctgctgatgcctttgatattggctcatttgatgaagaggataccaaagggattaagctacttgattgcgaccaagaactctacaagaacttccctttggtcatctctgaacgctggcagcaagaagtaacggaaacagtttatgaagcagtaaatgcagacacagataaaatcgaggccaggaagagagctaaaaataagcaacttggccacgaagaagattacgctctggggaaggactgtattatgcacgggtacatgctgaaactgggaaacccatttctgactcagtggcagcgtcgctatttttacctctttccaaatagacttgaatggagaggagagggagagtcccggcaaaatttactgacaatggaacagattctctctgtggaagaaactcaaattaaagacaaaaaatgcattttgttcagaataaaaggagggaaacaatttgtcttgcaatgtgagagtgatccagagtttgtgcagtggaagaaagagttgaacgaaaccttcaaggaggcccagcggctattgcgtcgtgccccgaagttcctcaacaaacctcggtcaggtactgtggagctcccaaagccatccctctgtcacagaaacagcaacggcctctagcacccagaaacagggagggtcctcgaggaggacacaccagggtctcagccttttggggtgaacgaggatgaggcatctgatctattcgctaccgggactcctccaggctcccgagaggagtcgggacccttcggcttggggtcagctcagctccctgccttgtcacatttgtctgcattagaaactactgaagaaataaaagttctttttctttgctacacactttggtacctatgaacctagaacttgaagtgactcctacttatcacgtaaatttttatgtctgatatcaaacacatcttagactccccagaatggaatttaaagatgttcagtgttgggtaacagattgccctaagcattgccacatattctgtctagtcactgctgattttctatgtctttgctccatactgctgggggatgggagagccacagtgtgtttcttttgtgcacttcgcaactgacttcttgtcctggggttaaaagttgaagatattttctgatgatattaaaagttgaagatatttctgcacttgggccctcctctgggagccgcacccacatgactgccctgcctctgaccagtctgttccggggccccctcagccaggtgggaatgacggacacgtactatccaagtgtatgggattaactaatcattgaaggcattcatccgtccatcattggaaagatttacagtgattctgaaggacaggccgtggagttttaggtttcaggggcaagagcagttttcaaaagtctttgagtccagtgtgcacgagtcgacaagcagtacctggcatgcaggagcactcatgggtgagtccgtctcaggtctcgacaattagcagttgtgtgacagtcattctggttccttctgcctgaccctgggagacatatcagtaatggatgtacaaaagcaggtctgttttatgtcttagtataatttcagatgaattgtattgaaaaaatgctgaggaatgaatgtgtcaaaatgggttaactgtgtatattgactttcatgtcgtcatgcatctgtcatgaatgaatgatactttgcactgggctgtacgacagtgaggaccttagggcatgaagcctttttcctggtcccagcagcatctgccctgtgaagtttgttttctcccactgcctccaggccccactgatacccccaaatagatgctgggttatgagaaccagcgaaatcccccatgtcatcagtcttaaaaaaaaaattttacaaatccacgtatttgtcccattcttggagtagttttagtgtatgtctttacattaactactaacagtataaataacttgacatcgtaattgtctgcatcctgtccttgatatttttagcagttccaaatctttgtttttgtatttgtttgctgtgttcatgggcaaagtaagtactttttaatgcagttattttgagagtttggaagataattaccaaaagggtccattatttcataagagttactttgcaaaaaaaaaaatgtgggtttttttttttgtctatctcaactactagttggggtttaaattaacatacattttctactatctgttatttccagtgtgggaggagggatgtactacttacatgcattctccttatttaaaaaggaagaatagtattcaaattctgttgaaacacacacacacacacacacacacacacacacacactccagaagcagaaaagccattgttcttaaagagtgaatgtcttcccagccctggttaattatagctgtgactgatgccgttcccgtctgcatctcaagctcataggttctcagcatgtgcagttgaggatgcgctgggcctcatgcctgttctagatctccaggataaagggcctgctgttgactccaccagggtctgggcttagcgtctaatatctcgtacctagggcgtgagctgcacaaacgtgttcagaaagattattcaactttcccatacttgttctaaaattgagctgatccgcatctctttcaaaaactagaatttctgctctaagaatagaacataaggctccactcccttttagaaaagatatatgaattggaaaatgctctgaaagtccttttgcttcaaacaaaagtgtaaacttttacacttccccaactcacatttgatttgtaatgatatggttgagaagtacatctagatgtcatttattaaaagtgctttgtaagactagattgagctgtttctgagggcggtcaccagttgtgttggggtctggtttgagtgccttctgccaaaatgttgtgatggaggtgtttctgcgaccagacacaggataccgctgtgtctgcacccggttgcctgcatggccagaggaaaagtcagttggattaaacatcatggtatacttggctgttgtttttttttaattttttaattttttgggatagggcctcgctctgtcacccaggctggagaacagtgggatgatcatggctcactgcagccttgaattcctaggttcaagcaatcctcccacgtcagcctcctgagtagctaggactacaggtgcatgccacctttcctggctaatttattttttgggtagagatggggtcttgaactcttaggctcaagtgatcctccttccttggcctcccaaaatgctggaattagagatgtaagccaccatgcccagccatagtacttggatgttttagaaggttttccaagtattacataattcctagatgttcacccttattacactccaactattaaaaaggtcaaaattcagcctattttttttcattattttagattcctgtggttgggatattttaacattgatgagaaaaataattgaggttgatatttttacaaaatcatgcggtaataagtcttgatttcatgattcaaaagaatcaataaagcctaaaaataatagattactttaagctgctatgtaagatatatatggaataaattaaaaacctttgtgaattcaggtttattatttttaacctaaaacattctctttggttcattcatcccctcatgtcatgggggctcattggttttccttctttgtcatatttaagtatgatttttcaacaaaacttctagaagtcagcttattatgtcaccattcatgcaaagtgctcatgcctctgattggtccattcactgacgtgacaatttcaggtcctatgtttaaaaagaaggggctggccgggcacgatggctcacgcctataatcccagcactttgggaggccgagaggggcggttcacgaggtcaggagattgagaccatcctggttagcagagtgaaaccccgtctctactaaaaatacaaataaaaattagccgggcgtggtggcgggcgcctgtagtcccagctacttgggaggctgaggcaggagaatggcatgaacccgggaggcagagcttgcagtgagccgagattgcgccactgcactccagcctgggcgacagagcgagactctgtctcaaaaaaaaaaaggaggggggctaaatatccagtgagatgcactgaggaaaggaagcattttgctgaagacagcagcagcaacaaacaatggtctgtttgttgcaaacaagatgtagcttgatttctggtctgacatatgccatatacagatattagaaacgactgtttgaaggccacactggtcatctacaaagtaatgtttaccaattgacgacagggatttaactagattaaaaagatcaaagtgtggtttttctctgctttttaaaatttcactcggaatttgtagctgggccaattcaacacattttacttttcagtggaattgatttttctaatgtttcagaattttaacatatcaagaagaaaacaacgttctcaaagtctggcctctttagcatgatgtaaacctatagaaatgctttgaaatgtgctggtgtaagataagagttatcttgtatgatttaatcatatgcagtgttgtctcagttacgttcagggaaatgtttctgtgtcattcagagatgcttgatgaattaacacctcccaccctgagtgaggggttgacttgttgggagatgatttgggcttcactgggatctgtgacaggtgggggctgggctgggtgtcacaaagagaatagtggtagaaatcgggcgaaggaagaaagaagttactggtaaaaatcattacaccataaagcaccaaggaaataactgagttaaaataggtgaagtttcttttttcccccctgtaacaggagagttttccttatgataattattctgagacttggtcactttgtttttgaatgtggagctgctgaactcattcagaagccatttgctgcctatcaggactttctgaagaagttcttttgcctctgcctaccctctggcaccctcccatggaggcacaggggacccagagctaaagcattaccaggccatctccaaaacaccccgtgtgtgtgtgtgtgtgtgtgtgtgtgtgtgtgtgtgtgtgtgtgcactttgcagcccccgaggtggagaggcagtgtctggatcactgtgaatgcattgccccattggtcagttggggacactgttacaaatccactgaagtcctggtaaaactgtcaagagtaacaggcctcttctgttctaccctgctcacttccacggtgagttaccagcctgggcaacacagcaagaccccatctctacaaaaaaaatttttttaagtaattaaccgtttaaattttttcctaaagatttaacatgatttttccctcctatgtaaagtttactggagagacttgaattacttaaattcatgttaatatgatttttttttaatccaggtcacattttaacaaagtttattatgaaacaaatgaaatttgaactctaaaatggtactccttggcttcctcaagtcacaatgaactttatattttctttgtccttaaggactaagatagttgttttatttcagccgaatcacagagataaccactcctgcaggcccccacagctggcccaaaggggctgtctttctgacctggctgtgttagcactgattgagaaacgcaggctcccaaattttaaattgcctttattaaaaacacaaactacagaaaatgggttaagagtatacgcatttcatcaaacacatataggggaaaaaatccttcaatttagagttaaataactcagctttgtatagtagagttagcgctccagtatctaacaatctcagaatcatctctgaaaactggtaactatgcttccatttttaattttgtcctaaatatcagatgtctttgatgtaagggtagggaatggagaaatattttcaattgtgtatttgtattacaaagaacttgaaatttactttcttagttgattatattaaatgatgtatatattatatgtggtttataagctcaacactggccatttttttagttttattgttaaatggtatttttctatgtttaattataatagatctggctttttctggatagcataaagatcactgaactatatatatataagaaacaagagttctattttagcacaaaggcattttatattatttattgaatccataagtttgttttcgtcaaaaacattccatattatttctgctcctttttatttgtatagtttgttatttaaagaaatggcagtccttcctgttcttaatacaataaaattgaaataatgcacctagtaatgtggccgacatctcttctcaccaccatggactgttttcaacaacagttgatcttctggtctgtgctgagaggcgcatgcatgtctttcgtcacgtcgggcagcacacctgctgtgaaatactgctttcatctacctcttcagaaggcttcttgcttgttgacaagtaccgcaaaggctttattctggactggctatctcataaaaggatttctgtaagactttgcagtgtcattccctcagaacctaggtttgtttctaaagccacggtattgtccaggagcccctgtgtgtggggcaggtagctatccctcccatgtcattagtaatcctttaggatttaaggtacaactggacagcatcattccttccccttattgtgccaaatccccaccatcagccttgccattgccttaagatttgattattgcacccaattacctaaccactaaacagaaaggccaccttcactctttgaaaaaggcaagctgtgcttagaaacactgcttttaagagtagcacatttgagtgtgactttttccccccttcactatttcaaaatggttttgaaatggggtcttaaaggtaagcgccctcatacatgactgaaactttgtgagaggtcttatatttgaatggacccttaatgatttatgtgaaatagaatgaagtcctgtctctgtgagagaacgtgcctcctcactcatttgtctctgtctgttttcatagccatcaatatagtaacatatttactatattcttgaatacccttgaagaaagaaatccgttttctattgtgcattgctatacgaagtgaagccagtaaactagatactgtaaatctagatattgtacctagacaaaatatcattggttctatctctttttgtatctgttgtgccagggaaggtttataatcccttctcagtatacactcactagtgcacgtctgaaatagtatcccacgggagatgctgctccacgtctgaggtcacctgccctgtgtggggcacaccaccgtcagcaccaccgtttttacagttactttggagctgctagactggttttctgtgttggtaaattgcctatataaatctgaataaaaaggatctgtacaaaaaaaaaaaaaaa

SEQ ID NO: 185 - DNA, 2384 bp, HOMO SAPIENS
atctgccaccgcagtctggttggagctgttgtcttgtatgctcagcgaggcccggagagacccgggagagagctaggccgagtccaccgcccgagtctgctgcccgagcccgcgttacgcacaaagccgccgatccccggcctggggtgagcagagcgaccaccgcccgggagcagcgcggcgagacgcacggtgcgccctatgcccccgcgcccccaccgcccccgccgcggcagccgaagcgcagcgagagaacgcgccaccgcggggcccgggtgcagctagcgaccctctcgccacctgcgcgcagcccgaggtgagcagtgagcggcgagcgggagggcagcgaggcgttcgcgggccccctcctgctgcccgggcccggcccgctcatggcggccatccgcaagaagctggtggtggtgggcgacggcgcgtgtggcaagacgtgcctgctgatcgtgttcagtaaggacgagttccccgaggtgtacgtgcccaccgtcttcgagaactatgtggccgacattgaggtggacggcaagcaggtggagctggcgctgtgggacacggcgggccaggaggactacgaccgcctgcggccgctctcctacccggacaccgacgtcattctcatgtgcttctcggtggacagcccggactcgctggagaacatccccgagaagtgggtccccgaggtgaagcacttctgtcccaatgtgcccatcatcctggtggccaacaaaaaagacctgcgcagcgacgagcatgtccgcacagagctggcccgcatgaagcaggaacccgtgcgcacggatgacggccgcgccatggccgtgcgcatccaagcctacgactacctcgagtgctctgccaagaccaaggaaggcgtgcgcgaggtcttcgagacggccacgcgcgccgcgctgcagaagcgctacggctcccagaacggctgcatcaactgctgcaaggtgctatgagggccgcgcccgtcgcgcctgcccctgccggcacggctccccctcctggaccagtcccccgcgagcccggagaaggggagacccgtgtcccacaaggaccccaccggcctgcctggcatctgtctgctgacgcctctggcttgcgccaggacttggcgtgggcaccgggcgcccccatcccagtgtctgtgtgcgtccagctgtgttgcacaggcctgggctccccactgagtgccaagggtcccctgagcatgcttttctgaagagccgggcctcagagtgtgtggctgtgtgtctgttcgactcccctcgccccattttcaccccacccccgcctctgatccccgggggcgagattggcgcgggagtgtggccgcgccccatcagatgttctcccttcaccagcgggagcttgatatcccttgtctgtaacatagaccccgggtactgcgggaggggagggctgctggggaggatggggggatgttatataaatatagatataattttattttcggagctaagatggtgttatttaagggtggtgatgggtgagcgctctggcccaggctgggccagactcccgcccaagcatgaacaggacttgaccatctttccaacccctggggaagacatttgcaactgacttggggaggacacagcttcagcacagcctctcctgcgggccagcccgctgcgaaccctccaccagctaccggagggaggagggaggatgcgctgtggggttgtttttgccataagcgaactttgtgcctgtcctagaagtgaaaattgttcagtccaagaaactgatgttatttgatttatttaaaggctaaaatttgtttttttattctttgcacaattgtttcattgtttgacacttaatgcactcgtcatttgcatacgacagtagcattctgaccacacttgtacgctgtaacctcatctacttctgatgtttttaaaaaatgacttttaacaaggagagggaaaagaaacccactaaattttgctttgtttccttgaagaatgtggcaacactgttttgtgattttatttgtgcaggtcatgcacacagttttgataaagggcagtaacaagtattggggcctattttttttttttccacaaggcattctctaaagctatgtgaaattttctctgcacctctgtacagagaatacacctgcccctgtatatccttttttcccctcccctccctcccagtggtacttctactaaattgttgtcttgttttttattttttaaataaactgacaaatgacaaaatggtgagcttatgatgtttacataaaagttctataagctgtgtatacagttttttatgtaaaatattaaaagactatgatgatgacatttaaaaaaaaaaaaaaaaaa

SEQ ID NO: 186 - DNA, 7896 bp, HOMO SAPIENS
ctcggtgcggttccgccgggcgcgaggagccgccgagacctccgcctgcgaacaaagaggaggccgtgcggggcgcggcgcccgcggagcatggcggaccgcagcctggagggcatggcgctgcccctggaggtgcgggcgcgcctggccgagctggagctggagctgtcggaaggtgacatcacacaaaaaggatatgaaaagaagaggtcaaagttaattggagcctaccttccgcagcctccgagggtggaccaagctttgccgcaagaacgccgggctcctgtcactccttcctccgcctctcgctaccaccgccgacggtcttcagggtcacgagatgagcgctatcggtcagacgtccacacggaagctgtccaggcggctctggccaaacacaaagagcggaagatggcagtgcctatgccttccaaacgcaggtccctggtcgtgcagacctcgatggacgcctacacccctccagatacctcttctggctcagaagatgaaggctcagtgcagggggactcccagggcacccccacctccagccagggcagcatcaatatggagcactggatcagccaggccatccacggctccaccacgtccaccacctcctcgtcctctacgcagagcgggggcagcggggctgcccacaggctggcggacgtcatggctcagacccacatagaaaatcattctgcacctcctgacgtaaccacgtacacctcagagcactcgatacaggtggagagaccgcagggttccacggggtcccggacagcgcccaagtacggcaacgccgagctcatggagaccggggatggagtaccagtaagtagccgggtgtcagcaaaaatccagcagcttgtcaataccctcaaacgaccgaaacgaccacctttacgagaattctttgtcgatgactttgaagaattattagaagttcaacaaccggatccgaaccaaccaaagccggagggggcccagatgctggccatgcgcggagagcagctgggcgtggtcacgaactggccgccgtcgctggaggccgcactgcagaggtggggcaccatctcgcccaaggcgccctgcctgaccaccatggacaccaacgggaagcccctctacatcctcacttacggcaagctgtggacaagaagtatgaaggtcgcttacagcattctacacaaattaggcacaaagcaggaacccatggtccggcctggagatagggtggcactggtgttccccaacaatgatccggctgccttcatggcggctttctacggctgcctgctggccgaggtggtccccgtgcccatcgaggtgccgctcaccaggaaggacgcagggagccagcagataggtttcttgcttggaagctgtggagttactgtagccttgactagtgacgcctgccataaaggacttccaaaaagcccaacgggagagatcccacagtttaaaggttggccaaagctgctgtggtttgtcacagagtctaaacatctctccaaaccgccccgagactggttcccacacattaaagatgccaataacgacactgcgtatattgagtacaagacgtgtaaggatggcagtgtgctgggtgtgacggtgacgaggactgcgctgctgacacactgccaggccctgacgcaggcgtgtggctacacggaagctgaaaccattgtgaatgtgctggatttcaagaaggacgtcgggctctggcatggcatcctgacaagcgtcatgaacatgatgcatgtgatcagcatcccgtactcgctgatgaaggtgaaccctctctcctggatccagaaggtctgccagtacaaagcaaaagtggcgtgtgtgaaatcgagggatatgcattgggcattagtagcacacagagatcagagagacatcaacctctcctctctgcgaatgctgatagtggcggacggcgcgaacccctggtctatttcttcttgcgatgcatttctcaatgtcttccaaagtaaaggccttcgacaggaggtcatctgtccttgtgccagctcgccagaggccctcactgtggccatccggaggcccacggatgacagtaaccagcccccgggccggggtgtcctctccatgcatggactgacctatggggtcattcgtgtggactcggaagagaagctgtccgtgctcaccgtgcaggatgtcggcctcgtgatgcctggagccatcatgtgttcagtgaagccagacggggttcctcagctgtgcagaacggatgagatcggggagctgtgtgtgtgtgcagttgcgacgggcacgtcctactatggcctctctggcatgaccaagaacacctttgaggtgtttcccatgacaagctccggggctccgatcagtgaatacccattcataaggacaggcttgctggggttcgtgggtcccggaggcctcgtcttcgtggtgggcaagatggatggcctcatggtggtcagcgggcgcaggcacaacgccgacgacatcgtggccactgcgctggccgtagaacccatgaagtttgtctaccggggaaggatagccgtgttctcggtgaccgtgctgcacgacgagaggatcgtgatcgtggctgagcagaggcctgactccacggaagaggacagtttccagtggatgagccgtgtgctgcaggcgattgacagtatacatcaagttggagtttattgcctggccttggtgccagcaaacaccctccccaaaaccccgcttggtgggatccatttatcagaaacaaaacagctttttctggagggctctctgcacccctgcaatgtcctaatgtgcccccacacctgcgtcacaaacttgcctaagcctcgacagaagcagccagaaatcggccctgcctctgtgatggtggggaacctggtctctgggaagagaatcgcccaggccagtggcagagacctgggtcagatcgaagataacgaccaggcacgcaagttcctgttcctctcagaggtcttgcagtggagagcacagaccaccccggaccacatcctctacacgctgctcaactgtcggggtgcgatagcgaactcgctgacctgcgtgcagctgcacaagagagctgagaagatcgccgtgatgctgatggagaggggccaccttcaggacggcgaccacgtggccttggtctaccccccaggaatagacctgatagcagcgttttatggttgcctgtacgcaggctgtgtgccaataaccgtccgtcccccgcacccacagaacatcgcgacgacgttgcctaccgtcaagatgattgtggaggtgagtcgctctgcctgtctgatgacgacacagctgatctgtaagttgctgcggtccagggaggcggcggcggctgtggacgtcaggacgtggcccctcatcctggacacagatgatttgccaaagaagcggcctgcccagatctgcaaaccttgcaacccagacactcttgcatatctcgacttcagcgtgtccacaactgggatgctagctggcgtaaagatgtctcacgcagccaccagtgccttctgccgttccattaagctgcagtgtgaactttacccctctagagaagtggccatctgcctggacccttactgtggactgggatttgtcctctggtgcctctgcagtgtgtattctgggcaccagtccatcctgatcccgccctctgagctggaaaccaaccccgccttgtggcttcttgccgtgagtcagtacaaagtccgagacacgttttgctcctactccgtgatggagctgtgcaccaaggggctgggctcgcaaacagagtccctcaaggcgcgagggctggacttgtcccgagtgaggacctgcgtggttgtggcggaagagaggcctcggatcgcactcacacagtcgttctcaaagctgtttaaggacctgggccttcacccgcgggccgtcagcacctcgttcggttgcagggtgaacctggcgatttgcttgcagggaacctcaggacctgacccaaccactgtctacgtggacatgagagccctgagacacgacagagtccgcttagtggaaagaggatcccctcatagtctgcccctgatggaatcgggaaagatacttccaggggttcggattataattgccaacccagaaacaaaaggaccgctgggggactcacaccttggagagatttgggttcacagtgcccacaatgccagcggttatttcactatttacggagacgaatccctccagtcagatcacttcaactcaagactaagttttggagacacccagaccatctgggcacgcacaggctacttggggttcctgcggagaactgagctcacagatgcaaatggagagcgccatgatgccctctacgtggtaggggcactggacgaagccatggagctgcggggcatgcggtaccacccaatcgacattgagacctcggtcatcagagcccataaaagcgttacggaatgtgctgtgtttacctggacaaatttgttggtggttgtggttgagctggatgggtcggaacaagaagccttggacctggttcccttggtgaccaacgtggtcctggaggagcactacctgatcgtcggagtggtggtcgtggtggacatcggcgtcatccccatcaactcccgtggggagaagcagcgcatgcacctgcgagacgggtttttggcagaccagctagaccccatctatgtggcctacaacatgtagtctcgtctcttggcttccatggacttttctagagatgtagacattgttctccgtgtccactgaagcgtgcagacacagggcaacactcaccagaatacagccatttgtggtgagagtggaggaggaagaggaggaggaagaggacttctcacagcagccacgattggcatgggggtgaaatgtgaatttaccactgaatttcgctcagaaggactttggattactgccttcagtttgttggaaaagcccatttcaaaactttcttttcttttctttcttttttaattattggataataagtgctttcttcgtaaatgtggtattttgttaagccgaaatagcaattaaaaaaatatcctgccctccagatgggttcttttaaacaatttatgtagtgtgacaaagaattgttttctctgttttaatgtgtcatgaaatcttaatgacatggatctgttactaatttaagccattgctagatctcatccttttaggaaagtttgaggtacgagaaaaccttccaaatagcaccttccaattagataatagcagctttctttgtcagaaatgtgctgaagaaacaaaggctggtatacggccttcgaagttagtatagaatgagaagaaattataaataaggtgtatttcggcaattatcttgcaaatatctttgtactaaactaaaaagataaaataagttaacttcctcaatatgtaattatgtacaaaacgtttaatttattttgatctctttagaactataaaagagaaaaacattcaagaatattaaagtcttgtaatgtttgctaatataaaaaagtgttgtattatcttgcgtggatagtatcacaacaaatatatatatatgaaatataaattcactaatgaacaaaggagattttaaagtttaagatgcagaacttgtcacttgcatggtgtgccccccgtactcacatacactctgctgttgccagcagtcgcagaccgcaggagccctgtctaaaagtttcttctagaaccagagaccagcaagtgaaattattgccatctcaaggatggcaaaagaattcaaagctcaatgtgcactatttttttctttgctgtgggacaacagtgaatgtgtttatgccagcgtgtgctgatgatactgaggggctttaggttggcaaatagcactgttttcttagctgcaagaattcattgcacaatgtttttcatcatttttgttaatgtcatctttttttggtccttgctacgaaaaggaatgcgattctgtggtcattcgcactgggttgcattgattccccctctgatggccaatgtggagtggacaaagtgtccggaactcacatcggtgatcgtcccctcgtcttaagacccagcccgctctgtgtgagcctctggggctccctcgctcagtgagcacagttccccgggggttcatgccagagctccggctgaagcaagaagtcctccagctgcgtcgtttgccgcctgtggacgagtgcgccccagtttctgccctggcagctcctggccacaccttctcagagctcacctgtgcacttctaaattgaattggcccacggtgtccaaccaagaaggagcatctgcactccgagaaagatgtgttctgtaactgccccagtgtgaccccgcagtggctctcggtgctagatatgcatgactaagattgatgctgggcaaaatgtagatgatctttcattatgttgtgggcagcgtctttctctgcctttgctatatgcagtcagcagtaagccttttgctaaaagagttttgtttgacttctgagatccaaggctgattgttgttaaaaaaaaaaaaaaaaaaaaagtggcacatttaaaaaaatgtgtctgcatatgtggtgcatccttccatctccacaaaccatttgattcttgaaatattgtttgacctcattgctgtgtgtgaatatttctccacatgcttcagatgcacattcctagtctctgcttcctaaggggggaaccaccacacattggggggaaaaaagacattttcctacacccacccaccttgttgaaagggaggtaggtttggggcttcaggccaggcactgactatgaaacattagctgcagtgtgcaggacagctttgaggtccagctgaagtcaggaagcaaaacaaatgtagatgtcacttcaaacataatttcaactgtcaccagatcaactctacattcaaggagtgtggacgctgcagtgcagttgtgagggcagttagcagccgcctcttctgcatcctgtcaactctgattagttagagtttaggctcaaaagagttggtggactgagattgaaatttggttgtgcaagagaaaggaaaggagacacttagtaccaccagtttcagcaataaagaagggtcattctgtattcaaaattgtactgtagataaatcattcatgagattgtaaaaaatgtttgtcttgtgaccttgtgcttttgaagtcagacaaaaccgtgtaatcaacttgcacaaaaagagggtacacagtgaacatataaacacagacctaatcaaacaggagcagattcctcatggtgcttgtttattatatatatttaatcctgcttgacactttacccaagggagatggtcccttttatcagttgaatgttagcagcgttatttcagagtgtggtgactggttagagaaactcatgtactcaaccagccacagtttcaaacaaaatttttatgtgcaaaggacagcaaccttcttgtatgttaaaccaccagtacgctttgtacatctgtgataacgcctgttttatattcaaatgaacaaataaaagcttttatttttgttgctctgaaaatagcagtttcttaattggtcccctggaaagatgtctgggacagctttaatcccgggaaggaagtgactcctacagggaaatgtatctgactctgtttacataatttgttgcattacttagtacagataatcatactttgaaaaatgtttaaattttgatgtgggcatttattgctaaaaataattcctatggcaacaaatgttttgtgaaatgttttttttaattcttttaaatatatctaaatatatttgttcacattttgctgcaa

SEQ ID NO: 187 - DNA, 2949 bp, HOMO SAPIENS
agtttcccgaccagagagaacgaacgtgtctgcgggcgcgcggggagcagaggcggtggcgggcggcggcggcaccgggagccgccgagtgaccctcccccgcccctctggccccccaccctcccacccgcccgtggcccgcgcccatggccgcgcgcgctccacacaactcaccggagtccgcgccttgcgccgccgaccagttcgcagctccgcgccacggcagccagtctcacctggcggcaccgcccgcccaccgccccggccacagcccctgcgcccacggcagcactcgaggcgaccgcgacagtggtgggggacgctgctgagtggaagagagcgcagcccggccaccggacctacttactcgccttgctgattgtctatttttgcgtttacaacttttctaagaacttttgtatacaaaggaactttttaaaaaagacgcttccaagttatatttaatccaaagaagaaggatctcggccaatttggggttttgggttttggcttcgtttcttctcttcgttgactttggggttcaggtgccccagctgcttcgggctgccgaggaccttctgggcccccacattaatgaggcagccacctggcgagtctgacatggctgtcagcgacgcgctgctcccatctttctccacgttcgcgtctggcccggcgggaagggagaagacactgcgtcaagcaggtgccccgaataaccgctggcgggaggagctctcccacatgaagcgacttcccccagtgcttcccggccgcccctatgacctggcggcggcgaccgtggccacagacctggagagcggcggagccggtgcggcttgcggcggtagcaacctggcgcccctacctcggagagagaccgaggagttcaacgatctcctggacctggactttattctctccaattcgctgacccatcctccggagtcagtggccgccaccgtgtcctcgtcagcgtcagcctcctcttcgtcgtcgccgtcgagcagcggccctgccagcgcgccctccacctgcagcttcacctatccgatccgggccgggaacgacccgggcgtggcgccgggcggcacgggcggaggcctcctctatggcagggagtccgctccccctccgacggctcccttcaacctggcggacatcaacgacgtgagcccctcgggcggcttcgtggccgagctcctgcggccagaattggacccggtgtacattccgccgcagcagccgcagccgccaggtggcgggctgatgggcaagttcgtgctgaaggcgtcgctgagcgcccctggcagcgagtacggcagcccgtcggtcatcagcgtcagcaaaggcagccctgacggcagccacccggtggtggtggcgccctacaacggcgggccgccgcgcacgtgccccaagatcaagcaggaggcggtctcttcgtgcacccacttgggcgctggaccccctctcagcaatggccaccggccggctgcacacgacttccccctggggcggcagctccccagcaggactaccccgaccctgggtcttgaggaagtgctgagcagcagggactgtcaccctgccctgccgcttcctcccggcttccatccccacccggggcccaattacccatccttcctgcccgatcagatgcagccgcaagtcccgccgctccattaccaagagctcatgccacccggttcctgcatgccagaggagcccaagccaaagaggggaagacgatcgtggccccggaaaaggaccgccacccacacttgtgattacgcgggctgcggcaaaacctacacaaagagttcccatctcaaggcacacctgcgaacccacacaggtgagaaaccttaccactgtgactgggacggctgtggatggaaattcgcccgctcagatgaactgaccaggcactaccgtaaacacacggggcaccgcccgttccagtgccaaaaatgcgaccgagcattttccaggtcggaccacctcgccttacacatgaagaggcatttttaaatcccagacagtggatatgacccacactgccagaagagaattcagtattttttacttttcacactgtcttcccgatgagggaaggagcccagccagaaagcactacaatcatggtcaagttcccaactgagtcatcttgtgagtggataatcaggaaaaatgaggaatccaaaagacaaaaatcaaagaacagatggggtctgtgactggatcttctatcattccaattctaaatccgacttgaatattcctggacttacaaaatgccaagggggtgactggaagttgtggatatcagggtataaattatatccgtgagttgggggagggaagaccagaattcccttgaattgtgtattgatgcaatataagcataaaagatcaccttgtattctctttaccttctaaaagccattattatgatgttagaagaagaggaagaaattcaggtacagaaaacatgtttaaatagcctaaatgatggtgcttggtgagtcttggttctaaaggtaccaaacaaggaagccaaagttttcaaactgctgcatactttgacaaggaaaatctatatttgtcttccgatcaacatttatgacctaagtcaggtaatatacctggtttacttctttagcatttttatgcagacagtctgttatgcactgtggtttcagatgtgcaataatttgtacaatggtttattcccaagtatgccttaagcagaacaaatgtgtttttctatatagttccttgccttaataaatatgtaatataaatttaagcaaacgtctattttgtatatttgtaaactacaaagtaaaatgaacattttgtggagtttgtattttgcatactcaaggtgagaattaagttttaaataaacctataatattttatctgaaaaaaaaaaaaaaaaaa

SEQ ID NO: 188 - DNA, 10835 bp, HOMO SAPIENS
gcaggcatttgcttagagcaggctgtgtgcgagcccagcgtcaagtgattccggcctcctcgagtcagcggtggtgggatgaggctctgccgaggggactggctgtgaaggatgagttcagggtgggatgacggaccgcttctgggaccagtggtatctctggtatctccgcttgctccggctgctggatcgagggtcttttcggaatgatggtttgaaagcttctgatgtccttcctatcctaaaggaaaaggtggccttcgtgtctgggggtcgtgataagcgaggcggacccatcctgaccttccctgctcgcagcaatcatgacagaataagacaggaagacctgcggaaactcgtgacgtatttggccagcgtgccaagtgaggacgtgtgcaaacgtggcttcactgtcatcatcgacatgcggggctccaagtgggacctcatcaagcccctcctcaaaacgctgcaggaagcctttccagctgagatccatgtggccctcatcattaaacccgacaacttctggcagaaacagaagaccaactttggcagctccaaattcatctttgagacgagcatggtatctgtggagggcctcacaaagctggtggacccctcccagctgacggaggagtttgatggctccctggactacaaccatgaggagtggatcgaactgcggctctccctggaggagttcttcaacagcgccgtgcacctgctctcgcgcctcgaggacctccaggagatgctagcccggaaggagtttcctgtggatgtggagggctctcggcggctcattgacgaacacacacagctcaagaaaaaggtgctgaaggcccctgtggaggagctggaccgggaggggcagcggctgctgcagtgcatccgctgcagcgacggcttctcaggacgcaactgcatcccgggcagtgctgacttccagagcctggtgcccaagatcaccagtctcctggacaagctgcactccacccggcagcacctgcaccagatgtggcatgtgcgcaagctcaagctggaccagtgctttcagctgcggctcttcgagcaggatgctgagaagatgtttgactggataagccacaacaaggagttattcctccagagccacacggagatcggagtcagctaccagtacgcccttgacctccagacgcagcacaatcactttgccatgaactccatgaatgcctatgtcaacatcaaccgcatcatgtccgtggcttcccgcctctctgaggccggtcattatgcctcacaacaaatcaagcagatctccacccagctggaccaggagtggaagagcttcgctgctgccctggatgaacgcagcaccatcctcgccatgtctgctgtgttccaccagaaggctgagcagttcctgtcgggagtggatgcctggtgcaagatgtgcagtgaaggtggtctgccatccgagatgcaagacctagagctggcaatccaccaccaccagaccttgtatgagcaggtgacccaagcctacacagaggtcagccaggatggcaaagcactacttgatgtgctgcagcggcccctgagccctgggaactccgaatccctcacggccacagccaactactccaaggcagtgcaccaggtgctggacgtggtgcatgaggtgttacatcaccagcgacggctggagagcatctggcagcaccgcaaggtgcggctccaccagcggctgcagctctgcgtcttccagcaggatgtacagcaggtgttggactggattgaaaaccatggtgaggcctttctcagcaaacacactggagttgggaagtccctacatcgagcccgggccctgcagaagaggcatgatgactttgaagaggtggctcagaatacgtacaccaatgcggacaagctcctagaagcagcagagcagttggctcagacgggggaatgtgaccccgaggagatctacaaggcagctcgacacctggaggtgcgcatccaagacttcgtgcgcagggtggagcagcggaagcttctcctggacatgtctgtttccttccacacacacaccaaagagttgtggacatggatggaagaccttcagaaggagatgttggaggatgtctgtgcagattctgtggatgcagtccaggaactgatcaagcagttccagcagcagcagaccgccactctagatgccacactcaatgtcatcaaggaaggcgaagaccttatccagcagctcaggtcagcgcctccctccctcggggagcccagcgaggccagggactcggctgtgtccaacaacaaaacaccccacagcagctccatcagccacatcgagtcggtcctgcagcagcttgatgatgcccaggtgcagatggaggagctgttccacgagcggaagatcaagctggacatcttcctgcaactgcgcatctttgagcagtacaccatcgaggtgacagcagagctagacgcctggaatgaagacttgcttcggcagatgaatgacttcaacacagaggacctaaccctggcagaacagcggctgcagcgccacacagaacggaagctagccatgaacaacatgacctttgaggttatccagcagggacaggatctgcaccagtacatcacggaggtccaggcatcaggaattgagttgatctgtgaaaaagacattgatctggcagcccaggtgcaagagttattggaatttctccatgagaagcagcatgaattggagctcaatgcagagcagactcataagcggctagagcagtgcctccaattacgtcacctccaggctgaagtcaaacaggttctgggatggatccgcaatggagagtcaatgctcaacgccagcctggtcaatgccagctctttgtcggaagcagagcagctgcagcgggagcacgagcagttccaactggccatcgagtccctctttcatgccacttccttgcagaagacgcaccagagtgccctgcaggtacagcagaaagccgaggtgctgctccaggccggccactacgatgccgatgccatccgggaatgtgctgagaaggtggccctccactggcagcagctcatgctgaagatggaagaccggctaaaattggtcaatgcctctgtggccttttacaaaacttctgaacaggtgtgtagtgtcctggagagcttagagcaagaataccggagagatgaggactggtgtggtggacgagataagctggggccagcagcagagatcgaccatgtcattcccctcatcagcaaacatttggaacaaaaggaggcctttcttaaggcctgcaccctggctcggcggaatgctgaggtgtttctcaagtacatccacaggaacaacgtcagcatgcccagtgtcgccagccacactcggggacccgagcaacaagtgaaagccatcctgagtgagctcctgcagagggagaatcgcgtgctgcatttctggaccttgaagaagcggcggttagaccaatgccagcaatatgtggtgttcgagcgcagcgctaagcaggcgcttgactggatccaagaaacaggtgaattttacctctcaacacatacctccactggagagaccacagaggagactcaggaactgctgaaagaatatggggaattcagggtgcctgccaagcaaacaaaggagaaggtgaagcttctgattcagctggccgatagctttgtggaaaaaggccacattcatgccacggagataaggaaatgggtgaccacggtggacaagcactacagagatttctccctgaggatgggaaagtaccgatactcactggagaaagccctaggagtcaacacagaggataataaggacctggagctggatattatcccagcaagcctttcggatcgggaggtcaagctgcgggacgccaaccacgaagtcaatgaagagaagcggaagtcagcccggaagaaagaatttattatggctgaactactccagacagagaaggcttatgtaagggatttgcatgagtgcttagagacctacctgtgggaaatgaccagtggtgtggaggagatcccccctgggatcctcaataaagagcatatcatctttggcaacatccaagagatctacgatttccataacaacatcttcctcaaagagctggagaagtacgagcaactgcctgaggatgtgggacactgctttgttacctgggcagacaaatttcagatgtatgtcacctactgtaaaaacaagcctgattccaaccagcttatcctggagcatgcgggcaccttctttgatgagatacaacagcggcatggtctggccaactccatctcttcctacctaattaagcctgtccaaaggatcaccaaatatcaactgctcctgaaggaacttttaacttgctgtgaagaagggaaaggggagctcaaggatggcctggaggtgatgctcagtgtcccaaagaaagccaatgatgccatgcatgtcagcatgctggaagggttcgacgagaacctggatgtgcagggggagttgattctccaggatgcctttcaagtgtgggacccgaagtcgctgatccggaaggggcgggagcggcacttgttcctctttgagatctccttggtttttagcaaggagatcaaagattcttcaggacacacgaaatatgtttacaagaacaagctactgacctcagagctgggtgtgaccgagcacgtggagggcgatccctgcaaattcgccttgtggtctgggcgcaccccatcctcagacaataaaacagtgctgaaagcctccaacattgaaaccaagcaggagtggatcaagaacattcgagaagtgattcaagaaaggatcattcacctgaaaggagctttaaaggagccacttcagctccccaaaacaccagccaaacagaggaacaatagtaagagggatggagtggaggatattgacagccagggggatgggagcagccaaccagacaccatctccattgcttctaggacctctcagaacacagtggacagtgacaagctctctggtggatgtgagctgacagtggtcctccaggacttcagtgcgggccacagcagtgagctgaccatccaggtggggcagacggtagagctgctggagcggcccagcgagcggcctggttggtgtctggtccgtaccaccgaacggagcccgcccttggagggtctggtccccagcagcgccctgtgcatctcacactcccgaagcagcgtggagatggactgcttcttccccttggtgaaagatgcatactctcattcctcaagcgagaatggaggcaagtccgagtccgtggccaacctgcaggcccagccctccctgaactccatccacagttccccgggtcccaagcgctccaccaacactcttaagaagtggctgacgagtcctgtgcgtcggcttaacagcgggaaggcagatggaaacatcaaaaagcagaagaaagttcgcgatggtcggaagagctttgacctgggatctcccaagcctggggatgaaacaacccctcagggagacagcgctgatgagaagagcaagaaaggttggggtgaagatgagccggatgaagagtcacacacacccctcccaccacctatgaagatttttgacaacgaccctacacaggatgaaatgtcctcctctttgctagcagcccggcaggcttccactgaagtacctactgctgcagaccttgtcaatgcaatagaaaagttggtcaaaaacaagctgagtctagaaggaagctcataccgggggagcttgaaagaccctgcaggctgcctgaatgaggggatggccccacccacacctcctaaaaacccagaagaagaacagaaagccaaggccctgagaggcaggatgtttgtcctgaatgagctggtacagacagagaaagactatgtcaaggatctgggcattgtggtggagggcttcatgaagagaatagaagaaaagggtgtccctgaggatatgcgaggaaaggacaaaatcgtgtttggaaatattcatcagatttatgactggcataaggattttttcctggcggaactggaaaagtgtatccaggagcaagacagattggcacagctctttattaagcacgagcggaagctgcacatctacgtgtggtattgtcagaataagccgcgctcagagtacatcgttgctgagtatgacgcctactttgaggaggtaaaacaggagataaatcagaggctgacactgagtgacttcctcatcaagcccattcagagaataacaaaataccagttgctcctcaaggacttcctgagatacagtgagaaggctggtttggagtgttcagatattgagaaagcagtggagttaatgtgccttgttcccaaacgctgcaatgacatgatgaatctaggacgtctgcagggctttgagggcactctgactgctcaggggaagctgctgcagcaggacacattctatgtgatcgagctggatgcaggcatgcagtcccggaccaaagagaggcgcgtgttcctcttcgagcagattgtcatcttcagtgaactgctcaggaagggatccctcacccctggctacatgttcaaaaggagcatcaagatgaattacttggtcctggaggagaatgtggacaatgatccctgcaagtttgcactcatgaacagagagacttctgagagggttgttctgcaagccgccaacgctgacatccagcaggcctgggtgcaggacatcaatcaagtcttagaaacacagcgagactttttgaatgcactgcaatcgcccattgagtatcaacggaaagaaaggagcacagctgtgatgaggtctcaacctgccaggcttccccaagccagccccaggccctactcctctgttcctgcgggctcagagaagcccccaaagggctccagctataacccacctctgcctcccctgaagatatctacctccaatggcagtccagggtttgaataccaccagcctggggacaagttcgaagccagcaagcagaacgacctgggaggctgcaatgggacctcgtccatggccgtgatcaaagattactatgcactgaaggagaatgaaatctgtgtgagccaaggtgaggtggtccaggtcctcgccgtcaaccagcagaacatgtgtctggtgtaccagcctgccagcgaccattcccccgccgccgagggctgggtcccaggcagcatcctggcgcccctcaccaaagccacagcagcagaaagtagtgacgggagcatcaagaagtcatgttcatggcatactctacgcatgagaaagcgggcggaagtggagaacacgggtaaaaatgaagccacagggcctcgtaaacccaaggatattctgggcaacaaagtctctgttaaagagacgaacagttccgaggaatcagagtgtgatgatcttgaccctaatactagcatggagatcttaaatccaaatttcatccaagaagtggccccagaattccttgtgcccttggtggatgtgacctgcttgcttggggacacagtgatactgcagtgcaaagtctgtgggcggccaaagcccaccatcacttggaagggtccagaccagaacatccttgacactgataacagctcagccacatacacggtctcctcttgtgattctggagaaatcaccctgaagatctgtaatctgatgccccaagacagtgggatttatacctgcatagcaacaaatgaccacgggaccacatcaacgtctgcaacagtcaaagtgcaaggtgttccagcagcccctaaccgccccattgcccaggagagaagctgcacctccgtgattctccgctggctgcccccctccagcacaggaaactgcactatttctggttacactgtggagtacagagaggaaggttctcagatctggcagcagtcagtggcttcgaccttggacacttacctcgtcatcgaagaccttagtcccgggtgtccttatcagttcagagtcagtgccagtaacccctggggaatcagccttcccagcgagccctcggagtttgtgcgacttccagaatatgatgctgctgctgatggtgccaccatttcttggaaggaaaattttgactcagcttacactgagctgaatgaaattggaagaggccgtttctctatagtaaagaaatgcattcacaaagctacccgcaaagatgtggctgtgaaatttgttagcaaaaaaatgaagaagaaagaacaggctgcccacgaggctgccctgcttcagcacctacagcacccccagtacatcactctccatgacacctatgagtcccccacatcctacatcctgatcttggaactgatggatgatggccggctcttagactaccttatgaatcatgatgaactgatggaggaaaaagtagctttctatatccgagacatcatggaggctctgcagtaccttcacaactgcagggttgcacatttggacataaagcctgaaaacctgctcattgacctacggattccagtgcctcgagtgaagctcattgacttggaggatgctgtccagatctcgggtcacttccacattcaccacctgctggggaaccctgagtttgctgccccagaagtcattcaaggcatccccgtctccctggggacagacatctggagcatcggggttctgacatatgtcatgctgagtggggtctcccccttcttggatgagagcaaagaggagacatgtatcaacgtatgcagggtggatttcagcttcccccatgaatacttctgtggtgtgagcaatgctgccagagatttcatcaatgtgatcttacaggaagattttcggaggcggcccacagcagccacatgcttgcagcatccatggctgcagccccataatggcagctactctaagatccccctggacacctcccgcctagcatgcttcatagaacgtcgcaagcaccagaatgatgtgcggcctattcccaatgtcaagagctacattgtcaaccgggtgaaccaagggacgtagccatctcccagcccctatggtttcacatagacgtgcagtgtgaaccaaagcaagactgaatgtgactgtaaataattctgttcatcatttcactccgtgcagttctctgaattgagagatgtacctcttaaacctcgtcagtggttattcagggtctgagcagcagtaaaagtcaccctaaatcaaggggcttttcagaaggtcattctgaagaaataaagaggcaaagggtcacagaagtgttcagaagaagggcaaagataagaacaatattagctgttacgaaattttaactgtatcttccaaaatgagtggttaactgggcaaaccttaagctcacaagagtataaaagatctctggctttgctgaaattttaagcaagaagttctatttaatggagatgtcatgtatatcaactattctggtttagataacttagatatagtttcttaataggatagatacccacatacagtataatatatcccattcaggtttcagagttttctaatatagagatatatatattaaatcaatcacaagtaattttgagtgctccagttaagacagtaatttatttaccgaatcattacattgttttgactaagcacaattagatgacaagtttttttagagcattttatagatcttgtatagaaatcttttaccagaacctgtgcattaagagaaagcaatgttgcccttttgaatgagaaaattttttctgtcaatcgcaggttatttgattaagataggttctttctgtatatgaaacgctccccgcaaattcactggcagctcagaattattctggaaagaaagcctgccaggaaataaattcaaatacagtatgagctgcggggatatttttgtgtctacaccaggtttgaaataagtaaacaaatacaagaggttcatataaaagggcaaatgaaaacctttcctacagttcctatgaacaacgtaccaacactttctgatttcttctacagctgtagaataccatctttcagaaagttggctggctttatttctaactccttattgaagctaaggggtgcttactaaaaggaggcagccatataggccttttaaaggcctggttctaagtcctttttaaagccatggaacaaaacctgatacatcaccctaacagagcattaagttgtaactgagattgcaatacctgtcaccatgcagccgctgatagttctctgaactaaaaggactaattgtactttgaggccaatgctgctttctggtgtatattctccatacaagattattattaactgctctttttccctctggtggaaaaaaaattaaacctgggcatttcatgggttttctttctttatttttgttcatttgttttggagggagggagcttgttttttgtgtttgtacatgatccacccttagttttctagaatgtgtgttgaaaattgcgattatacaagtaagattttaaaaatgtaactcaagtgtttgttcaaatcaggtttaatggtgttgcttctctcctataatgggatagagaaaattaaaatcacgtagtacagaagtgcaagaagagaatttatgaaggatgaatagaactacaaacctatctaaatgaaaaagaaatggtggaaactaagcctgaactttaacatataaaaaacacttattcccacagagaaaatgtaaaattaaaaatcatcatctttttttttccaaaaaaaaaaaaaaaaaaaaaaaaaaaaa

SEQ ID NO: 189 - DNA, 4348 bp, HOMO SAPIENS
agtgcggagccttaggcggagcgaagagaaccggtcgcggcaatcctagcgcgcagcagcagcagcagcagcagcagcagcagcagcagcagcagcagcacccgcatccgctgcgggagtccgagccggaaccacacccaagtagctgccctttcctcttctgtcatctcaccgccccaccacagaccgcgttccccgaggaaaccggccgcccacgcccggagcatcctcccctgttgagcgggcgctgacggacccggcggcatgatgcggctgcgaggctcggggatgctgcgggacctgctcctgcggtcgcccgccggcgtgagcgcgactctgcggcgggcacagcccttggtcaccctgtgccggcgtccccgaggcgggggacggccggccgcgggcccggctgccgccgcgcgactccacccgtggtggggcgggggcggctggccggcggagcccctcgcgcggggcctgtccagctctccttcggagatcttgcaggagctgggcaaggggagcacgcatccgcagcccggggtgtcgccacccgctgccccggcggcgcccggccccaaggacggccccggggagacggacgcgtttggcaacagcgagggcaaagagctggtggcctcaggtgaaaataaaataaaacagggtctgttacctagcttggaagatttgctgttctatacaattgctgaaggacaagagaaaatacctgttcataaatttattacagcactcaaatctacaggattgcgaacgtctgatcccaggttgaaagagtgtatggatatgttaagattaactcttcaaacaacatcagatggtgtcatgctagacaaagatctttttaaaaaatgtgttcagagcaacattgttttgttgacacaagcatttagaagaaagtttgtgattcctgactttatgtcttttacctcacacattgatgagttatatgaaagtgctaaaaagcagtctggaggaaaggttgcagattatattcctcaactggccaaattcagtcccgatttgtggggtgtgtctgtttgtacagtagatggacagaggcattctactggagataccaaagttcccttctgtcttcagtcctgtgtaaaacctttgaaatatgccattgctgttaatgatcttggaactgaatatgtgcatcgatatgttggaaaagagccgagtggactaagattcaacaaactatttttgaatgaagatgataaaccacataatcctatggtaaatgctggagcaattgttgtgacttcactaataaagcaaggagtaaataatgctgaaaaatttgactatgtcatgcagtttttgaataagatggctggtaatgaatatgttggattcagtaatgcaacgtttcagtctgaaagagaaagtggagatcgaaattttgcaataggatattacttaaaagaaaagaagtgttttccagaaggcacagacatggttggtatattagacttctacttccagctgtgctccattgaagtgacttgtgaatcagccagtgtgatggctgcgacactggctaatggtggtttctgcccaattactggtgaaagagtactgagccctgaagcagttcgaaatacattgagtttgatgcattcctgtggcatgtatgacttctcagggcagtttgctttccatgttggtcttcctgcaaaatctggagttgctgggggcattcttttagttgtccccaatgttatgggtatgatgtgctggtctcctcctctggataagatgggcaacagtgttaagggaattcacttttgtcacgatcttgtttctctgtgtaatttccataactatgataatttgagacactttgcaaaaaaacttgatcctcgaagagaaggtggtgatcaaagggtaaagtcagtgataaatcttttgtttgctgcatatactggagatgtgtctgcacttcgaagatttgctttgtcagctatggacatggaacagcgggactatgattctagaacagcactccatgtagctgctgcagagggtcatgttgaagttgttaaatttttgctggaagcctgcaaagtaaaccctttccccaaggacaggtggaataacactcccatggatgaagcactgcactttggacaccatgatgtatttaaaattctccaagaataccaagtccagtacacacctcaaggagattctgacaacgggaaggaaaatcaaaccgtccataagaatcttgatggattgttgtaatggtctcaaatcccaagatttaaatcacttacctatttaattgtggaaaatgattatgaagaacatgtgtatttctatctggtagtgatgtatattttacatttgtcatttcagtgttactggagttttcttcattgtgcacacaggacaaatctgatctctttgggaaaaaatagaaataaaacaatctccctccataatgtgagcaatattacctcgtgcattgtataatttgatgtaaaagaaatagttaccaatgctagcttgtgtggtcttccatgatttatttgtgttttgtgaattttcaatttatggtgatgatctgctgatatgcatttataaagtaagctctgttgtacagtctgtccaaatgggtcaaggttgcctttagaagcaaatagtgtgattttcaagacttcaaatacaaatttagtttaagtgtttgaacaactatatgcacttacggttgtgtgtttaaaatgtctctctcaccccctagcttcatgatgtgactcttaaaaaactataatagttaacaactgttagtaagatagaccaattctgattagactttatcagggaatctgtttaagatatgtttggtgaccaaaacgtatgtgtgaatgtagttataatgcttttgaaaaattttcctttttctatatccccttagtccagcctctcttctcagacatttagctatctgcctctttcctttagctgggaaagtgagagctggcatactatgcagtttttatgttttccatagtaagtcagaaaatgcctcctatttctggcatcagaactttgccatttgtctacagaagacgaaccagagacaaaattactaagtataaattagtcaagtttatcagtctaaaaaacgaagggatgtgcaactgcagctctttaagaagttttttttttttagcttctagggtaaagataaattcagaaatgctctaagctaccaaagttattctgaaagtatgggaactgctacaactaacaaacatttgtttccaagcctgtcattaagagtctgcatcaagagatttgtcctccttgggggaccactggatcattccagatttcttgtgatttttctattgtgtaattcttggtgggctctgtagtttaataataagaaaaaggccatttcattttaaattgtgacctataattctttgtcttgggttggtaattcaggattcatttggaaagtgggtaaaaggggcttcaaaaaacggatagaacaggattttctaggagttacacatacattttatcctgtcatacctcgagataaagtggcatgttagtgaggagttctgatattaagcacacacacacatgcacacaaatggacttctctgaagctgtgtttagtgaaatgagctcaagtacatgaatgttagttgttatcacatacagcaaattcctttttttttctttttctatgagcacactctgctgcttctaaactttacatgcctgatggcaccttactccagcagcctccaggtgctttcattttcacttccagtctaagccagtggctcctgccactgccctcccattacctagatggcacctcctttggtgaaaccacggccaatgttccttagctgcaccaggcccgaagctgttcccatgcttgagcttccatggggaggatgctgagtgagcagtttcctaccccgtggatctagcaagccatggagacaggtagcatttgtaagatgctgcacaggagcagcattatccccaaagatattacagggtagacacgttttaactgaaatcaatcaagataactttattcaaagagcagcccgctttgtgtgactaaaatgaaacaagacagttgaattgtgtgacttgaagattaccaatgattttgaggcttttctataataaaaagaggttctaaccattatttgggaacaaagagagttttcatcttttttcagatcaaaaccattctgtaaaatctttgttgtttaattaaatgtgccgttatttacccctgatgttatttatgactatgtgccgattcctgctaaaaaaaaaa

SEQ ID NO: 190 - DNA, 6564 bp, HOMO SAPIENS
ccaggcggcgttgcggccccggccccggctccctgcgccgccgccgccgccgccgccagcgctagcgccagcagccgggcccgatcacccgccgcccggtgcccgccgccgcccgcgccagcaaccgggcccgatcacccgccgcccggtgcccgccgccgcccgcgccaccggcatggcgctccggggcttctgcagcgccgatggctccgacccgctctgggactggaatgtcacgtggaataccagcaaccccgacttcaccaagtgctttcagaacacggtcctcgtgtgggtgccttgtttttacctctgggcctgtttccccttctacttcctctatctctcccgacatgaccgaggctacattcagatgacacctctcaacaaaaccaaaactgccttgggatttttgctgtggatcgtctgctgggcagacctcttctactctttctgggaaagaagtcggggcatattcctggccccagtgtttctggtcagcccaactctcttgggcatcaccatgctgcttgctacctttttaattcagctggagaggaggaagggagttcagtcttcagggatcatgctcactttctggctggtagccctagtgtgtgccctagccatcctgagatccaaaattatgacagccttaaaagaggatgcccaggtggacctgtttcgtgacatcactttctacgtctacttttccctcttactcattcagctcgtcttgtcctgtttctcagatcgctcacccctgttctcggaaaccatccacgaccctaatccctgcccagagtccagcgcttccttcctgtcgaggatcaccttctggtggatcacagggttgattgtccggggctaccgccagcccctggagggcagtgacctctggtccttaaacaaggaggacacgtcggaacaagtcgtgcctgttttggtaaagaactggaagaaggaatgcgccaagactaggaagcagccggtgaaggttgtgtactcctccaaggatcctgcccagccgaaagagagttccaaggtggatgcgaatgaggaggtggaggctttgatcgtcaagtccccacagaaggagtggaacccctctctgtttaaggtgttatacaagacctttgggccctacttcctcatgagcttcttcttcaaggccatccacgacctgatgatgttttccgggccgcagatcttaaagttgctcatcaagttcgtgaatgacacgaaggccccagactggcagggctacttctacaccgtgctgctgtttgtcactgcctgcctgcagaccctcgtgctgcaccagtacttccacatctgcttcgtcagtggcatgaggatcaagaccgctgtcattggggctgtctatcggaaggccctggtgatcaccaattcagccagaaaatcctccacggtcggggagattgtcaacctcatgtctgtggacgctcagaggttcatggacttggccacgtacattaacatgatctggtcagcccccctgcaagtcatccttgctctctacctcctgtggctgaatctgggcccttccgtcctggctggagtggcggtgatggtcctcatggtgcccgtcaatgctgtgatggcgatgaagaccaagacgtatcaggtggcccacatgaagagcaaagacaatcggatcaagctgatgaacgaaattctcaatgggatcaaagtgctaaagctttatgcctgggagctggcattcaaggacaaggtgctggccatcaggcaggaggagctgaaggtgctgaagaagtctgcctacctgtcagccgtgggcaccttcacctgggtctgcacgccctttctggtggccttgtgcacatttgccgtctacgtgaccattgacgagaacaacatcctggatgcccagacagccttcgtgtctttggccttgttcaacatcctccggtttcccctgaacattctccccatggtcatcagcagcatcgtgcaggcgagtgtctccctcaaacgcctgaggatctttctctcccatgaggagctggaacctgacagcatcgagcgacggcctgtcaaagacggcgggggcacgaacagcatcaccgtgaggaatgccacattcacctgggccaggagcgaccctcccacactgaatggcatcaccttctccatccccgaaggtgctttggtggccgtggtgggccaggtgggctgcggaaagtcgtccctgctctcagccctcttggctgagatggacaaagtggaggggcacgtggctatcaagggctccgtggcctatgtgccacagcaggcctggattcagaatgattctctccgagaaaacatcctttttggatgtcagctggaggaaccatattacaggtccgtgatacaggcctgtgccctcctcccagacctggaaatcctgcccagtggggatcggacagagattggcgagaagggcgtgaacctgtctgggggccagaagcagcgcgtgagcctggcccgggccgtgtactccaacgctgacatttacctcttcgatgatcccctctcagcagtggatgcccatgtgggaaaacacatctttgaaaatgtgattggccccaaggggatgctgaagaacaagacgcggatcttggtcacgcacagcatgagctacttgccgcaggtggacgtcatcatcgtcatgagtggcggcaagatctctgagatgggctcctaccaggagctgctggctcgagacggcgccttcgctgagttcctgcgtacctatgccagcacagagcaggagcaggatgcagaggagaacggggtcacgggcgtcagcggtccagggaaggaagcaaagcaaatggagaatggcatgctggtgacggacagtgcagggaagcaactgcagagacagctcagcagctcctcctcctatagtggggacatcagcaggcaccacaacagcaccgcagaactgcagaaagctgaggccaagaaggaggagacctggaagctgatggaggctgacaaggcgcagacagggcaggtcaagctttccgtgtactgggactacatgaaggccatcggactcttcatctccttcctcagcatcttccttttcatgtgtaaccatgtgtccgcgctggcttccaactattggctcagcctctggactgatgaccccatcgtcaacgggactcaggagcacacgaaagtccggctgagcgtctatggagccctgggcatttcacaagggatcgccgtgtttggctactccatggccgtgtccatcggggggatcttggcttcccgctgtctgcacgtggacctgctgcacagcatcctgcggtcacccatgagcttctttgagcggacccccagtgggaacctggtgaaccgcttctccaaggagctggacacagtggactccatgatcccggaggtcatcaagatgttcatgggctccctgttcaacgtcattggtgcctgcatcgttatcctgctggccacgcccatcgccgccatcatcatcccgccccttggcctcatctacttcttcgtccagaggttctacgtggcttcctcccggcagctgaagcgcctcgagtcggtcagccgctccccggtctattcccatttcaacgagaccttgctgggggtcagcgtcattcgagccttcgaggagcaggagcgcttcatccaccagagtgacctgaaggtggacgagaaccagaaggcctattaccccagcatcgtggccaacaggtggctggccgtgcggctggagtgtgtgggcaactgcatcgttctgtttgctgccctgtttgcggtgatctccaggcacagcctcagtgctggcttggtgggcctctcagtgtcttactcattgcaggtcaccacgtacttgaactggctggttcggatgtcatctgaaatggaaaccaacatcgtggccgtggagaggctcaaggagtattcagagactgagaaggaggcgccctggcaaatccaggagacagctccgcccagcagctggccccaggtgggccgagtggaattccggaactactgcctgcgctaccgagaggacctggacttcgttctcaggcacatcaatgtcacgatcaatgggggagaaaaggtcggcatcgtggggcggacgggagctgggaagtcgtccctgaccctgggcttatttcggatcaacgagtctgccgaaggagagatcatcatcgatggcatcaacatcgccaagatcggcctgcacgacctccgcttcaagatcaccatcatcccccaggaccctgttttgttttcgggttccctccgaatgaacctggacccattcagccagtactcggatgaagaagtctggacgtccctggagctggcccacctgaaggacttcgtgtcagcccttcctgacaagctagaccatgaatgtgcagaaggcggggagaacctcagtgtcgggcagcgccagcttgtgtgcctagcccgggccctgctgaggaagacgaagatccttgtgttggatgaggccacggcagccgtggacctggaaacggacgacctcatccagtccaccatccggacacagttcgaggactgcaccgtcctcaccatcgcccaccggctcaacaccatcatggactacacaagggtgatcgtcttggacaaaggagaaatccaggagtacggcgccccatcggacctcctgcagcagagaggtcttttctacagcatggccaaagacgccggcttggtgtgagccccagagctggcatatctggtcagaactgcagggcctatatgccagcgcccagggaggagtcagtacccctggtaaaccaagcctcccacactgaaaccaaaacataaaaaccaaacccagacaaccaaaacatattcaaagcagcagccaccgccatccggtcccctgcctggaactggctgtgaagacccaggagagacagagatgcgaaccacccaaaacacgcacaccctgcccctggtgccctgagacagacacacagcctcacgcccccaggaatgcaagtggtttcctggtgcttcccacggaggagttttggcagccagacttctggaggaattggttgtatagaagatcctagtgaccaaattcagcctactgcctcggatctctccagccgaagtctgtggactgcaagtctttgagatgcttctggctcccatcacctctaacatccttgtctgggtctaccaggaacgcttcatttccttggggctgcagttttgtggttgaggggcctggagaaaatcattttctccccttggcagtgtcccagggccctggatggtcctcttaccaacatctggtcttccaggcactcaaaagctgggaaccagcatctcagcgccagctctaccagttctcgttttgggccagaggcagcctctgcactcccacgcctgtcctcctggaagggacctggttggactaacggctaacctggacctggaactgtagggccaggggattgtctcagggccgacgttccacctggggcttccctccccacccaccccgactccaggctttcccttttttcttttgttcaacattgtaagaacaatcaatgctgttattactgttcccaccatgattgatgtggggtaaatattaaggagatggcctcatgggaatttgaccttgactagaaatagagactgagagtgagcaaccagctggaaggtactatgccagtcctagcagaaaaatgtgttaggggcctggcccaaagcagtgttggttgcttacagtgttgattgattttgttcttttttcttaccacctcttttctttccctctcatggtacctgctcatggttatgaagctttcaaagtaaagaacacgaaatacctcccaagtattaccagtgggtaccaaaaaaatgtccccttgagtcttttccttgtttttagatgttaattctctcccttggcatccggttagccccccagggggggcagcattgtggagaacttgatatttagttactgatgctcttccaggacacgaaaagaacccatctttgaatatcaatgattttttttttttaagtactgttccggggagaaaaacagtctcaaaacttgaacttcttgggaatagaagtgttgggctgagaagtaacattcccaggaaatagtgagaagctcgccctgtgtttgaaaccgtgttggtctctgtgttcctggaagaaaacagggaagcagcatcttttaaagcctgttctttaaggtgtctcgttagagcccaaagtggaatccggaaggcagccagagctgaggctgccccaagactcagacttgctaagaattacgccgccgacttcaaacccagagagcatctttcttttaggcgaaaacgcatatatttattttttgtaagttataccattctttcacattagataaactaagttttgggggatccttttgtaatgacttacactggaaatgcgaacatttgcagtaaaaaaatatatatatatctatatattttatttctttctaaa

SEQ ID NO: 191 - DNA, 398 bp, HOMO SAPIENS
  misc_feature (38)..(38): n is a, c, g, or t
  misc_feature (42)..(42): n is a, c, g, or t
  misc_feature (45)..(45): n is a, c, g, or t
  misc_feature (49)..(49): n is a, c, g, or t
acccctgtgcactccataggaaggacaaacttacctgnctgnttncttnccatgtgcttctccccaaattttcatatagatatatacgtacactccttttggaataaacgaagaggtacattatatttgacacaaacttgggagtgttaagaggtcataagtgtttacctatcagataaccatctgtggctctgtgttggattttttttataccattaggaaaatgggaatttttttataggcctgccatacttctactttgccaaatagcactttattatcaagatacacccatggctcatttcagactcactgaactttttttatatgaatgcacagtcgtcatattttgggcagtctgtgagttcttggtaactcatccccttactacaaaagca

SEQ ID NO: 192 - DNA, 354 bp, HOMO SAPIENS
atgctttacattactattcctatcttttactttaaaaactaagatgaggagtgatgttgtcaagttcaaaggcatgagggtgattgatggattgaggtagatagccaagtttgtctgtttttgttttttatagttacagagtctcactttgttgtccaggctgaagtgcagtggtgcaatcatagctcactgagattgccaggttcgacaaagaggaatttataggatggggatatagggtagacttgactctgctttatccgggaaagcttttaaaactctgagccagttaactttgagtaagcataaaacatactgtattggtgtttgtatttttcatgccacaatattaaa

SEQ ID NO: 193 - DNA, 1760 bp, HOMO SAPIENS
gaaaacaaactcaggaagaaaaagaaaagcagaagtgatcaaggagagcgctcgagttgcaatattttcctttggctgctgacaggcagttactataaagcattgtgcatggtaggaaaatggaggctaagaaaagttaatttgtccgagggccctctgatgatagtgaaactgggatggaacctctgcctgcttgcttctgaggtctgggctcctaactactgctctactgcctcgagccaagagatttacgccctattaagcaatttgttgtgcgataaattggaagacacagcagataagcaaacaactcaagcaaccaggacaccatcttcttgtattatacaagaaaggagtgtacctatcacacacagggggaaaaatgctcttttgggtgctaggcctcctaatcctctgtggttttctgtggactcgtaaaggaaaactaaagattgaagacatcactgataagtacatttttatcactggatgtgactcgggctttggaaacttggcagccagaacttttgataaaaagggatttcatgtaatcgctgcctgtctgactgaatcaggatcaacagctttaaaggcagaaacctcagagagacttcgtactgtgcttctggatgtgaccgacccagagaatgtcaagaggactgcccagtgggtgaagaaccaagttggggagaaaggtctctggggtctgatcaataatgctggtgttcccggcgtgctggctcccactgactggctgacactagaggactacagagaacctattgaagtgaacctgtttggactcatcagtgtgacactaaatatgcttcctttggtcaagaaagctcaagggagagttattaatgtctccagtgttggaggtcgccttgcaatcgttggagggggctatactccatccaaatatgcagtggaaggtttcaatgacagcttaagacgggacatgaaagcttttggtgtgcacgtctcatgcattgaaccaggattgttcaaaacaaacttggcagatccagtaaaggtaattgaaaaaaaactcgccatttgggagcagctgtctccagacatcaaacaacaatatggagaaggttacattgaaaaaagtctagacaaactgaaaggcaataaatcctatgtgaacatggacctctctccggtggtagagtgcatggaccacgctctaacaagtctcttccctaagactcattatgccgctggaaaagatgccaaaattttctggatacctctgtctcacatgccagcagctttgcaagactttttattgttgaaacagaaagcagagctggctaatcccaaggcagtgtgactcagctaaccacaaatgtctcctccaggctatgaaattggccgatttcaagaacacatctccttttcaaccccattccttatctgctccaacctggactcatttagatcgtgcttatttggattgcaaaagggagtcccaccatcgctggtggtatcccagggtccctgctcaagttttctttgaaaaggagggctggaatggtacatcacataggcaagtcctgccctgtatttaggctttgcctgcttggtgtgatgtaagggaaattgaaagacttgcccattcaaaatgatctttaccgtggcctgccccatgcttatggtccccagcatttacagtaacttgtgaatgttaagtatcatctcttatctaaatattaaaagataagtcaaacattaaaaaaaaaaaaaaaaaa

SEQ ID NO: 194 - DNA, 514 bp, HOMO SAPIENS
  misc_feature (247)..(247): n is a, c, g, or t
  misc_feature (265)..(265): n is a, c, g, or t
  misc_feature (276)..(276): n is a, c, g, or t
  misc_feature (296)..(296): n is a, c, g, or t
  misc_feature (305)..(305): n is a, c, g, or t
  misc_feature (312)..(312): n is a, c, g, or t
  misc_feature (325)..(326): n is a, c, g, or t
  misc_feature (376)..(376): n is a, c, g, or t
  misc_feature (386)..(386): n is a, c, g, or t
  misc_feature (395)..(395): n is a, c, g, or t
gcgcggcatgaaatgcatgtgaccagagaagtaattaacaaaacaatgtcaacttctaaaaccgagacattacttagatgataaggcgcagcaactcggtgaatctgtacaaaccttggaaaaggaacacattagtctatgggaccttccagttttctcatgctcctttccagctactaacctctcctaaagggaacaaccactttttggatttgattcccaggcctcgctttcgccgggaaattancgttgcttgtaaaacagnagaagccgggnaggcaggcagggggagctgntactttacnctctgtnctttgggatagcnnaatcccgcatttaagcaatccgaggaaacgagcaaatagacctccctcgnctctccgagnacactcaanagttccggttgcaaaatgtttgcctcctgggcttcccagcgtcccgttagttgttctatttacacataattagatacttaatggagagagaaactagaagttgaggcgttcctccaggc

SEQ ID NO: 195 - DNA, 466 bp, HOMO SAPIENS
  misc_feature (394)..(394): n is a, c, g, or t
gagagtgtcttaccacagttctccagagcatattattttgcacctcttctgtgaaggccggcaaaatagcttcttgaaaggttctctgttaatggaaactgaagtttgtaagagtttaaggccaaacgtaagaggtcatactccctgtcacaaactccagctgaactaacttggaggaggatcttccctgacagctctggaaggaaattgacagaactttcataaagccaaagactggcagaaataaagtaaataatgatgaaactgagcaatagagcacccagaaggagtgtcccctgccaaaaagaatgtggcatttcaccctccaagaaacaaatggacaccttatcccacagaagaatggggctcacaggtcaccgtcactcacttcttnatcctttcgccaaaggaagccacttcatctaggatgttctggacactgacacatacctcctggatggcatag

SEQ ID NO: 196 - DNA, 6644 bp, HOMO SAPIENS
gtgaccccaggccctggtcactccatgctttggagggtgcttttgtcaaagaggcctcctttccctcacccagagctggatttccaagaggctcccatacctagctgccctggcagactcccagggaggaaaaacagcgtggccttggcagctgccccgaggaaggagcccacaggtgacagggagaagccattgccattccctgtcctggcccccttcagcaaccctgaacactctgctccagccaaggtggtgagggcagctgttcctaaacagcgcaaaggcagcaaggttggtgactttggagatgcaatcaattggcccacacctggagagatagcccacaagagtgttcagccacagtcccacaagcctcagcctacccgtaaactgccacccaagaaggacatgaaggaacaggagaaaggagaagggagtgatagtaaggagagtccaaaaaccaaatcagatgaatcaggggaggaaaagaatggagatgaggattgccagcgaggcgggcagaagaagaaaggaaacaaacacaagtgggttccattacaaatagacatgaagcctgaagtgcccagagagaaactggcttcacgccccactcgcccaccggagcctagacacatacctgccaatcgcggagagatcaaagggtctgagtctgccacctacgtgcccgtggccccccccaccccagcctggcaaccagagatcaaaccggagcctgcctggcacgaccaggatgagacatcgagtgtgaagagtgatggggctggtggggcgcgggcttccttccgtggccgtggacgggggcgtggtcgcggccggggacgcggccggggtggcactcgaacccattttgactaccagtttggctaccgaaagtttgatggtgtggaggggcctcgtacgcccaagtacatgaacaacatcacctactactttgacaatgtcagcagcaccgagctttacagtgtggatcaggaactgctcaaagactacatcaagcgccagattgaatactacttcagcgtggacaatttagagcgagacttcttcctgcgaaggaaaatggatgctgatggtttcctacccatcacccttattgcttccttccaccgagtgcaggcccttaccactgacatttcactcatctttgcggccctaaaggacagcaaggtggtggagatcgttgatgagaaagttcgtaggagggaggaaccagaaaagtggcctcttcccccaatagtggattattcacagactgatttctcccagcttctcaactgccctgaatttgttccccgtcagcactaccaaaaggagacagagtcggcacctggctctcctcgtgcagtcaccccagtgccaaccaaaacagaggaggtcagcaacctaaagacactacccaagggcctgtctgccagcctgcctgacctggattctgagaactggattgaagtgaagaagaggcctcggccatccccagcacggcccaagaagtcagaggagtccagattttcccacctgacctctctgcctcagcagctgccttcccagcagctgatgtccaaggatcaggatgagcaagaggaactggattttctgtttgacgaggagatggagcagatggatgggcggaagaacaccttcactgcctggtctgatgaggaatctgactatgagattgatgacagggatgtcaacaagatcctcattgtcacccagacaccacattacatgcgccggcacccagggggggaccgcacaggcaaccacacctcgcgtgccaagatgagcgccgaactggccaaggtcattaatgatggcctcttctactatgagcaggacctgtgggctgaaaagtttgaacctgagtattcccagatcaagcaagaagtcgagaacttcaaaaaggtcaatatgatcagccgggagcagtttgacacactgacccctgagccccctgtggatcccaaccaggaagttcctcctgggccacctcggttccagcaagttcctacggatgccctggccaacaagttgtttggtgctcctgagccctccaccatcgcccgctctctaccaaccactgtcccagagtcaccaaactaccgcaacaccaggacccctcgcactccccggacaccacagctcaaagactcaagccagacatcacggttttacccagtggtgaaagaaggacggacactggatgccaagatgcctcgaaaaagaaagacaagacacagttcaaacccacccttggagagccatgtgggctgggtgatggattcccgtgagcacaggccccgtactgcttccatcagctccagcccctcagaagggacgcctacagttggcagctatggctgtacccctcagtcattgcccaagttccagcatccttcccatgaactgctcaaggaaaatggcttcacacaacacgtctaccataagtatcgtaggcgctgccttaatgagcggaaacgcttgggcattggccagtctcaggagatgaacacactcttccgcttctggtccttcttcctccgagatcacttcaacaaaaagatgtatgaggagttcaagcagctggctctggaggacgccaaagaaggctacagatatggtttggagtgcctttttcgatactacagttatggcctggaaaagaagttccggctggacatattcaaggattttcaggaggaaacggtgaaggactatgaagctggccaactgtatgggctggagaagttctgggccttcttgaaatattccaaagccaaaaatttggacattgaccccaaactgcaagaatacctcggcaaattccgacgtcttgaagacttccgagtagatccccccatgggtgaggagggcaaccacaagcgacactcagtggtagcaggaggtggcggcggtgagggcaggaagcggtgcccctcccagtcttccagcaggcctgctgccatgatcagccaaccccctacaccacccaccggccagcctgtccgggaagatgccaaatggacaagccagcactcgaacacacagactttgggaaagtgaaaagctccttagccctggggcttgaggggggaaaggggtagggtgggtaagagtccatgggggtgcccagtcccaggagaggggacaatgaagggacaggcctggagttactaggacaggcctttgtgctgagtagcaatgtatacaccatttgggctatcagaggtacccctgggcaggagcctctacatccccttccccctcctctctccatgactcttgacatcctagcttcttctaaggggggagggaaaggggggagatttttatatatatatacatatatatatatcaagttttaaattattgatagttcatctggattaccaaaatcactctgcagccctgcccgaggctagtaggctgcaaccctggtccccacccctaacctcctgctccccctcaagccaactatgcagcccacaagaaggccctgcgggcccccccattgcccagcactgtctcatagaaggctctggtggtacctctgggccccaggagcatcagccccttgatcatctggggtttgtcatcaccatattttctccctgctgttcccaccatgcccttctgccatcttctgggagaaggaaaccaaaggatctaaaactggggtttgggggaaggtttcagcctctccccactccccttgccccacaccctttactccccagcccagagagacgctgcttttaccaggaaagactattgaaagatgttttattttatttttctctgacctttccatccttgaaaaaatggggaaaaaagaagaaaaaagacaaaatcgaccataaaagaccaaaaaaaaaaaaaaaatcagaaaacccccacctaatccacagaaagtaatgtctttcccctccccttggaatttttgttttgtttttggaaataatatttttttaaaagttgccttattgtggagcgggaatctgaaatacccaaatgcctgttttcctcggtggagtcaacccgaagagctcccaccttctctggatgtgcctgggcttggactggctagaatctttctctggactgttgcatgtacagtgcctccatcctggaggcaagagagttgggagtggctcgaatcagagccgtgcccaagatatccctgctgttgcatcgtttgaagctgacgtcctgtgtctgtacactgctgccactgttgtgtcctcgctctgcttgctgttgcctcacgccaggccccgtcctgccgtgacacccttcatcctacccttggaaccccaaggccaagttggttcaaactgttggagaacagagttggcctgcatctggaacacacttgtcctcagcttaccatctcctcacaccccagagtggaaaggtgaacacctgcagctgaggcttggaaacgtttcttgtgttgccctgaaaaatctttgagacctcagggaggctctgtctctcttaaaaggtggagaaagatgccattctctccctaaggtctggtggagtctccccatcttgcatacccttctgcaagccatctatctctgctcactctccaattgacccgcctgggaacaagggatgaggaggagttgggggctggggggaatcctgccagttggtgaagccctgtggcaggaaggtatatgtggacatagagtatacctgattctctttcttcagccactgactgcttgggttgggctgtgaatgataatggaatggctggagtctgctgttgtcagaaggcagggagggtgatgaaggactgacccacatggactgggatgtgtgtcggttatgggcatgactgcacgttcactctcagtgggatctgggcaacatggagttcattgtcctgttgcttacttactgcaatgtctttggccctccttttcaactggttcctctgttgggcccaaaggttgggagtaggagacagtatcccaggctgacaagggcttgccctttaccttgggcaccttgttaatttttagcctgtgcccttccccacctttgccctcccagtggttggtatgtgggaagcccatctcagttcctgtgacttcatgtctcaaaccaaggatgagcgtctggtctctgctatgatggtggtatccgaggcctttccctgcccagtctggtgcctgccccacattgtaccggacactggattcctggacccccttctcctttcctttctttccttcaggtcacgcagccctgtactgtatccagcaccacagaaacctcagtgtttttcctctgctggtttggggcacaaggaagccttagggtatggggaaaggctgttattacctagagtttactcccaggccagggggctgccatcttcttcacagacatccctgaaaggaagcccctttggggcagggaggtgaggacttcatctcaacatcggctggtggttggtaggggagctttttcttttctttcctttttttttgtttttgtttttgtttttgtttttggtaacatgttaggagttaatgttgcaaagagtagtttacatcttcactttctgaagacacttgaatttaggaccgatgtatctgtgacaagcatgccagaagtggcaggggccatcagggctaaccacttcacacctaccatcgtcccatggggatccaagacctgagataaagcaacagcctgcccagatccctctgttcatcctatcccttccaaggttggtccatgccaacataacctctgggcatcagacatcagcaggtctgtgtgcctcagccctgttaaggggcaggtttctctttagccctcttcctgcacttgggagcaaaggcactaccagtagagaagggccatccagccgtgccccagcctggacccctggggctcagatagaggtgctgagcccctgtgtcaaagttgttaaatgtttttgttttgttccattgtagctctttttttttttttttcccctttcctggtgattgattttacaaaagaaagtaagctgcttagaaggccctggaagggaagtgaggaggagggacaaggaagatgactagttacggagggtgagggttgttttttgccaaaaagcctgggtagagtgatctgaattatctggcaccctcctgaatggaaccccagagtacctcctgtgtggaagggtccctggattttccctaacacccaccctctcccccttcagccatgctgatggcagagaagataagaacttggagcccatttctcactggagaggaaaacttgtcatctggctttgcggagaaggttccaccttacgctcgtagtacattatctttactatgtgctaggatatcatatttaaaaggacaaaaaaatgtaaaatacttgaatgagcttgtattataacattaatattattgagagtatctgctttccaggctgaagtgattcattcattattctagtcctgctttagtcctttgtaatttgtggtaattatgcttttctttttaatacaaaaaaatgtataaaaataaacacttgaaaaggcaaaaaaaaaaaaaaaaaaaaaaaaaaaaaaaaaaaaaaaaaaaaaaaaaaaaaaa

SEQ ID NO: 197 - DNA, 1179 bp, HOMO SAPIENS
ctgcgctggggttggagtggccgcaacgggcggggcggggcggggccgggcaagtttgttccccgagttcggagcctaggagccccccgcggctgcggcgcaggtgccctcggcctgagtcgggatggagctgcctgctgtgaacctgaaggtgattctcctaggtcactggctgctgacaacctggggctgcattgtattctcaggctcctatgcctgggccaacttcaccatcctggccttgggcgtgtgggctgtggctcagcgggactccatcgacgccataagcatgtttctgggtggcttgctggccaccatcttcctggacatcgtgcacatcagcatcttctacccgcgggtcagcctcacggacacgggccgctttggcgtgggcatggccatcctcagcttgctgctcaagccgctctcctgctgcttcgtctaccacatgtaccgggagcgcgggggtttccttgggtcttctcaggaccgtagtgcctaccagacgattgactcagcagaggcgcccgcagatccctttgcagtcccagagggcaggagtcaagatgcccgagggtactgaagccagccacgctgcgcccggccctgccccgggccttcctcgtgcctgggaggtcgttctagggatgctcctgacctccgtctcttggacctaagatggaatgtgtccccagctcagggattgcctgaaccaagaggccaggagcccccatgggccgcccagtaccatgcacactcctgtcccgaactccctgaggcctcccctcccttcagggcacccactggttcccaggctggaaccagggtctctctttacctcctaccccatggtggcaccacagaggccctcagccgagtcctgcctgagtgttgcaagctcaggcctttaaggactgctgatgccccctcaggcctcccccaagtttgctgggctttggtggaagccctgagagcttcaggtcctgctcagcccgaggagcagtctggcatgggagtgaggccccgtccttctcactgcctggtcacatggtgcctagggatgcagggctggaggccagaggtgtcagcaacactgtgtcccaccacaacctccagcctcccttttcagagcacagcattaaagtttggggaattctgtagaaaaaaaaaaaaaaaaaa

SEQ ID NO: 198 - DNA, 1344 bp, HOMO SAPIENS; identical to SEQ ID NO: 25

SEQ ID NO: 199 - DNA, 1269 bp, HOMO SAPIENS
aggtgacagcctcgcttggacgcagagcccggcccgacgccgccatgagcgccgcgctcttcagcctggacggcccggcgcgcggcgcgccctggcctgcggagcctgcgcccttctacgaaccgggccgggcgggcaagccgggccgcggggccgagccaggggccctaggcgagccaggcgccgccgcccccgccatgtacgacgacgagagcgccatcgacttcagcgcctacatcgactccatggccgccgtgcccaccctggagctgtgccacgacgagctcttcgccgacctcttcaacagcaatcacaaggcgggcggcgcggggcccctggagcttcttcccggcggccccgcgcgccccttgggcccgggccctgccgctccccgcctgctcaagcgcgagcccgactggggcgacggcgacgcgcccggctcgctgttgcccgcgcaggtggccgcgtgcgcacagaccgtggtgagcttggcggccgcagggcagcccaccccgcccacgtcgccggagccgccgcgcagcagccccaggcagacccccgcgcccggccccgcccgggagaagagcgccggcaagaggggcccggaccgcggcagccccgagtaccggcagcggcgcgagcgcaacaacatcgccgtgcgcaagagccgcgacaaggccaagcggcgcaaccaggagatgcagcagaagttggtggagctgtcggctgagaacgagaagctgcaccagcgcgtggagcagctcacgcgggacctggccggcctccggcagttcttcaagcagctgcccagcccgcccttcctgccggccgccgggacagcagactgccggtaacgcgcggccggggcgggagagactcagcaacgacccatacctcagacccgacggcccggagcggagcgcgccctgccctggcgcagccagagccgccgggtgcccgctgcagtttcttgggacataggagcgcaaagaagctacagcctggacttaccaccactaaactgcgagagaagctaaacgtgtttattttcccttaaattatttttgtaatggtagctttttctacatcttactcctgttgatgcagctaaggtacatttgtaaaaagaaaaaaaaccagacttttcagacaaaccctttgtattgtagataagaggaaaagactgagcatgctcacttttttatattaatttttacagtatttgtaagaataaagcagcatttgaaatcgaaaaaaaaaaaaaaaaaa

SEQ ID NO: 200 - DNA, 404 bp, HOMO SAPIENS
  misc_feature (39)..(41): n is a, c, g, or t
  misc_feature (200)..(200): n is a, c, g, or t
  misc_feature (236)..(236): n is a, c, g, or t
  misc_feature (320)..(320): n is a, c, g, or t
gggacggagaggttttttcgctcagtggtgcaggccatnnncaggcagggcccgggtgcaagaaaacattctgtgtgcgctagtgcgagaggatcttctacagtcacctgccttcatgccattacagacagacgggaagtcactgggttctaggacataaaaagacctacatgttggctagcctaaatcgaacccttttntagtaataaagattcatcaatgttttaaactgtccnctgtcagccccctgggactcaggtgaaccaactctctttgggaatctatcttagaagatgaaaccataaagccttcagtttcantgtcagggatgcacactctatatctggtgaaattatggaggggtgaaaacttctgtacagcaaactgtacctccaaatctttaa

SEQ ID NO: 201 - DNA, 410 bp, HOMO SAPIENS
gatagctcttgacttacgatggtgcaactttaggatgatgcaaagaaactgtactttgagtacccatacaaccatgccgtttgtcagtttcagtacagtattcaataaattacatgagctggtgaatacctgatgataaaataggctttgtcttggataattttccccaactataagctaatgtaagtcttctgaatatatttaaagtaggctaagctaagctatgatgtttgccaggttagtttattaaatacatttttgactataatattttcagcctacagtataagtattgcaacagaagaaatcaaactgtcatttttcaagtgagcctcaattatttaaccaggttactagatacaaaatcaatatacaaaagtaattatatacccctgtatcagcagcaaact

SEQ ID NO: 202 - DNA, 5285 bp, HOMO SAPIENS
ctgcaggaaggagagaggaagaggagcagaagggggcagcagcggacgccgctaacggcctccctcggcgctgacaggctgggccggcgcccggctcgcttgggtgttcgcgtcgccacttcggcttctcggccggtcgggcccctcggcccgggcttgcggcgcgcgtcggggctgagggctgctgcggcgcagggagaggcctggtcctcgctgccgagggatgtgagtgggagctgagcccacactggagggcccccgagggcccagcctggaggtcgttcagagccgtgcccgtcccggggcttcgcagaccttgacccgccgggtaggagccgcccctgcgggctcgagggcgcgctctggtcgcccgatctgtgtagccggtttcagaagcaggcaacaggaacaagatgtgaactgtttctcttctgcagaaaaagaggctcttcctcctcctcccgcgacggcaaatgttctgaaaaagactctgcatgggaatggcctgccttacgatgacagaaatggagggaacatccacctcttctatatatcagaatggtgatatttctggaaatgccaattctatgaagcaaatagatccagttcttcaggtgtatctttaccattcccttgggaaatctgaggcagattatctgacctttccatctggggagtatgttgcagaagaaatctgtattgctgcttctaaagcttgtggtatcacacctgtgtatcataatatgtttgctttaatgagtgaaacagaaaggatctggtatccacccaaccatgtcttccatatagatgagtcaaccaggcataatgtactctacagaataagattttactttcctcgttggtattgcagtggcagcaacagagcctatcggcatggaatatctcgaggtgctgaagctcctcttcttgatgactttgtcatgtcttacctctttgctcagtggcggcatgattttgtgcacggatggataaaagtacctgtgactcatgaaacacaggaagaatgtcttgggatggcagtgttagatatgatgagaatagccaaagaaaacgatcaaaccccactggccatctataactctatcagctacaagacattcttaccaaaatgtattcgagcaaagatccaagactatcatattttgacaaggaagcgaataaggtacagatttcgcagatttattcagcaattcagccaatgcaaagccactgccagaaacttgaaacttaagtatcttataaatctggaaactctgcagtctgccttctacacagagaaatttgaagtaaaagaacctggaagtggtccttcaggtgaggagatttttgcaaccattataataactggaaacggtggaattcagtggtcaagagggaaacataaagaaagtgagacactgacagaacaggatttacagttatattgcgattttcctaatattattgatgtcagtattaagcaagcaaaccaagagggttcaaatgaaagccgagttgtaactatccataagcaagatggtaaaaatctggaaattgaacttagctcattaagggaagctttgtctttcgtgtcattaattgatggatattatagattaactgcagatgcacatcattacctctgtaaagaagtagcacctccagccgtgcttgaaaatatacaaagcaactgtcatggcccaatttcgatggattttgccattagtaaactgaagaaagcaggtaatcagactggactgtatgtacttcgatgcagtcctaaggactttaataaatattttttgacttttgctgtcgagcgagaaaatgtcattgaatataaacactgtttgattacaaaaaatgagaatgaagagtacaacctcagtgggacaaagaagaacttcagcagtcttaaagatcttttgaattgttaccagatggaaactgttcgctcagacaatataattttccagtttactaaatgctgtcccccaaagccaaaagataaatcaaaccttctagtcttcagaacgaatggtgtttctgatgtaccaacctcaccaacattacagaggcctactcatatgaaccaaatggtgtttcacaaaatcagaaatgaagatttgatatttaatgaaagccttggccaaggcacttttacaaagatttttaaaggcgtacgaagagaagtaggagactacggtcaactgcatgaaacagaagttcttttaaaagttctggataaagcacacagaaactattcagagtctttctttgaagcagcaagtatgatgagcaagctttctcacaagcatttggttttaaattatggagtatgtgtctgtggagacgagaatattctggttcaggagtttgtaaaatttggatcactagatacatatctgaaaaagaataaaaattgtataaatatattatggaaacttgaagttgctaaacagttggcatgggccatgcattttctagaagaaaacacccttattcatgggaatgtatgtgccaaaaatattctgcttatcagagaagaagacaggaagacaggaaatcctcctttcatcaaacttagtgatcctggcattagtattacagttttgccaaaggacattcttcaggagagaataccatgggtaccacctgaatgcattgaaaatcctaaaaatttaaatttggcaacagacaaatggagttttggtaccactttgtgggaaatctgcagtggaggagataaacctctaagtgctctggattctcaaagaaagctacaattttatgaagataggcatcagcttcctgcaccaaagtgggcagaattagcaaaccttataaataattgtatggattatgaaccagatttcaggccttctttcagagccatcatacgagatcttaacagtttgtttactccagattatgaactattaacagaaaatgacatgttaccaaatatgaggataggtgccctggggttttctggtgcctttgaagaccgggatcctacacagtttgaagagagacatttgaaatttctacagcaacttggcaagggtaattttgggagtgtggagatgtgccggtatgaccctctacaggacaacactggggaggtggtcgctgtaaaaaagcttcagcatagtactgaagagcacctaagagactttgaaagggaaattgaaatcctgaaatccctacagcatgacaacattgtaaagtacaagggagtgtgctacagtgctggtcggcgtaatctaaaattaattatggaatatttaccatatggaagtttacgagactatcttcaaaaacataaagaacggatagatcacataaaacttctgcagtacacatctcagatatgcaagggtatggagtatcttggtacaaaaaggtatatccacagggatctggcaacgagaaatatattggtggagaacgagaacagagttaaaattggagattttgggttaaccaaagtcttgccacaagacaaagaatactataaagtaaaagaacctggtgaaagtcccatattctggtatgctccagaatcactgacagagagcaagttttctgtggcctcagatgtttggagctttggagtggttctgtatgaacttttcacatacattgagaagagtaaaagtccaccagcggaatttatgcgtatgattggcaatgacaaacaaggacagatgatcgtgttccatttgatagaacttttgaagaataatggaagattaccaagaccagatggatgcccagatgagatctatatgatcatgacagaatgctggaacaataatgtaaatcaacgcccctcctttagggatctagctcttcgagtggatcaaataagggataacatggctggatgaaagaaatgaccttcattctgagaccaaagtagatttacagaacaaagttttatatttcacattgctgtggactattattacatatatcattattatataaatcatgatgctagccagcaaagatgtgaaaatatctgctcaaaactttcaaagtttagtaagtttttcttcatgaggccaccagtaaaagacattaatgagaattccttagcaaggattttgtaagaagtttcttaaacattgtcagttaacatcactcttgtctggcaaaagaaaaaaaatagactttttcaactcagctttttgagacctgaaaaaattattatgtaaattttgcaatgttaaagatgcacagaatatgtatgtatagtttttaccacagtggatgtataataccttggcatcttgtgtgatgttttacacacatgagggctggtgttcattaatactgttttctaatttttccatagttaatctataattaattacttcactatacaaacaaattaagatgttcagataattgaataagtacctttgtgtccttgttcatttatatcgctggccagcattataagcaggtgtatacttttagcttgtagttccatgtactgtaaatatttttcacataaagggaacaaatgtctagttttatttgtataggaaatttccctgaccctaaataatacattttgaaatgaaacaagcttacaaagatataatctattttattatggtttcccttgtatctatttgtggtgaatgtgttttttaaatggaactatctccaaatttttctaagactactatgaacagttttcttttaaaattttgagattaagaatgccaggaatattgtcatcctttgagctgctgactgccaataacattcttcgatctctgggatttatgctcatgaactaaatttaagcttaagccataaaatagattagattgttttttaaaaatggatagctcattaagaagtgcagcaggttaagaattttttcctaaagactgtatatttgaggggtttcagaattttgcattgcagtcatagaagagatttatttcctttttagaggggaaatgaggtaaataagtaaaaaagtatgcttgttaattttattcaagaatgccagtagaaaattcataacgtgtatctttaagaaaaatgagcatacatcttaaatcttttcaattaagtataaggggttgttcgttgttgtcatttgttatagtgctactccactttagacaccatagctaaaataaaatatggtgggttttgtgtgtgtgtgtgtgtgtgtgtgtgtgtgtgtgtgtgtgttatttatacaaaacttaaaatacttgctgttttgattaaaaagaaaatagtttcttacttta

SEQ ID NO: 203 - DNA, 345 bp, HOMO SAPIENS
gcatttagtctataggcttgttttgtttggcccacaaagcattttattatttaagtttatgccaacatttaagaatcaagaatttcccagacattcagatttctgacttcaattgaaaatctgacagtataaaccctattatattcctgcatggcataaaatcttcagttgctgaatggtgatatccacttttagaaagagtactctaccctgttctgcattcatacaacctaagccaacccgcccttcaccatcccacttctctttcaggttatctgcttaggctggtaggcatttgtgtttataaaccttgaactcaagctgctagatggtcagttgcattgt

SEQ ID NO: 204 - DNA, 3019 bp, HOMO SAPIENS
agtgaaggggtttcccatatgaaaaatacagaaagaattatttgaatactagcaaatacacaacttgatatttctagagaacccaggcacagtcttggagacattactcctgagagactgcagctgatggaagatgagccccaacttctaaaaatgtatcactaccgggattgagatacaaacagcatttaggaaggtctcatctgagtagcagcttcctgccctccttcttggagataagtcgggcttttggtgagacagactttcccaaccctctgcccggccggtgcccatgcttctgtggctgctgctgctgatcctgactcctggaagagaacaatcaggggtggccccaaaagctgtacttctcctcaatcctccatggtccacagccttcaaaggagaaaaagtggctctcatatgcagcagcatatcacattccctagcccagggagacacatattggtatcacgatgagaagttgttgaaaataaaacatgacaagatccaaattacagagcctggaaattaccaatgtaagacccgaggatcctccctcagtgatgccgtgcatgtggaattttcacctgactggctgatcctgcaggctttacatcctgtctttgaaggagacaatgtcattctgagatgtcaggggaaagacaacaaaaacactcatcaaaaggtttactacaaggatggaaaacagcttcctaatagttataatttagagaagatcacagtgaattcagtctccagggataatagcaaatatcattgtactgcttataggaagttttacatacttgacattgaagtaacttcaaaacccctaaatatccaagttcaagagctgtttctacatcctgtgctgagagccagctcttccacgcccatagaggggagtcccatgaccctgacctgtgagacccagctctctccacagaggccagatgtccagctgcaattctccctcttcagagatagccagaccctcggattgggctggagcaggtcccccagactccagatccctgccatgtggactgaagactcagggtcttactggtgtgaggtggagacagtgactcacagcatcaaaaaaaggagcctgagatctcagatacgtgtacagagagtccctgtgtctaatgtgaatctagagatccggcccaccggagggcagctgattgaaggagaaaatatggtccttatttgctcagtagcccagggttcagggactgtcacattctcctggcacaaagaaggaagagtaagaagcctgggtagaaagacccagcgttccctgttggcagagctgcatgttctcaccgtgaaggagagtgatgcagggagatactactgtgcagctgataacgttcacagccccatcctcagcacgtggattcgagtcaccgtgagaattccggtatctcaccctgtcctcaccttcagggctcccagggcccacactgtggtgggggacctgctggagcttcactgtgagtccctgagaggctctcccccgatcctgtaccgattttatcatgaggatgtcaccctggggaacagctcagccccctctggaggaggagcctccttcaacctctctctgactgcagaacattctggaaactactcctgtgatgcagacaatggcctgggggcccagcacagtcatggagtgagtctcagggtcacagttccggtgtctcgccccgtcctcaccctcagggctcccggggcccaggctgtggtgggggacctgctggagcttcactgtgagtccctgagaggctccttcccgatcctgtactggttttatcacgaggatgacaccttggggaacatctcggcccactctggaggaggggcatccttcaacctctctctgactacagaacattctggaaactactcatgtgaggctgacaatggcctgggggcccagcacagtaaagtggtgacactcaatgttacaggaacttccaggaacagaacaggccttaccgctgcgggaatcacggggctggtgctcagcatcctcgtccttgctgctgctgctgctctgctgcattacgccagggcccgaaggaaaccaggaggactttctgccactggaacatctagtcacagtcctagtgagtgtcaggagccttcctcgtccaggccttccaggatagaccctcaagagcccactcactctaaaccactagccccaatggagctggagccaatgtacagcaatgtaaatcctggagatagcaacccgatttattcccagatctggagcatccagcatacaaaagaaaactcagctaattgtccaatgatgcatcaagagcatgaggaacttacagtcctctattcagaactgaagaagacacacccagacgactctgcaggggaggctagcagcagaggcagggcccatgaagaagatgatgaagaaaactatgagaatgtaccacgtgtattactggcctcagaccactagccccttacccagagtggcccacaggaaacagcctgcaccatttttttttctgttctctccaaccacacatcatccatctctccagactctgcctcctacgaggctgggctgcagggtatgtgaggctgagcaaaaggtctgcaaatctcccctgtgcctgatctgtgtgttccccaggaagagagcaggcagcctctgagcaagcactgtgttattttcacagtggagacacgtggcaaggcaggagggccctcagctcctagggctgtcgaatagaggaggagagagaaatggtctagccagggttacaagggcacaatcatgaccatttgatccaagtgtgatcgaaagctgttaatgtgctctctgtataaacaatttgctccaaatattttgtttcccttttttgtgtggctggtagtggcattgctgatgttttggtgtatatgctgtatccttgctaccatattgggaacagccaaaagaagttatagaacaagaatttaaggtgactctatctga

SEQ ID NO: 205 - DNA, 774 bp, HOMO SAPIENS
ggagaaaatgcccctggaaagggttaagggccaggacaggaatggggcaggaggtgcacggatcctgctgggcactgggagcagggggcggccaaaggcagtgggtgggcaggtccatgcctcccctggccccccagctctgcagggcagtgttcctggttcctatcttgctgctgctgcaggtgaagcctctgaacgggagcccaggccccaaagatgggagccagacagagaaaacgccctctgcagaccagaatcaagaacagttcgaagagcactttgtggcctcctcagtgggtgagatgtggcaggtggtggacatggcccagcaggaagaagaccagtcgtccaagacggcagctgttcacaagcactctttccacctcagcttctgctttagtctggccagtgtcatggttttctcaggagggccattgaggcggacattcccaaatatccaactctgcttcatgctcactcactgaccctccctccctcctgggctccaggtcacaactcccaaaggagatgcaggcatggctctctgcctctgatcaccatcactgtatctcaaggttcagcagcagagataccagttgccatcagtgctaactgactgcctctccaggttcggagtttcatctcccagggccagagacagcagacccacatccttctctcccacacctctcctggttttgttcaggacagcagattagaggcaggaggcaatgacaataaaataacgataaaatcctgagaacaattaaaaaa

SEQ ID NO: 206 - DNA, 443 bp, HOMO SAPIENS
  misc_feature (42)..(42): n is a, c, g, or t
  misc_feature (44)..(44): n is a, c, g, or t
  misc_feature (113)..(113): n is a, c, g, or t
gtggtctggatagattatgctgggaaaagaagcctggagcangnagtacagtgggagaacaagacagaagtgcttgccttggtgatccaaaaaaggcaggatccggccggggnaaggtgattattctgtctgatgaggagaataagagccagtttgtggtattgacagaagaatgaaagtaaagttcaaccaatctacaaaggccaaaaatattttcacaggcccccaaaagatgaactccaatctgctgcccctaaacgcattctccactgtctggaagatgtgcaaaggcaacggcacagcgttctccatctcaaatccttcaaagtgctgtcagaataaaagaatccccaccaaaagccccagggaaatctatctgtctgtatggtatggtaatgactgaggttattccagataggattctgggagaaactcagctattg

SEQ ID NO: 207 - DNA, 531 bp, HOMO SAPIENS
ctggttcaatatatgcaaatcaataaatgtaatccagcatataaacagagccaaagacaaaagccacatgattatctcaatagatgcagaaaaagcctttgacaaaattcaacaacccttcatgctaaaaactctcaataaattaggtattgatgggacgtatttcaaaataataagagctatctatggcaaacccacagccaatatcatactgaatgggcaaaaactggaagcattccctttgaaaactggcacaagacagggatgccctctctcaccgctcctattcaacatagtgttggaagttctggccagggcaatcaggcaggagaaggaaataaagggtattcaattaggaaaagaggaagtcaaattgtccctgtttgcagacgacatgattgtttatctagaaaaccccatcgtctcagcccaaaatctccttaagctgataagcaacttcagcaaagtctcaggatacaaaatcaatgtacaaaaatcacaagcattcctatacaccaacaacagacaaac

SEQ ID NO: 208 - DNA, 4757 bp, HOMO SAPIENS
ccgggtccctccccatcccgcgacccaacggtcgttccccgccgccggccccgcccctccctggccgcccgcggcgcgccggcgcctgcgcagtcgccccagagcgccccgaccgggatggcggccgttttggagtcgctgctgcgagaagaggtgtcggtcgcagccgtcgtgcggtggatcgcgcgcagcacccagggttcggaggataacgctggggaggcggccgcgctgagctcactccgggccctgcggaaagaattcgtaccgttcctgttgaacttcctgagggagcagagcagccgcgtcctcccgcaggggcccccgacccccgccaagaccccgggcgcctcggcagccttgccagggaggccgggaggcccgccgcggggtagccgcggggcgcgcagccagcttttccctccgaccgaggcccagagcaccgctgccgaggcccctctggcccgccgcgggggcaggaggcggggcccggggccggcccgcgagcgtggaggccgcggcctggaggagggggtcagcggggagagcctgcccggagccgggggccggaggcttaggggctctggcagccccagccgccccagcctcacgctgtctgatccgccaaacctcagcaacctggaggagttccctcccgtaggctcggttccccccggccctacagggacgaagccttctcgcaggatcaacccaactccggtgagcgaagagcggtcactctccaagcccaagacctgcttcacctcacccccaatcagctgtgtccccagttcccaaccctcagccctggacactagcccttggggccttggccttcccccagggtgcagaagtctgcaagaggagcgagagatgctcaggaaggagcgctctaagcagctgcagcagtcacctacccccacctgtcccaccccagaattggggtcgcccctccccagccggacaggaagcctcacagatgaacctgcagaccctgccagagtgtcttcccgccagcgcctggagcttgtagcccttgtttactcctcgtgcattgctgagaacctggtaccaaacctcttcttggagcttttcttcgtctttcagctcctcactgcccggaggatggtgactgccaaggacagcgaccctgaactaagtccagctgtcctagattccctggaaagtccactgttccaaagcatccacgattgtgtcttctttgcagtgcaggttttggagtgtcactttcaggttctttccaacctggacaaagggaccttgaagctgctggctgagaatgagcggctgctgtgcttctcaccagctctgcaaggccgccttcgagctgcctatgagggcagtgttgccaaggtctctctggtgatgcctccctctactcaagctgtctcctttcagccagagactgacaatcgtgccaacttctccagtgaccgagcctttcatacttttaagaaacagagggatgtgttttatgaggtgctgcgagagtgggaagatcaccatgaggagcctggctgggattttgagaagggcttgggcagcagaatcagggccatgatgggtcagctctccgcagcctgcagccacagccactttgttcggcttttccaaaaacaactactccagatgtgtcagagccctggtggtgctgggggcaccgtcttgggcgaggccccagatgtgttgagtatgctgggagctgacaagctggggcggttgtggcgcctacaggaacggcttatggctcctcagagcagtggggggccctgcccaccccccaccttcccaggctgtcaaggcttctttagggacttcatccttagtgccagcagcttccagtttaaccagcatctcatggacagtctgagcttgaagatccaggagctcaatggtcttgccctgccccagcatgagcccaatgatgaagacggggagtcagacgtagactggcagggtgagcggaagcaatttgctgtggtgcttcttagcctgagacttttggctaaattcctgggctttgtggctttcctgccataccgggggcctgaacctcccccgaccggtgagcttcaggactccattctggccctcaggagccaggtccctccggtcctggatgtgcggactctgctgcagcgagggctgcaggcccgccgggcggtgctcaccgtgccctggctggtggagtttctctcctttgctgaccatgttgttcccttgctggaatattaccgggacatcttcactctcctgctgcgcctgcaccggagcttggtgttgtcgcaggagagtgaggggaagatgtgtttcctgaacaagctgctgctacttgctgtcctgggctggcttttccagattcccacagtccctgaggacttgttctttctggaagagggtccctcatatgcctttgaggtggacacagtagccccagagcatggcttggacaatgcgcctgtggtggaccagcagctgctctacacctgctgcccctacatcggagagctccggaaactgctcgcttcgtgggtgtcaggcagtagtggacggagtgggggcttcatgaggaaaatcacccccaccactaccaccagcctgggagcccagccttcccagaccagccaggggctgcaggcacagctcgcccaggcctttttccacaaccagccgccctccttgcgccggaccgtagagttcgtggcagaaagaattggatcaaactgtgtcaaacatatcaaggctacactggtggcagatctggtgcgccaggcagagtcacttctccaagagcagctggtgacacagggagaggaagggggagacccagcccagctgttggagatcttgtgttcccagctgtgccctcacggggcccaggcattggccctggggcgggagttctgtcaaaggaagagccctggggctgtgcgggcgctgcttccagaggagaccccggcagccgttctgagcagtgcagagaacattgctgtggggcttgcaacagagaaagcctgtgcttggctgtcagccaacatcacagcactgatcaggagggaggtgaaagcagcagtgagtcgcacacttcgagcccagggtcctgaacctgctgcccggggggagcggaggggctgctcccgcgcctgtgagcaccatgctcccctcccctcccacctcatctccgagataaaagacgtgctctccttggccgtggggccacgggaccctgacgagggagtctccccagagcatctggaacagctcctaggccagctgggccagacgctgcggtgccgccagttcctgtgcccacctgctgagcagcatctggcaaagtgctctgtggagttagcttccctcctcgttgcagatcaaattcctatcctagggcccccggcacagtacaggctggagagagggcaggctcgaaggcttctgcacatgctgctttccttgtggaaggaagactttcaggggccggttccgctgcagctgctgctgagcccaagaaatgtggggcttctggcagacacaaggccaagggagtgggacttgctgctattcttgctacgggagctggtggagaagggtctgatgggacggatggagatagaggcctgcctgggcagcctccaccaggcccagtggccaggggactttgctgaagaattagcaacactgtctaatctgtttctagccgagccccacctgccagaaccccagctaagagcctgtgagttggtgcagccaaaccggggcactgtgctggcccagagctagggctgagaagtggccctgccttgggcattgcaccagaaccctggacccccgcctcacgaggaggcccaagtgcccaatgcagaccctcactggttggggtgtagctgggtctacagtcagacttcctgctctaagggtgtcactgcctggcatcccaccacgcgaatcctagaggaaggagagttggcctgatttgggattatggcagaaaagtccagagatgccagtcctggagtagaagaggtggtgtttgtttatctcttggatactaaatgaaatgaggtgtgtgggcttgtcaacacagaattcaagcctcatttgctatcccagcatctcttaaaactttgtagtcttggaattcatgacagaggcaaatgactcctgcttaacttatgaagaaagttaaaacatgaatcttgggagtctacattttcttatcaccaggagctggactgccatctccttataaatgcctaacacaggccgggtctggtggctcatgcctgtaatcccagcactttgagaggcctgaggtcggcggactgcctgaggtcaggaattcaagaccagcctggccaacatggcaaaaccccatctctactaaaaataaaaaaattattagctgggcatggtggtgtgtgcctgtaatcccagctactcaggaggatgaggcaggagacctgcttgaacctggaggtggaggttgcagtgagccgaggtcgcaccactgcactccagtctgggtaacagagcgagactttctagaaaaagcctaacaaacagataaggtaggactcaaccaactgaaacctgactttccccctgtaccttcagcccctgtgcaggtagtaacctcttgagacctctccctgaccagggaccaagcacagggcatttagagctttttagaataaactggttttctttaaaaaaaaaaaaaaaaaaaaaaaaaaaaa

SEQ ID NO: 209 - DNA, 487 bp, HOMO SAPIENS
agcactctcaagtcactgaatgaaggcctcctaagcatcagacccagtgccaggtacaggacacacctgatctctactgcatctctataatggggcctggaagtggacagcatcagcccttttttttatgagacggattcttgctgtgtggctcaggctggagtacagtggcgcaatcccagctcactgcaacctctgcctcccaggttcaagcgattctcctgcctcattcagccttctgagtagctgggattacatgcacatgacatcgttcctggctaatttttgtatttttagtagagacagggtttcatcatgctggccaggctggtctcgaactcctgacctcaggtgatctgcccacctcggcctcacaaagtgctgggattacaggtgtgagccaccatgcccggccagcatcaagcccattttaccgaggaggaaacagaggcacagggatttacccggtcattctgctagcagtgtg

SEQ ID NO: 210 - DNA, 305 bp, HOMO SAPIENS
  misc_feature (159)..(159): n is a, c, g, or t
  misc_feature (185)..(185): n is a, c, g, or t
  misc_feature (205)..(206): n is a, c, g, or t
gggaaaatggtgacaaccagtctctacaaaaaatacaaaaattagccaggcatggaggcgcacacctgtaggcccagcaacttgtaggactgaggcgagaggatcacttgagcccaggaggtcaaggctacagtgagccatgttcatatcactgcactnccgtctgggagacaaagtgagacccntgtctcaaaaaaaaaaaaannttgctgaggaatgctgtgagggaaattagagggacttacagagcacgtagcaagggacctgactccatgtgaaagaactcaagtgcaccagcctggcca

SEQ ID NO: 211 - DNA, 2695 bp, HOMO SAPIENS
gtccctcccccactttcctcccgggggcgcggcgcgggagagcataatggcagcgtctgaggttgctggtgttgtggccaatgcccccagtcctccggaatcttctagtttatgtgcttccaaatcagacgaaggtctcccagatggtctaagcaccaaagactctgcacagaagcagaagaactcgcctctgttgagtgtaagtagccaaacaataaccaaggagaataacagaaatgtccatttggagcactcagagcagaatcctggttcatcagcaggtgacacctcagcagcgcaccaggtggttttaggagaaaacttgatagccacagccctttgtctttctggcagtgggtctcagtctgatttgaaggatgtggccagcacagcaggagaggagggggacacaagccttcgggagagcctccatccagtcactcggtctcttaaggcagggtgccatactaagcagcttgcctccaggaattgctctgaagagaaatccccacaaacctccatcctaaaggaaggtaacagggacacaagcttggatttccgacctgtagtgtctccagcaaatggggttgaaggagtccgagtggatcaggatgatgatcaagatagctcttccctgaagctttctcagaacattgctgtacagactgactttaagacagctgattcagaggtaaacacagatcaagatattgaaaagaatttggataaaatgatgacagagagaaccctgttgaaagagcgttaccaggaggtcctggacaaacagaggcaagtggagaatcagctccaagtgcaattaaagcagcttcagcaaaggagagaagaggaaatgaagaatcaccaggagatattaaaggctattcaggatgtgacaataaagcgggaagaaacaaagaagaagatagagaaagagaagaaggagtttttgcagaaggagcaggatctgaaagctgaaattgagaagctttgtgagaagggcagaagagaggtgtgggaaatggaactggatagactcaagaatcaggatggcgaaataaataggaacattatggaagagactgaacgggcctggaaggcagagatcttatcactagagagccggaaagagttactggtactgaaactagaagaagcagaaaaagaggcagaattgcaccttacttacctcaagtcaactcccccaacactggagacagttcgttccaaacaggagtgggagacgagactgaatggagttcggataatgaaaaagaatgttcgtgaccaatttaatagtcatatccagttagtgaggaacggagccaagctgagcagccttcctcaaatccctactcccactttacctccacccccatcagagacagacttcatgcttcaggtgtttcaacccagtccctctctggctcctcggatgcccttctccattgggcaggtcacaatgcccatggttatgcccagtgcagatccccgctccttgtctttcccaatcctgaaccctgccctttcccagcccagccagccttcctcaccccttcctggctcccatggcagaaatagccctggcttgggttcccttgtcagcccccacggtccacacatgccccctgccgcctccatcccacctcccccaggcttgggcggtgttaaggcttctgctgaaactccccggccccaaccagtagacaaactggagaagatcctggagaagctgctgacccggttcccacagtgcaataaggcccagatgaccaacattcttcagcagatcaagacagcacgtaccaccatggcaggcctgaccatggaggaacttatccagttggttgctgcacgactggcagaacatgagcgggtggcagcaagtactcagccacttggtcgcatccgggccttgttccctgctccactggcccaaatcagtaccccaatgttcttgccttctgcccaagtttcatatcctggaaggtcttcacatgctccagccacctgtaagctatgtctaatgtgccagaaactcgtccagcccagtgagctgcatccaatggcgtgtacccatgtattgcacaaggagtgtatcaaattctgggcccagaccaacacaaatgacacttgtcccttttgtccaactcttaaatgacggacctgactggggaggaagaagaagagaaactgatgtgaacaggaagcgcgggttcaagatttctaaaactctatatttatacagtgacatatactcatgccatgtacatttttattatataggtaatgtgtgtatagaaagtctgtattccaatgttcgtaaatgaaactatgtatattatgcagaaacagtctgttccccctcatcttgcaattcctttgggggatgcagattgtagggaagatgatgtttagtttggccttgaaattatgatatccctgcccagggctgttttcaaatacaatataaaaaccacctaggaacctgctgttgctctaaggccattctgctttggtttggctcagcctctagtccatttccttaaggctcatgtatgcagatttaaagcctggtgctcacccactgtccaaccagatgccttgcttaccgaaagcctccagaagcctcagtattgttttagccactctactccaaatggataaaatgagactctgattgaggaaaaaaaagtaa

SEQ ID NO: 212 - DNA, 13473 bp, HOMO SAPIENS
acagccgctgccgctggcgccgctcctcctccgtgtcagttgttgggctgtaatggcgactgggccgcccctgacgaagtgactcccgggccggggagcggggccagacctgcgccagagagaactgcagggagccgcagctcggggggtggcttgccctgagggaggggaggcagcctttccgccttgtcttccttcccagcggaccggcggatccccggagccggtgcgaggagggcacccggtgcgtccccggagcggggaggccaggccgggcagccctggggccggtcggggcggcgtcactgcaccctccgccaggctccgcgggatgcaccgtggtagccgagggcggaggcgacactctcaggtaaattggcaggatgaggagcagcaaatcaaaagaggtgcctttaccaaatccaaggaactctcaaagcaaggatactgttcaagcagatataaccacatcgtgggatgcactttctcaaaccaaggctgctctgagacacattgaaaataaattagaagtagcccctacaagtacagctgtgtgtgattctgtcatggataccaagaagtcttctacaagtgctactcgaaaaataagtagaaaagatggtagatacctggatgattcttgggttaatgctccaatctccaaatccactaaatcacgaaaagagaaatctcgtagtcctctcagggccaccaccctggagagtaatgtgaagaaaaataatcgtgtggaatttcgtgaacctttggtttcttatagggaaatccatggtgcaccttccaatttcagttccagccatctggaatcaaagcacgtatactgtgtagatgttaatgaagaaaagactgagagcggtaactggatgataggcagtcgagaagaacggaatatacggagctgtgattttgagagctcccaatcatctgtcatcaatgatacagttgttaggtttttaaatgatcgaccagcaattgatgcattgcaaaattctgaatgtttgattaggatgggagcttctatgagaactgaggaagaaatgcctaacagaacaaaaggaagtgagaataatttgaagctttctgtgaataacatggcccatgatactgatccaaaagcgttacgactaactgactcttctccatcctctactagtacttctaattcccaaagattagatattctaaagcggcgacaacatgatgtcaaactggaaaaacttaaggaacggattagaaaacagtgggaacactcagaagaaacaaatggccggggccagaagctgggtcatattgaccatccagtaatggttgttaatgttgataactcagtaacagcaaaagtcagaaaagtggcaacagcaccacctgctccagcatataaaggtttcaacccttcagagaccaagattcgaacacctgatgggaaagtgtggcaggaggctgagtttcaaaacatgagtagagaactgtatcgagatttagcacttcactttgcagatgatatttctataaaggagaaacctgctgaaaaaagtaaagagaagaaagtagtcaagccagtacgaaaagtccaaaaagtagcacagttatcaagtacagaatgcagaacaggtagtagtcatcttataagtacatcttcttggcgagatggacaaaaattagtaaagaagattctgggacctgctcccagaatggagccaaaagagcaaagaacagcatcaagtgacagaggtggaagagaaagaactgctaaatctgggggtcacattggaagagcagaatctgatcccaggttggacgttttacatagacatcttcaaagaaactcagaacgttcgagaagtaaatctcggtctgaaaataatataaagaaactagcttcatctcttccagataataagcaggaggaaaatactgccttaaataaggactttttacctattgaaattcgtggcattcttgatgacctacagctggattctacagctcacactgcaaagcaagatactgtagagttacagaaccagaagtcatcagcaccagtacatgctcctaggagtcacagcccagtaaaaagaaaacctgacaaaataacagctaatgaagatccccctgttatttccaaaaggcgccactatgacacagatgaggtacgacagtacattgttaggcagcaggaggaaaggaagagaaagcaaaatgaagagaagaaggctcaaaaggaggctacagaacagaaaaacaaacgattacaagagctctaccggaagcagaaggaagcctttactaaagtaaaaaatgtccctccttctgagccatcagcaactaggcgactacaggaaacttactccaaattgctactagaaaagaccttgcttgaagagccatctcatcaacatgttacgcaggaaacacaggccaaaccagggtatcagccatctggagaatctgacaaagaaaacaaagtacaggaacgtcccccaagtgcatcttccagtagtgacatgtctctctcagaacctccacagcctcttgcaagaaaagacttgatggaatctacatggatgcagcctgaaagattgagcccacaagttcaccattctcaaccacagccttttgctggaacagctggaagtttactctcccatctcttgagtttagagcatgtaggaattttgcataaggattttgaatctattttaccaaccaggaagaatcataatatggcttcaaggccattaacttttacacctcaaccatatgtgacctcaccagctgcttatacagatgccttgttaaaacctagtgccagccaatataagagtaaactggatcgtattgaagccttgaaagcaacagctgcttctttgtccagcagaattgaaagtgaagccaagaaattagctggggccagcattaactatgggtcagcatggaacactgagtatgatgtgcagcaggcacctcaagaagatggaccttggaccaaggctgtaactccacctgtgaaagatgataatgaagatgttttctctgccagaattcagaagatgctgggaagctgtgtatctcatgcaacttttgatgatgatcttcctggtgtaggcaatcttagtgaatttaaaaagcttcctgagatgataagaccacagagtgccatatcaagctttagagtgagatcccctggtcccaaaccagaagggctactggcacagttatgtaaaaggcagactgactcttctagctctgatatgcaagcctgttctcaagacaaagccaaaatatctcttggttccagcatagattcagtcagtgaagggcctcttcttagtgaggggagtctctctgaagaagagggagaccaggatggacagccccttttgaaagtagcagaaattttaaaagaaaaggaattttgtcctggagaaagaaatagttatgaacccatcaaagagtttcagaaagaagctgaaaaattcttgccactttttgggcacataggtggtacacaaagcaaaggaccatgggaagaattggcaaagggaagtccacatagcgtcattaatatttttacaaaatcctatcagttatatggaaaagggtttgaagacaagttggacagaggaacatcaacatcacggcctttgaatgccaccgcaactcctctaagtggtgtttcatatgaagatgattttgtctcctctccagggactgggacttcgacagaaaaaaaatcaactcttgaacctcatagcactttaagccctcaggaggaccattctaacagaaagtctgcctatgatccttcctctgtggatgttacctcccagcattcatcaggagcccagtctgctgcatcgtctcgttcatctacttcttctaaaggaaagaaaggaaaaaaggaaaagacagaatggttggattcattcactggaaatgttcagaactcacttcttgatgaggaaaaagcagaacgtggctcccatcaaggaaagaaatctgggaccagcagcaaactttctgttaaagattttgagcagactcttgatacagatagcactttggaggatctttctggacattctgtgagtgtctcatcagataagggaagatctcagaaaactccaacttctcccctgtcaccaagttcccagaaatcattgcagtttgacgttgcaggaacttcttcagaaagatctaagtcgtcagtaatgcctccaactataacaggatttaagcctaatgcacctctcactgatctgaacccggcagccagcagaacaacgacagagaacatggctccaataccaggttctaagcgcttttctcctgctggcctccatcatcgtatggcagcagaactcagttatctgaacgccattgaggagtcggtgcgccaactgtcagatgtagaaagagttagaggcatttcacttgctcagcaggagagtgtgtctctagctcagataataaaggcacaacagcaacgccatgaaagagacttggccctcttgaaactaaaggctgaacaagaggctctggagagtcagagacaattagaagaaacccgaaacaaagcagctcaggtccatgcagaatcattacagcaggtggttcaatcacaacgggaagtaactgaagtcctgcaggaagcaacgtgtaaaatagcagctcagcagtcagaaactgctcgcctcaccacagacgcagcacgtcaaatctgtgagatggcagagttgactagaactcatatctcagatgctgtcgtggcttcaggagctccccttgcaatactgtatgaccaccaacggcagcaccttccagactttgtgaaacagctgaggaccagaactgaaacagataggaaaagtccatctgtttcactctctcagagtaaagaagggacccttgactcaaagcatcagaagtattctgcttcatatgatagttattctgagtcttcaggatacaagaatcatgatagaagaagtagcagtggtagcagccgccaagaaagtccttcagttccatcttgtaaggaaaatgagaagaaacttaatggtgaaaagatagagagttccattgatgaacaggttcagactgctgcagatgattctctacgaagtgatagtgttccatctcttcctgatgaaaaagactcaacgtctattgcaacagaatattctctgaaatttgatgaatccatgacagaagatgaaatagaagaacaatcatttcgatcattactaccttcagagagtcaccgcagatttaacatggaaaagagaagaggtcatcatgatgactctgatgaagaagcttctccagaaaaaactacactgtctactgccaaggaactgaacatgccattctcaggaggacaagatagcttttctaaatttactatggagatggttcgacagtatatgaaagaggaagaaatgagggcagctcaccagtcttcactcctgcgtctccgtgaaaaggccttgaaggagaagactaaggctgaattggcctggttagagcatcaaaaaaaacatctacgagacaaaggagaggatgataaaatgcccccgctccggaagaaacagcgtggtttgcttttaaggttgcagcaagaaaaggcagaaataaaacgtcttcaagaagccaataaggcagctcggaaggaaagacagctgattcttaaacagcaggaggagatagaaaagatccgacagaccaccataaaactacaggagaaattgaagtctgcaggggagagtaaattggactctcatagtgatgatgatacaaaggataataaggcaaccagtcctggtccaactgacttggagacccgcagtccttctcccatttcaatctccagcagtgaaactagcagcattatgcagaaactgaagaaaatgagaagccgcatggatgaaaagtttctgacaaagcgggagcaaaaattaatgcaacggcgacaacatgcagaggagctcctagagtggaagcgacgtttagatgcagaagaagcagaaattcgtcaaatggaaaaacaagctttggctgcctgggacaaagaattaataaaacccaaaactcctaagaaagaactggaggaccagagaacagaacagaaagaaatagcaagtgaagaggaatctccagtacctctgtactctcatctaaacagtgaaagctccattccagaagaattaggcagccctgctgttgaatatgtaccatccgagtctataggacaggagcagccagggagtccagatcacagtatacttactgaagaaatgatttgttcacaggaactagaatcttctacctctcctagtaaacattcacttcccaaaagctgcacatctgtgtcaaagcaggagtctagcaaaggaagtcataggactggaggacaatgtcacctgcctatcaagtcccatcagcactgttatagttggtcagatgagtcattatctatgacacagtcagaaactacatctgaccagagtgatattgaaggtaggatcagagctctgaaggatgagttgcggaaaagaaaatcagttgtgaaccagctgaagaaggaacagaaaaaaaggcaaaaggaaagactgaaagcccaagaagccagtctgatcaagcagttagagtcatatgatgaatttattaagaaaactgaagccgagcttagccaagatttggaaacatcaccaacagccaagcctcagattaaaacgctctcctcagcttctgaaaaacccaagatcaaacccctcacaccactacacagatctgaaacggcaaagaattggaaatcactaacagagtcagaacgttccagaggatccctggagtctattgctgaacatgttgatgcttcactgtctggttctgagagatcagtatcagaaaggtctttatctgcatatgcaaagagagtaaatgaatgggacagtcgaacagaagattttcagaccccatctccagttctcagatcatcaaggaaaatcagagaagaatctggagattctctagaaaatgtacctgcattacatcttctcaaagaattaaatgccactagtagaattcttgatatgtcagatggcaaggttggagaatctagtaaaaaatcagaaataaaagaaatagagtatacaaaattgaagaagagtaagattgaagatgccttttctaaagaaggtaaatctgatgtcttactgaaattagtcctagaacagggagattcatctgaaattctttcaaagaaagatcttcctttagattctgaaaatgttcagaaagacctagttggattagctattgaaaatctccataaaagtgaggaaatgttgaaagagagacagtcagatcaagatatgaatcatagtccaaacatccaatcaggaaaagacattcacgaacaaaagaacacaaaggaaaaagatttgtcttggtcagaacatctttttgctcctaaagagataccatactctgaagattttgaagtgtcttctttcaagaaagaaatttcagctgaattgtacaaagatgattttgaggtgtcatctttgctgtcactcaggaaagactctcagtcttgcagagataagccacagccaatgaggagctctacaagtggagccactagctttggtagtaatgaggaaatcagtgagtgcctaagtgagaaaagcctttctatccatagcaatgttcattctgacaggctgttggaactcaagtcccctactgagctgatgaaaagtaaggagcgcagtgatgtggagcatgaacagcaagttactgaatccccttccttggcttcagttcctactgcagacgagttatttgatttccacattggtgatagggtgttgattggaaatgttcagccaggaattcttcgattcaaaggtgagactagttttgctaaaggattttgggccggagtggagttagataaacctgaaggaaataacaatggaacatatgatggtattgcatattttgagtgcaaagaaaagcatggtatttttgctcctcctcaaaaaatatctcacattccagaaaactttgatgactatgtagacattaatgaagatgaagactgttactcagatgaacgatatcagtgctataatcaagagcaaaatgatacagagggtccaaaagacagagaaaaggatgtcagtgaatatttttatgagaaatccctacctagtgtgaatgatatagaagcctcagttaatagaagtagaagccttaaaatagaaacagacaatgtacaggacatttctggggtacttgaagcccatgttcaccagcagtcttcagtggattcacagatttcttcaaaggaaaacaaagacctcatttctgatgccacagaaaaggtttccatcgctgcagaagatgacactttagacaataccttttccgaagaattggagaagcaacagcagtttacagaagaggaagacaacctatatgctgaagcttcagaaaagctttgtacaccacttctggatcttttaacaagagaaaaaaaccaactggaagcccagctgaagtcatcactaaatgaggaaaaaaagtcaaaacaacaactggaaaaaatcagcttactgacagacagtttactaaaagtctttgtaaaggacacagtcaatcaactacaacaaatcaaaaaaaccagggatgagaaaatccagcttagcaatcaggagcttcttggtgatgaccaaaagaaagtaacaccccaagacctatcccaaaatgttgaggaacagtcgccaagtatttcaggttgcttcttaagttctgaattggaagatgaaaaagaagagatttcctctccagatatgtgtcccagaccggagagcccagtatttggtgccagtgggcaggaagaacttgctaagagacttgctgaacttgaactcagccgggagttcctgagcgcgttaggagatgatcaagactggtttgatgaagactttggtttgagctcttctcacaagatccaaaaaaataaggcagaagaaaccattgtacctctaatggcagaacctaaaagagtaacccaacaaccatgtgaaacattattggcagtcccccatactgcagaagaagtagagattcttgtacataatgcagcagaagaactttggaaatggaaagaattaggccacgatcttcatagcatcagtattcctacaaaactgcttggctgtgccagtaaaggtctagatatagaaagcactagtaaaagggtctacaaacaggcggtttttgatttaacaaaagagatttttgaggaaatatttgctgaggatcccaacttaaatcaacctgtctggatgaagccatgtagaatcaactctagttatttccgacgagtgaaaaatccaaataaccttgatgaaatcaagagcttcatagcaagtgaagtactcaagttgttcagtcttaaaaaggagccaaaccacaaaacagattggcagaaaatgatgaaatttggaagaaagaaaagagaccgagtggatcatatcctggttcaggagctccatgaggaggaggcacagtgggtgaactatgatgaggatgagttgtgtgtgaaaatgcagctagccgacgggatctttgagaccctgatcaaagatactattgatgttctgaatcagatcagtgaaaagcaggggagaatgctacttgtgtgacatcttgcaaataaatcgaacgctgagtgctaatgtgagtcctgggcctttctgcctcctgatgtacacccatcgccatcatagcaagagtgcttctggaccttgtacttattcttaaagactaccagtatggagttcataggacaatgtggtacacctggtattacagcctttgcctttcgagactatccactggattaatgggttattttcagtgggcagggttgcacagtgtaatcctacaccttttgctaacacccctactaggtcccagagggccagaaacacctgacttacctctgagtttagactagggtatcacttctttgagtctgaagtcaagtgagagaggtatagataaatgcatcacatcacttttgaaatgtaattctggtctataccatggaagtcataaatggacattatagtctctaaacagtattaaacccttaaccacttctaaaataggcaagctcaataatgtctgccaacttcacattctggagtttatttcatttctttttgaagaccattttcttccattattgtagttgagcagcaccaagtggactgtcaggctaacaggaataagtggtagccttgctttctgagcaccatctaaagaattttaaacctctgcattatgtttagtgttctctgtgtgggcatgaaaacaaagaaatgcccctactgaagactgggctcaaaggaccaatgcagggctggttcttttaccccttggtttactcctgcacttgtcttactcattctgaatctctaccagctgctcccagaatcacagatactcaggaccatctcaggcatccaggcatggcaaagtggaaataattcattttggcctgcaaaccttcaactcccatctttccccaagaagtcagagatgctgttacttgaatgatttaggaaatgagtgtgtgcaccaaagacaaaaagatattgtctattgtttgtgtgcttgttttgcgctatggaacattttttaatttattttaagataaattattaagttgaaaatgtgtgtccctattcagaagtgaaagattcatcttgtaatagttaaacctccatcttgaagcttctatggttcatagtctttgcacaggaacctgtggttttaacaaaccaatacacatattgaagaagtcattttaattcagtgaaacgaagatgggcttttccagatcacctgcaatagcagcagtgggataaaatgatttaaaaacactgtacaatttaactctgcctctcttgcagcattgcttctcacaactattacctgcatctgaaaaaaaatctatagactccagctgctacattagagcataagagatgctctcctgggacctcagtaccctgccttcttgactggtttccgttcatcagtcctgtccctcttcaagtaatctagaagaatgtggatactcttaggcgtgaatgtaaatgccttaatattgaaggtcctggttagaagcatgatacaagacatctactggattcatatttacaaatatcctggaatgttatagcttcaaagtatattagaaaaaccccaaagatggtataatctttaagtgtgcacgttcgtttatttctgcatcttccctccaaacttgcctttgcatcttaaatatttcactatgcacactcccattcctcttgggtttcatcttgtcgtttaagaaatgtactgaaataatcattggaatatttgcattttgcacaatgactggtatgatagctcttgacaaataaggaaagcactgaaatgttgtgattgggtctcgggaaatgctcagattgatgtcttaccagcatttcttctgggcttgtgatgttgagctgtagtcttgtagccataatgagcaaattgactaagagaagcaaaggtttcttggggttattaaccagtagtgtggaaatactagttttatgtggccaaggaaaagcaaaggcttttcttttcagtttgtgttatttggaagacagaaaaacatcttgtctacatcctttggctgtttgtaggatcacgttgtccttacgatactgaaactttacagctgctgtaaattttttataaatgaatttcaaaatgttataatgggactgtaggttgtttttctacatcttcattatttggacctaaaaccagtttttaataagaaagtttatctttactctttctgaaattatgactccagaaaaagaaaaaaaaaatacaagtcatggaatcagcaatctggtaagaaatgctgccaagaatgtggcagtagctgtcctgacagactccaactgtctttactatctgaagaatcctaggctccacatgagaggcagaaatggatcagtcttattcttttctagaaatggttatctgtagtttggtagcaaaaaaaaagaaaaaagaatccataattagcagatttcttattaactatttggatctaattgaaatggctttattcttaggattaagaaagatagatgtggatacccagccactcgttccatattggtatctttttaaatcagctctgcctcttaatcaagaacctaaatattccctctttctaatctttgttccttctccctacaccctcatcctctttcactcttccttcataattcctctaagaaaaatatctttgcatcagcagtaatatcttttagaatagcactatcagaatttagcagtaaaccaacatacaggcttcagatttacttctgagtccaaaacaatttgtgctatccagggtagttaactctgggttaaacaagtacagggtatagattccctcttcaggtctacacaggaatttttaccatagggaaaagtggggagagctcaaacgtagttaataaggaaggtaatttgtttttcttttacctaaaagaaaagaaaattccttctgtgactacaggtctctgagaaattatctttcaaaagagatttcattgctcataagagtgttgtggcctattgataaaaacaattttgttcagtttcttgtcttgaaaaaaaagtggccttagctttttgcaatacttgaataaagtgtgtactcgcaaaagaatttctgtagcacagcattagagactcataacttttctgcaagaaatacaaacttacatcttccttttactaccttaagaatactagtgaataaaacattaattcaaagagcaaattatagaaactacaatgacatttaatgcaaattgtaggaatttacatgtttacaaatcatcttcaactggttgtgcagcaattcaataaaatatctttgtattataaaaatgtgaagaaaaaatgtaaactgatgtaaaggaggtactgtcattttaattaacctatgtttaatagcttttccttctggactttgcaaagccttcttggcaaacacattgcaaagcattctctgggaggttcagcctccttgtgtgtactgtactgtgcagacatgaaaaaataaacccgtttactgtgtgcgtgtaaatagcctggtcatcaggccattttcagccaatagtcacatccagtgcaattttgcaccgaacacttaagggtgtggtttgtaagtacgatctgtaaaataactgggatgaattcccatgtatacctgtgtaaatagatttgttaactgaaatatactttaagaaagataaaatctgtaaataaactgatttataaattaatttcaaaaaaaaaaaaaaaaaa

SEQ ID NO: 213 - DNA, 2642 bp, HOMO SAPIENS
actttcaaaatggcggagtgtggagcgagcggcagcgggagcagcggggacagtctggacaagagcatcacgctgccccccgacgagatcttccgcaacctggagaacgccaagcgcttcgccatcgacataggcgggtcgttaaccaagctggcctactattcaacggtacagcacaaagtcgccaaggtgcggtctttcgaccactccggaaaggacacagaacgtgaacatgagccgccctatgagatttcagttcaagaagagatcactgctcgactgcacttcattaagtttgagaatacctacatcgaagcctgcctggacttcatcaaagaccatctcgtcaacacagagaccaaggtcatccaggcgaccgggggcggggcctacaagttcaaggacctcatcgaagagaagctgcggctgaaagtcgacaaggaggacgtgatgacgtgcctgattaaggggtgcaacttcgtgctcaagaacatcccccatgaggccttcgtgtaccagaaggattccgaccctgagttccggttccagaccaaccacccccacattttcccctatcttcttgtcaatatcggctctggagtctccatcgtgaaggtggagacggaggacaggttcgagtgggtcggcggcagctccattggaggcggcaccttctgggggcttggcgctctgctcaccaaaacgaagaagtttgacgagctcctgcacctggcctcgaggggccagcacagcaatgtggacatgctggtgcgggacgtctacggcggcgcccaccagactctcgggctgagcgggaacctcatcgccagcagcttcgggaagtcggccaccgccgaccaagagttctccaaagaagacatggcgaagagcctgctgcacatgatcagcaacgacattgggcagctggcctgcctccacgcacggctgcacagcctggaccgcgtgtactttggaggcttctttatccggggccaccccgtgaccatgcgcaccatcacctatagcatcaacttcttctccaagggggaagtgcaggcgctgtttctgaggcacgaaggctacctgggagccatcggagcgttcctgaaaggagctgagcaggacaatcctaaccagtacagctggggagagaactatgcaggcagctccgggctgatgagtgcatcacccgagctcggcccggcgcagcgggcgcggagtggcacttttgacttgctggaaatggaccggctggagaggccactggttgacctgccgctcctcctggacccgccctcctacgtgcccgacacggtggacctcaccgatgacgctctggcccgaaaatactggctcacctgctttgaggaggccctggacggggtagtgaagcgcgcagtggcgagccagccagactctgtggatgcagccgagagggcggagaagttccggcagaagtactggaacaagcttcagaccctgaggcagcagcccttcgcctatgggaccctgaccgtgcgcagcctgctggacaccagggagcactgtctgaacgagttcaacttcccggatccctactccaaagtgaagcagcgggagaatggcgtggcgctgaggtgcttccccggggtcgtgcgctccctggacgcgctgggctgggaggaacggcagctggcgctggtgaaaggcctcctggcggggaatgtcttcgactggggggccaaagccgtgtctgctgtccttgaatccgacccctactttgggtttgaagaagcaaagaggaagttacaagaaagaccctggctcgtggattcctacagcgagtggcttcagagattaaaggggccccctcataaatgtgccttaattttcgcagataacagtggaatagacatcattttgggagtcttcccctttgtcagggagctactccttagagggacagaggtcatcctggcgtgcaactcaggccccgccctgaacgacgtgacccacagcgagtccctcatcgtggcagagcgtattgcgggcatggaccctgtcgtgcactctgcgctccaggaagagaggctgctgctggtgcagacgggctccagctccccgtgcctcgacctcagccgcctggataaggggctggccgcactggtgcgggagcgtggcgcggatctggtggtcatcgagggcatgggccgtgctgtccacacaaactaccacgcagccctgcgctgcgagagcctcaagctggccgtcatcaagaacgcgtggctggccgagcggctgggcggccggctcttcagcgtcatcttcaagtacgaggtcccagccgagtgaggcgctgcagctgccggactcttctgcttgtcacttgtcaggaatgtgtttttaccaccacagggaaactgcgttcaaatcaacgtatttatatggtactgctgtgacgcggcacatacaccccagccgcacagatgcgtgtgacccagaggcgagacgcagctttgtcctgggagacgttcatattggaatctatttaactgctaaagaaccttttatatatatatatatataaatagagagatctatacaggtatgtctgacgggacgcagcaccgtgggcacgcaccaaatagagtttttaaaagagg

SEQ ID NO: 214 - DNA, 3568 bp, HOMO SAPIENS
aatttacatccattcatgaatctgtgacgtcagcaagcctttgggctcctttgcggtgggctggaggattgtgtgggtggaatccccctcccctttatttttccaattctgcaaggcttttaaaattcaccttacatcttttcaaagcaagaaaatggaacagcatgtgtaggaattcttcgttgttgttttggagccctctcttaagtcagaactctgtcccaaaaatcttctgagtgtcatctcaggactttggttatactcatggcacgatggccaactttcaggagcacctgagctgctcctcttctccacacttacccttcagtgaaagcaaaaccttcaatggactacaagatgagctcacagctatggggaaccacccttctcccaagctgctcgaggaccagcaggaaaaggggatggtacgaacagagctaatcgagagcgtgcacagccccgtcaccacaacagtgttgacgagcgtaagtgaggattccagggaccagtttgagaacagcgttcttcagctaagggaacacgatgaatcagagacggcggtgtctcaggggaacagcaacacggtggacggagagagcacaagcggaactgaagacataaagattcagttcagcaggtcaggcagtggcagtggtgggtttcttgaaggactatttggatgcttaaggcctgtatggaatatcattgggaaggcatattccactgattacaaattgcagcagcaagatacttgggaagtgccatttgaggagatctcagagctgcagtggctgggtagtggagcccaaggagcggtcttcttgggcaagttccgggcggaagaggtggccatcaagaaagtgagagaacagaatgagacggatatcaagcatttgaggaagttgaagcaccctaacatcatcgcattcaagggtgtttgtactcaggccccatgttattgtattatcatggaatactgtgcccatggacaactctacgaggtcttacgagctggcaggaagatcacacctcgattgctagtagactggtccacaggaattgcaagtggaatgaattatttgcacctccataaaattattcatcgtgatctcaaatcacctaatgttttagtgacccacacagatgcggtaaaaatttcagattttggtacatctaaggaactcagtgacaaaagtaccaagatgtcatttgctggcacggtcgcatggatggcgccagaggtgatacggaatgaacctgtctctgaaaaagttgatatatggtcttttggagtggtgctttgggagctgctgacaggagagatcccttacaaagatgtagattcttcagccattatctggggtgttggaagcaacagcctccaccttccagttccttccacttgccctgatggattcaaaatccttatgaaacagacgtggcagagtaaacctcgaaaccgaccttcttttcggcagacactcatgcatttagacattgcctctgcagatgtacttgccaccccacaagaaacttacttcaagtctcaggctgaatggagagaagaagtgaaaaaacattttgagaagatcaaaagtgaaggaacttgtatacaccggttagatgaagaactgattcgaaggcgcagagaagagctcaggcatgcgctggatattcgtgaacactatgagcggaagcttgagcgggcgaataatttatacatggaattgagtgccatcatgctgcagctagaaatgcgggagaaggagctcattaagcgtgagcaagcagtggaaaagaagtatcctgggacctacaaacgacaccctgttcgtcctatcatccatcccaatgccatggagaaactcatgaaaaggaaaggagtgcctcacaaatctgggatgcagaccaaacggccagacttgttgagatcagaagggatccccaccacagaagtggctcccactgcatcccctttgtccggaagtcccaaaatgtccacttctagcagcaagagccgatatcgaagcaaaccacgccaccgccgagggaatagcagaggcagccatagtgactttgccgcaatcttgaaaaaccagccagcccaggaaaattcaccccatcccacttacctgcaccaagctcaatcccaatacccttctcttcatcaccataattctctgcagcagcaataccagcagccccctcctgccatgtcccagagtcaccatcccagactcaatatgcacggacaggacatagcaacctgcgccaacaacctgaggtatttcggcccagcagcagccctgcggagcccactcagcaaccatgctcagagacagctgcccggctcgagccctgacctcatctccacagccatggctgcagactgctggagaagttctgagcctgacaagggccaagctggtccctggggctgttgccaggctgacgcttatgacccctgccttcagtgcaggccagaacagtatgggtccttagacataccctctgctgagccagtggggaggagccctgacctttccaagtcaccagcacataatcctctcttggaaaacgcccagagttctgagaaaacggaagaaaatgaattcagcggctgtaggtctgagtcatccctcggcacctctcatctcggcacccctccagcgctacctcgaaaaacaaggcctctgcagaagagtggagatgactcctcagaagaggaagaaggggaagtagatagtgaagttgaatttccacgaagacagaggccccatcgctgtatcagcagctgccagtcatattcaacctttagctctgagaatttctctgtgtctgatggagaagagggaaataccagtgaccactcaaacagtcctgatgagttagctgataaacttgaagaccgcttggcagagaagctagacgacctgctgtcccagacgccagagattcccattgacatatcctcacactcggatgggctctctgacaaggagtgtgccgtgcgccgtgtgaagactcagatgtctctgggcaagctgtgtgtggaggaacgtggctatgagaaccccatgcagtttgaagaatcggactgtgactcttcagatggggagtgttctgatgccacagttaggaccaataaacactacagctctgctacctggtaatgaaggaatacacatcctgaagatctcgtgactatactggcatttcagatccaccccacccccagactcatcccactctctcccagcattttgtctgggaagagagactaccccatctttaccaccccctagaaatgagctgcaataacaggaacatgagacttcgcaaatctctggaaaataatatccaaatgaaattaagtctcactgaacatttcaatcaagaatggcagggatctattttattgaatattctagctactgtaacattgatatttatttttgtttgacattttaacactttgtactgcaaagagtgaactatatatgagatagagagacaataatttcttgcaaaaaaaaaaagagataaaagaaagaacaaaaaaaaaaaa

SEQ ID NO: 215 - DNA, 2583 bp, HOMO SAPIENS
gcatgcgcgctcgcgctcccgccctctagctgcgctcggctgagtcagtcagtctgtcggagtctgtcctcggagcaggcggagtaaagggacttgagcgagccagttgccggattattctatttcccctccctctctcccgccccgtatctcttttcacccttctcccaccctcgctcgcgtagccatggcggagccgtcggcggccactcagtcccattccatctcctcgtcgtccttcggagccgagccgtccgcgcccggcggcggcgggagcccaggagcctgccccgccctggggacgaagagctgcagctcctcctgtgcggtgcacgatctgattttctggagagatgtgaagaagactgggtttgtctttggcaccacgctgatcatgctgctttccctggcagctttcagtgtcatcagtgtggtttcttacctcatcctggctcttctctctgtcaccatcagcttcaggatctacaagtccgtcatccaagctgtacagaagtcagaagaaggccatccattcaaagcctacctggacgtagacattactctgtcctcagaagctttccataattacatgaatgctgccatggtgcacatcaacagggccctgaaactcattattcgtctctttctggtagaagatctggttgactccttgaagctggctgtcttcatgtggctgatgacctatgttggtgctgtttttaacggaatcacccttctaattcttgctgaactgctcattttcagtgtcccgattgtctatgagaagtacaagacccagattgatcactatgttggcatcgcccgagatcagaccaagtcaattgttgaaaagatccaagcaaaactccctggaatcgccaaaaaaaaggcagaataagtacatggaaaccagaaatgcaacagttactaaaacaccatttaatagttataacgtcgttacttgtactatgaaggaaaatactcagtgtcagcttgagcctgcattccaagctttttttttaatttggtgttttctcccatcctttccctttaaccctcagtatcaagcacaaaaattgatggactgataaaagaactatcttagaactcagaagaagaaagaatcaaattcataggataagtcaataccttaatggtggtagagcctttacctgtagcttgaaaggggaaagattggaggtaagagagaaaatgaaagaacacctctgggtccttctgtccagttttcagcactagtcttactcagctatccattatagttttgcccttaagaagtcatgattaacttatgaaaaaattatttggggacaggagtgtgataccttccttggtttttttttgcagccctcaaatcctatcttcctgccccacaatgtgagcagctacccctgatactccttttctttaatgatttaactatcaacttgataaataacttataggtgatagtgataattcctgattccaagaatgccatctgataaaaaagaatagaaatggaaagtgggactgagagggagtcagcaggcatgctgcggtggcggtcactccctctgccactatccccagggaaggaaaggctccgccatttgggaaagtggtttctacgtcactggacaccggttctgagcattagtttgagaactcgttcccgaatgtgctttcctccctctcccctgcccacctcaagtttaataaataaggttgtacttttcttactataaaataaatgtctgtaactgctgtgcactgctgtaaacttgttagagaaaaaaataacctgcatgtgggctcctcagttattgagtttttgtgatcctatctcagtctgggggggaacattctcaagaggtgaaatacagaaagcctttttttcttgatcttttcccgagattcaaatctccgattcccatttgggggcaagtttttttcttcaccttcaatatgagaattcagcgaacttgaaagaaaaatcatctgtgagttccttcaggttctcactcatagtcatgatccttcagagggaatatgcactggcgagtttaaagtaagggctatgatatttgatggtcccaaagtacggcagctgcaaaaagtagtggaaggaaattgtctacgtgtcttggaaaaattagttaggaatttggatgggtaaaaggtacccttgccttactccatcttattttcttagccccctttgagtgttttaactggtttcatgtcctagtaggaagtgcattctccatcctcatcctctgccctcccaggaagtcagtgattgtctttttgggcttcccctccaaaggaccttctgcagtggaagtgccacatccagttcttttcttttgttgctgctgtgtttagataattgaagagatctttgtgccacacaggatttttttttttttttaagaaaaacctatagatgaaaaattactaatgaaactgtgtgtacgtgtctgtgcgtgcaacataaaaatacagtagcacctaaggagcttgaatcttggttcctgtaaaatttcaaattgatgtggtattaataaaaaaaaaaaaaaaaca

SEQ ID NO: 216 - DNA, 2995 bp, HOMO SAPIENS
acttccggcttcgctgctcttggttctggttctggaggctgggttgagaggtcgccggtccgactgtcctcggcggttggtcagtgtgaatttgtgacagctgcagttgctccccgcccccgagcagccgaggtgcgtgggggaaggggaagaaggaaaaggtccgggtcgcgtttccgctcagtttttgccagggttgaggcgattccagagagcggcggaaaggataagcctcgacttagaagctaccgagttaccctaagaaaggagtctaccatggctcaagaatctcccaaaaattcagcagcagaaattccagtgactagtaatggagaagttgatgactctcgtgaacatagctttaatagggatttgaagcattcattaccatctggacttggtctctcagaaacccaaattacatctcatggctttgacaataccaaagagggtgttattgaagcaggagcatttcaaggtggccagagaacacagacaaaaagtggaccagttattctagcagatgaaattaaaaatcctgcaatggaaaagttagaacttgttagaaaatggagtctaaacacctataagtgtactcgacagattatctctgagaagctaggccgtggctcaagaactgtggaccttgaacttgaagctcagattgatatattaagggataacaagaaaaaatatgaaaatattttaaaactggctcaaacattgtcgacccagcttttccagatggtacatacccaaaggcaacttggagatgcatttgctgacctgagtttgaagtcactagaacttcatgaagaatttggctataatgccgatacccagaaactgctggctaaaaatggagagactcttcttggggccattaattttttcattgctagtgtgaacactttggtgaataaaaccattgaagatacattaatgactgtgaaacagtatgaaagtgccaggattgaatatgatgcatatcgcactgatttggaagaactgaatcttggaccacgtgacgcaaacactctgccaaagattgagcagtcacagcatctcttccaagcacataaggaaaaatatgataaaatgcgcaatgatgtttctgtcaaattgaaatttctagaagaaaataaggttaaagtattgcacaatcagctggtccttttccacaatgccattgccgcttactttgctgggaatcagaagcagcttgaacagacacttaaacagttccatatcaaattgaaaacccctggagtggatgccccatcttggcttgaagaacagtaaaatcacagcggaaaataaaaagaaagtcgcgttgttatatttctaaaccaacctaacaagaattaagcagagttgggggaagtgggaggggtgacaagcattatagtgattcttgcacaaacagctttaatttttccctttttcatactttaacaattgaactgttaagggtggttttaatgtaaacatagtttctataatctgaacacaataattttcctttttgagaaatccttttgtattgtgagggttgatggctatttctgtagtttgaaaacatctaatagagatttgcactgacaagataaaaattcaaggtttttggtcctggaaatgagggccgattgtaacttttccaaagggaggtttacatgatttgtatcaacatcagatattttatatgtgaatatattaaacatctttaagagattcattttcatgtattaaagaaaaaagaaactattttgcagagtaaagttatatggtgttcctgcagcgtccacacagaggcagcagctctaatgaatgattagcttgtggagttgtggcaaatacctttttaaaaatgaatctgtaccactgtaattttatttagacttttttttaaagacacagaaatcacactgtcatttctgtgaggcttttaagcttatgaatttgcttcacccgaagtcattggacagttacatttgcaatttcttttggttcataacaaaacctgcttaagagaatttttttttttgacaggtggacgtgggaatggaaattcttaatggtttctggagtagaaatctgtacttagaaaactagtttttgggtcagttccattttgatagaagtgaatacatagacagcttttattgacttccatatgtaacaataccgtttaagccttaaatcacagatatgtgccttctcagatacagtaattcttgttcaaccaatgtacaaaatccataaagaaacccctgttggataatgtttgatgtgtctattccttccatggaatggagcactatgtatgaatgttgggtttctttgtacttgttaagccacatttgaggtttatggtaaaaatcatcttttgagtttgctctttggtttttcttcattccttttgaggattgggaaaacagaaagattctttgatttgggtaatgaagaggtaatttgggacagtgtggtggtaccaggaagaaagaggattggaaaggccagtactgttttagttgctcggcactgttggttttgttttaatgtggttgccctgtccactacatggttctatcagtagtgtaatccattttcaatgtaaagctcttttagtttttgtcatagacataaattaatattttgagaggcatccctcacctgttcatttcttctgtgttgaaatgaagtacttaaaattaccgttatacatgaactttgtggactgtaagatttgttatatatgttcaaatgccttttagctggctttttaattaatatgcctgttttgagtgcttaatacaatgtaatgtgattgtaaatcatacctattttaaatcattccttcctgtatatttgtactcagagagccttattttattcttccagcagaattactacttgtgatagttcatttacattccccagaatgtgcctctagtgtgaattttgtattcttattaaacgtgtttgctgcagtaaa

SEQ ID NO: 217 - DNA, 2449 bp, HOMO SAPIENS
agtgtggccgcttttccgacagaggcctgcccgtgattggctgctcgtactatttacgtcctttcgatgttgcgtcatgcagtgcgccggaggaactgtgctctttgaggccgacgctaggggcccggaagggaaactgcgaggcgaaggtgaccggggaccgagcatttcagatctgctcggtagacctggtgcaccaccaccatgttggctgcaaggctggtgtgtctccggacactaccttctagggttttccacccagctttcaccaaggcctcccctgttgtgaagaattccatcacgaagaatcaatggctgttaacacctagcagggaatatgccaccaaaacaagaattgggatccggcgtgggagaactggccaagaactcaaagaggcagcattggaaccatcgatggaaaaaatatttaaaattgatcagatgggaagatggtttgttgctggaggggctgctgttggtcttggagcattgtgctactatggcttgggactgtctaatgagattggagctattgaaaaggctgtaatttggcctcagtatgtcaaggatagaattcattccacctatatgtacttagcagggagtattggtttaacagctttgtctgccatagcaatcagcagaacgcctgttctcatgaacttcatgatgagaggctcttgggtgacaattggtgtgacctttgcagccatggttggagctggaatgctggtacgatcaataccatatgaccagagcccaggcccaaagcatcttgcttggttgctacattctggtgtgatgggtgcagtggtggctcctctgacaatattagggggtcctcttctcatcagagctgcatggtacacagctggcattgtgggaggcctctccactgtggccatgtgtgcgcccagtgaaaagtttctgaacatgggtgcacccctgggagtgggcctgggtctcgtctttgtgtcctcattgggatctatgtttcttccacctaccaccgtggctggtgccactctttactcagtggcaatgtacggtggattagttcttttcagcatgttccttctgtatgatacccagaaagtaatcaagcgtgcagaagtatcaccaatgtatggagttcaaaaatatgatcccattaactcgatgctgagtatctacatggatacattaaatatatttatgcgagttgcaactatgctggcaactggaggcaacagaaagaaatgaagtgactcagcttctggcttctctgctacatcaaatatcttgtttaatggggcagatatgcattaaatagtttgtacaagcagctttcgttgaagtttagaagataagaaacatgtcatcatatttaaatgttccggtaatgtgatgcctcaggtctgcctttttttctggagaataaatgcagtaatcctctcccaaataagcacacacattttcaattctcatgtttgagtgattttaaaatgttttggtgaatgtgaaaactaaagtttgtgtcatgagaatgtaagtcttttttctactttaaaatttagtaggttcactgagtaactaaaatttagcaaacctgtgtttgcatatttttttggagtgcagaatattgtaattaatgtcataagtgatttggagctttggtaaagggaccagagagaaggagtcacctgcagtcttttgtttttttaaatacttagaacttagcacttgtgttattgattagtgaggagccagtaagaaacatctgggtatttggaaacaagtggtcattgttacattcatctgctgaacttaacaaaactgttcatcctgaaacaggcacaggtgatgcattctcctgctgttgcttctcagtgctctctttccaatatagatgtggtcatgtttgacttgtacagaatgttaatcatacagagaatccttgatggaattatatatgtgtgttttacttttgaatgttacaaaaggaaataactttaaaactattctcaagagaaaatattcaaagcatgaaatatgttgctttttccagaatacaaacagtatactcatgattgctaagtgtttttttatttttgcatatttattgaactgtctaattgaatacagcttgctcttgtcacctcttcaagctttcaagcctttatagaaaagcttctttgtggcttacactggaaattatgaaagcagtttttctcctaagacttttggtttctcgcattgcctctcagactaagcactaaaaagcaaagcaaaacagaactagttctgtcttaatgaaatatatcaacccaaaagtgtaatgaggaaaatgcttcattagtttcccctagcagacttttacttctcttacactgctacaccattactttcttgagacatttgtaagttctttgatacagaagagttatatttagaagtctttaatgaaggg

SEQ ID NO: 218 - DNA, 1681 bp, HOMO SAPIENS
gccgtccaagggtccattggttgccatagagatcgtcgagcgctgggcctgtgatcgctgaggggcgagcagttgcgaccctgggctcctggggacctgagcgttatgtctttccgcgacctccgcaatttcacagagatgatgagagccctgggataccctcgacatatttctatggaaaatttccgtacacccaattttggacttgtatctgaagtgcttctctggcttgtgaaaagatatgagccccagactgacatcccgcctgacgtggatactgaacaggaccgagttttcttcattaaggcaattgcccagttcatggccaccaaggcacatataaaactcaacactaagaagctttatcaagcagatgggtatgcggtaaaagagctgctgaagatcacatctgtcctttataatgctatgaagaccaaggggatggagggctctgaaatagtagaggaagatgtcaacaagttcaagtttgatcttggctcaaagattgcagatttgaaggcagccaggcagcttgcgtctgaaatcacctccaaaggagcatctctgtatgacttgctcggcatggaagtagagttgagggaaatgagaacagaagccattgccagacctctggaaataaacgagactgaaaaagtgatgagaattgcaataaaagagattttgacacaggttcagaagactaaagacctgctcaataatgtggcctctgatgaagctaatttagaagccaaaatcgaaaagagaaaattagaactggaaagaaatcggaagcgactagagactctgcagagtgtcaggccatgttttatggatgagtatgagaagactgaggaagaattacaaaagcagtatgacacttatctggagaaatttcaaaatctgacttatctggaacaacagcttgaagaccatcataggatggagcaagaaaggtttgaggaagctaaaaacactctctgcctgatacagaacaagctcaaggaggaagagaagcgcctgctcaagagtggaagtaacgatgactcggacatagacatccaggaggacgatgaatccgacagtgagttggaagaaaggcggctgcccaagccacagacagccatggagatgctcatgcaaggaagacctggcaaacgcattgtgggcacgatgcaaggtggagactccgatgacaatgaggactcggaggagagtgaaattgacatggaagatgatgatgacgaggatgacgatttggaagacgagagcatttctctctcaccaaccaagcccaatcgaagggtccggaaatctgaacccctggatgagagtgacaatgacttctgacccttttgccaagggaccctggcagattaaaaccctcagacttgtaggtaaatgggaacttagaaggttaggaaggtaacccctgttttgtttactaagctggctggactcatgatcactgaagcaatacttatttctgctttagcctcctatgtttgcattccatgaagcttaaataagaattgaagcaaatccctaagatttatttttttccaccttatttatcttctaaaacttgaggaatgcatgtgttcttagtgattcacatccacgggacaaaaactcaagaagaaataagagctgacgccacacaaaaaaaaaaaaaaaaaaaaaa

SEQ ID NO: 219 - DNA, 2693 bp, HOMO SAPIENS
tctctgatcgggcccaccccctggatctagcaccgcctcttccgcgttctcggaggagcgatctgcaggtaggggtgcgcgcgaccgctccccggcgggagccagcgaaggtttccatgtcagaggccgatggagaactgaagattgccacctacgcacaaaggccattgagacacttcgtgtagctggaagacaccaacttcctgacaggagctttatttcatttgggatttcaagtttacagatggtatcttctcaaaagttggaaaaacctatagagatgggcagtagcgaaccccttcccatcgcagatggtgacaggaggaggaagaagaagcggaggggccgggccactgactccttgccaggaaagtttgaagatatgtacaagctgacctctgaattgcttggagagggagcctatgccaaagttcaaggtgccgtgagcctacagaatggcaaagagtatgccgtcaaaatcatcgagaaacaagcagggcacagtcggagtagggtgtttcgagaggtggagacgctgtatcagtgtcagggaaacaagaacattttggagctgattgagttctttgaagatgacacaaggttttacttggtctttgagaaattgcaaggaggttccatcttagcccacatccagaagcaaaagcacttcaatgagcgagaagccagccgagtggtgcgggacgttgctgctgcccttgacttcctgcataccaaaggcattgctcatcgtgatctgaaaccagaaaatatattgtgtgaatctccagaaaaggtgtctccagtgaaaatctgtgactttgacttgggcagtgggatgaaactgaacaactcctgtacccccataaccacaccagagctgaccaccccatgtggctctgcagaatacatggcccctgaggtagtggaggtcttcacggaccaggccacattctacgacaagcgctgtgacctgtggagcctgggcgtggtcctctacatcatgctgagtggctacccacccttcgtgggtcactgcggggccgactgtggctgggaccggggcgaggtctgcagggtgtgccagaacaagctgtttgaaagcatccaggaaggcaagtatgagtttcctgacaaggactgggcacacatctccagtgaagccaaagacctcatctccaagctcctggtgcgagatgcaaagcagagacttagcgccgcccaagttctgcagcacccatgggtgcaggggcaagctccagaaaagggactccccacgccgcaagtcctccagaggaacagcagcacaatggacctgacgctcttcgcagctgaggccatcgcccttaaccgccagctatctcagcacgaagagaacgaactagcagaggagccagaggcactagctgatggcctctgctccatgaagctttcccctccctgcaagtcacgcctggcccggagacgggccctggcccaggcaggccgtggtgaagacaggagcccgcccacagcactctgaaatgctccagtcacaccttataggccctaggcctggccaggcattgtcccctggaaacctgtgtggctaaagtctgctgagcaggcagcagcctctgctctgtggctccattcaggctttttcatctacgaaggccctgaggttcccatcaacccccatttccctagggtcctggaggaaaaagctttttccaaaggggttgtctttgaaaaggaaagcaatcacttctcactttgcataattgcctgcagcaggaacatctcttcactgggctccacctgctcacccgcctgcagatctgggatccagcctgctctcaccgctgtagctgtggcggctggggctgcagcctgcagggagaagcaagaagcatcagttgacagaggctgccgacacgtgcctcttccctctcttctctgtcaccctcctctggcggtccttccaccttcctctgtcctccggatgtcctctttgcccgtcttctcccttggctgagcaaagccatcccctcaattcagggaagggcaaggagccttcctcattcaggaaatcaaatcagtcttccggtctgcagcacggaaaagcacataatctttctttgctgtgactgaaatgtatccctcgtttatcatcccctttgtttgtgattgctgctaaagtcagtagtatcgtttttttaaaaaaaaagtttggtgtttttaaccatgctgttccagcaaagatgataccttaaactcccactgcaagcccatgaacttcccagagagtggaacggcttgctcttctttctagaatgtccatgcacttgggttttaatcagcagttccctattattctgattttaagctgttcctgtgatgaacttagagacagcatcggtgtctgctgctgtgtccccaggtcttgtgtgggtggcacagatctgggcagttagatagtgctctgtgcctaaggtgaagccacactagggtgaagcctcacttccctgtttgagcaatgcagtgcctgctgcccgtgtgcatgaaggtacagccattcagataagtggaactattgagttacataaagaaaatagatttgcatttgtcaggcagacgtttatacaacaccacggtgcttttatacattgtgcttattttaataaaactgaaattctaaaaaaaaaaaaaaaaaa

SEQ ID NO: 220 - DNA, 8715 bp, HOMO SAPIENS
acgtgacctttgctcatggcggcggcggcggcggcggcggtgctggtggtgctcggcggccggagccggatcctgtagccgggtgtgggcccgtgtctgtccgtccctccttcggccccctctcttgtcttccggagtgtggctggcggagctgggatggcggaacgaggcctggagccgtcgccggccgcggtggcggcgctgccgcctgaagtgcgggcgcagctggcggagctggagctggagctctcggagggggacatcacccagaagggctatgaaaagaaaaggtccaaactcctatctccttacagcccgcagacacaagaaactgattcagcagtacagaaagaacttagaaaccagacacctgctccatctgcagctcaaacttctgctccctctaagtaccaccgaactcgatctgggggagccagggatgaacgatatcgatcagatatccacacagaagcagttcaggctgcactggcaaagcataaagaacagaagatggctttgcccatgccaaccaaaaggcgatccacatttgttcagtctcctgcagatgcctgcacacctcctgacacatcttcggcctctgaggatgagggctctctgagacgccaagctgcgctctctgctgccttgcaacagagcttacagaatgctgagtcctggatcaaccgttcaattcagggatcgtccacttcttcatccgcatcttctacgctgtcccacggagaggtcaaaggaaccagtgggtctctagctgatgtatttgccaatactcgaatagagaatttctctgctcctcctgatgtcactacaactacctcttcctcctcatcatcttcctcaattcgcccagcaaacattgacctgcccccctcggggatagttaaaggcatgcacaaaggatccaacaggtccagccttatggatacagctgatggtgttcctgtcagtagcagagtatctacaaaaatccagcagcttctgaacactctgaaacgacccaaaaggcctcccttaaaggaattttttgtggatgactctgaagaaattgtggaagtacctcagccagaccccaaccagcccaagccggagggacggcagatgacccctgtgaaaggagagcctttaggagtcatctgtaactggcctcctgctcttgaatctgccctgcagcgctggggtaccactcaagcaaaatgctcctgtctgactgcactggacatgacagggaaaccagtttacactcttacatatggaaagttgtggagcagaagtttaaagttggcctacacacttcttaataaactggggaccaaaaatgaacctgtgttaaaacctggagacagggtagccctggtttaccccaacaatgatccagtcatgtttatggtggctttctatggatgcctcctggcagaagtgattccagtgcctatagaggtacctcttaccagaaaggatgctggaggtcagcagattggcttcttgctaggaagctgtggtattgccttagctcttaccagtgaagtttgtctaaaaggactgccaaaaacccagaatggagaaattgtacagtttaaaggttggccccggctcaaatgggttgtaacagattccaagtacctttcaaagccaccgaaagactggcagccacacatctcacctgctgggacagaaccggcatacattgagtataaaacaagcaaagaagggagtgtaatgggagttacagtatcccggcttgcaatgttgtctcactgccaagctctgtcgcaggcctgcaattattctgaaggggaaacaatagtaaatgtcttagactttaagaaggatgctgggctgtggcacggcatgtttgcgaatgtaatgaataagatgcacacaatcagcgtaccctactctgttatgaaaacctgtcctctctcttgggtccaaagagtacatgctcacaaagccaaggtagctttagtaaaatgtcgggacttgcactgggctatgatggcacatcgggaccaaagagacgtgagcttgagttccctccgaatgttaattgtgactgatggagctaacccctggtccgtgtcatcctgtgatgccttcctgagtctgttccaaagtcatggactgaagcctgaggccatctgtccgtgcgccacgtctgctgaagccatgactgtagcaatccgcaggcctggagttccaggagcccctttgccaggaagagccattctctcaatgaatggattgagctatggggtaatacgggtcaatactgaagataaaaattcagcactgacggtccaggatgtagggcatgtaatgcctggtgggatgatgtgcattgtgaaaccagatggacctccccagctctgcaaaacagatgaaattggagaaatctgtgttagctccagaactggaggcatgatgtactttgggcttgctggtgtgacaaaaaatacatttgaggtaattccagtgaattctgcaggctctcctgttggggatgtgccattcatccgatcaggattgctggggtttgtagggccgggtagtttggtgttcgtggttgggaaaatggatggcttactgatggttagtggtcgaagacataatgctgatgacattgttgctactggattggctgtagaatcaataaagactgtttatagaggaagaattgctgtgttttctgtgtctgtattttatgatgagcgcattgtggtggttgcggaacaaagacctgatgcttctgaggaagatagtttccagtggatgagccgcgtgctgcaggcgatcgatagcattcatcaagtgggggtttattgtcttgctctggtgccagccaatacattgccaaaaactccactaggaggaatccatatatctcagacgaaacaactctttctggagggatcactgcatccttgcaacatcctcatgtgcccccatacatgtgtgacaaacttgccaaagccccggcaaaaacaaccaggtgtaggccctgcttccgtgatggttgggaatctggttgctggaaaacgtatagcacaagctgctggaagggatctgggacaaatagaagagaatgatttggtgaggaagcaccagtttctggcagagatcctacagtggcgagcccaggcgactcctgaccatgtactcttcatgctgttaaatgccaagggaaccactgtatgcacagccagctgccttcagcttcataagcgagcagagaggattgcatctgttcttggtgataagggacatctaaatgcaggagataatgtggtgttgctctatccacctggcattgagttaatcgccgccttctatggctgcctgtatgcgggctgtatacctgtgaccgtcagacctccacatgctcagaacctcacggccacgctgcccactgtccgaatgattgttgatgtcagcaaagcagcctgtattctcaccagtcagaccctaatgaggctactgaggtcccgagaggcagcagcagctgtggatgtgaaaacctggccaaccatcattgacacagatgatttacccaggaaaaggttacctcagctgtataaaccgcccactcctgagatgttggcatatcttgattttagtgtctccacaactggcatgcttacaggagtgaagatgtcccactctgcagtgaacgctctgtgtcgagccatcaagctccagtgtgagttgtactcttctcggcagatcgccatctgccttgacccttactgtggacttggcttcgcgctctggtgtctctgcagtgtctattcaggccaccagtctgtcttaattcctcctatggagttagagaacaaccttttcctctggctctccacagtcaaccagtacaaaataagggacactttctgctcctattcagtgatggagctctgcaccaaaggtcttgggaaccaagtggaagtgctaaagaccagagggatcaacctctcctgcgtccggacctgtgtggtggtggcggaggagaggccccgcgttgcactccagcagtccttctctaagctcttcaaagacatcgggctgtccccgcgggctgtcagcaccacttttggatcaagagtcaatgtagcaatatgtttacagggaacctcagggcctgatccgactactgtgtatgtggatctgaaatcactaagacatgacagggttcgtctcgtggaacgtggcgcccctcagagtttgcttctctcagagtctggaaagattttacctggagtgaaagtggttattgttaatcctgagaccaaagggccggttggagactctcaccttggagagatttgggtgaacagtccccatacagccagcggctactacaccatctatgatagcgagactcttcaagctgatcatttcaacactcgcctcagctttggagatgcagctcagacactctgggctcggacaggataccttggttttgtccgccggaccgagctcacagcggccactggagagcgtcatgatgcattgtatgtggtgggagcgctggatgaaacactggagctgagaggattacgataccacccaattgatattgagacctcggtgtcccggatccacagaagcattgctgaatgtgccgtgttcacatggaccaacttgcttgtggtggttgtggaactgtgcggctctgaacaggaagccctagatctggtcccattagtgaccaacgtggtcctggaagagcattacctcatcgttggcgtcgtggttgtggtggacccaggtgtcatcccgatcaactccagaggagagaagcagaggatgcacctccgtgatagcttcctagctgaccagttagaccccatctacgtggcttataacatgtaaccagccttgtggggactgcagtgggccattctgaagaatcacaaagacagaagacctctggctaagagcaggcttcaaacgatgtgaaataagctgagatggctacatgatattcttcatctcatcctgtgggattctgcaatcataaaacacaggaaaggggaattctgtgatggcaaatgaaaaaaatgttaacatttggtagacatgtgctttgacatagcgtgagcagcacattactaaagcaattacatgcatgttgcatttttttcatctgttgtacatagttgtatttttatctaatgccattttagaattttctaagggaatttaatgaattcacatgaaaggggtagtctgagtgacacagttccccactccgtactgtattttgccattctgccgtagctagatgttctgtggggtttgttaacatggaactactcagctttctttcagtcaacccataagcaaatcagataacccactgactatgagaattactttatatagataattcttgactgtaaaacattttgaccagtgttttacaacatgtacataagaatacacataattcaactagagatttgaagaattggcttgtatagttataacaaccacagtagaaacatttctactttgagagaatttcaatattctcttaatgttgtgtaattgattaggtaactaaaaagcgcaaattgttggcaggttttgctgcacattgttctatgtctttgttggctggtgtattttataaactaaagctgcctatgtttctttttaaagctcgcattcccagaatcagcttaggcttctatgaattcagcctgtttctaaaagctgaaaatctcagtttaaaaatcaaaatgttaacacaaagctaagattcatcagagcccaccctattctaaggaaccacaataacttactctggccccagtgttaaaacgatctttcagatttagagtgactatgtaagaatttaggatttcctcttttccaggcacattgtaaactgtgtctacagtttatccatataacttctcttctgaaaactgaggagtgtcctctgttcttccagttcacgagggcagggggtttaaaacaagaatgataggccaggaaggcagtggggatccaccatcacatggaactgtaaggccatataactacacaaaactgaccaatctgggttgccaaagcagccaggcttatgctgaaaccggggaagtctgacatatgcaggaaactcttttgaaataactttggtgcccaggccaagtagaatgagatgagactgagtttggcctctggctcggtttcctttctttggtctgatacttcatgtatttgaatatagttaaatcgtattatttttttcttaacagaaatatttttaaaaatgaaaaagtactcaaaagtgagaagagttaacttgtcaaagcagaatggttctctttgacccactctggtctattgtgtaaatatttatttagactattttaataatacatattatttaccccactgtaacatcatgtaaactaagtatgtttttaaacaatttttaagacttgtaattaccctgaaaataaggtttataatgcaaagaccagctcctttgcggtggcagtgctctagggctgccattacacggtcttgtgatgtgactaaaagccactttgtgactcccttcatgtaatcctcttttcctccccactcctccacagagggcagagctcaggacatttgccagttccagatctctttttcagcattttcatggaattaatttacacgtaatgagggaagtcctaggatggatagaaaaaaagcacttacattggggcacacaggaaatcccagtgtctagcaatggtttggtttgcagagaacacagcctgatacttaattttcttaaaactatttttaatgatccactaaacaaagcaggggatcctgaagctgatataaataagtctagctctataatccccaagttctaaaagttatggttagatgctattctgtgggttgctttgataattcttactaacacagattagggtataggcatctagagatgcactgtccactgtaaatactataatgagagccacatctgtaatttaaatgtttctagtaaccacatttttttaaaagtaaaaagaaacccatggtattgatttaaatatattttatttaacccaatagctcaaaaacactatcatttcaacataggatcaatataaaaattattaatgagttattttactttttttcatattaggcctttgaaattcagtgtgtattaaacacatctcaattcaaaccatcaccatatttcaagtctttgtagccaaatgtgactagtggctaccatattagacagtgcagatctatactcattccttcaaatacattactctgttaatctcaaagtgtggccaactcccatttacttagaggctgattatctagttttgtagttcctcaggcctctaatttattttttgctttctgctttattgatcttttgcatgtcccccaaagccagaatctgctcatggaggaaggaaggctaagaactgtccttgaggaacttcatcagtaactctggtaaagcatcctgtggagggagaggagagcccagtcatttgcttagatggtgtttgtgggatcacctgcagatttaaagcctactctgccacagactcgagtaagaaaatgttctcttgatgacacagtgctcctactctatccacattaagtagcacttttgtggtagaactgattcttaaggcaggcctgaaaggccattactaatagaaacacagcctttccaatcctctggaacatattctgtctgggtttttaatgtctgtggaaaaaaactaaacaagtctctgtctcagttaagagaaatctattggtctgaaggtttctgaacctctttctggttctcagcagaagtaactgaagtagatcaggaaggggctgcctcaggaaaattcctagatcctaggaattcagtgagaccctgggaaggaccagcatgctaatcagtgtcagtgaatccacagtctttacttcctgcctcataaagggccaggtctccccagtaccaagtcctttcctcatgaagttgtgttgcctcaggctgtttagggaccattgcctgtcttggtcacatgagtctgtctccttactttagtccctgggcaatccttgcttaatgcttttgttgactcaacaagggcccgaggccttaggttttctattaaggtctctgccccaggcatggtgctctatatcttggccaaataaattactttccttgaatatccaggaatcttttagtctaaagcaatgaggagttatcacctcatcctcaaactccaacaagatctatgccttagtgttgtttttgttgtctgctttgatgtaaaagcaagagtatttggagcaagaagctgcaatgcgccaaatacacaataggccttttctttatcattcatacgacatttctggtttaggtgtatgtagttgggccatgttacttgtccagaggaagagactaaagatataagaataattttttagtcctaaatgctgttttgtttactttctgtcaagatatttacccgtgtcaaattcaaactacagtactgtgtaattatgtataaagtttttttatttatttgaagttagactagatatacgtttttaaatttaacatctggctggacagtgttctattaactcattgaatgtgtttcctttgtcttgtgttaataaatattgatgcctgattctgtttaa

SEQ ID NO: 221 - DNA, 540 bp, HOMO SAPIENS
  misc_feature (67)..(67): n is a, c, g, or t
acttggggatattttaggtctgctgagatgatgcacagcatacatacatgctctagtttttggaacnatgtcattaagttttcaaatacatctgttttgaacatggtattttgtttttctcattagcacgaattactactctacagtttcttctagagtaaataaatataatggctgtttgcagagcgactacagacttacttagatgtttaacaaggtgaacgatttcacaattagatcaaccattgagttaacagcaaggtgtttttcatctgttttgtttactgctatagtggggacaggtaacttctccaatttattctttgttgacatctttagttaccaacagactcccaaaagtaatgaaaagtcgattaaaaagaaaattgtaattatgccatgggttttcccaagatccttaaagtcagctcatttaaatttacaagagaaaaataacaggcatcatggaaaactaagtaacaaaaagctattgaaaaatacatctgtggaacacagtggtcagttgtaaacagctcagaa

SEQ ID NO: 222 - DNA, 10924 bp, HOMO SAPIENS
ccggcccagcggctctcctggcctcgcgctgcacattctctcctggcggcggcgccacctgcagtagcgttcgcccgaacatggcgacacggagcagcaggagggagtcgcgactcccgttcctattcaccctggtcgcactgctgccgcccggagctctctgcgaagtctggacgcagaggctgcacggcggcagcgcgcccttgccccaggaccggggcttcctcgtggtgcagggcgacccgcgcgagctgcggctgtgggcgcgcggggatgccaggggggcgagccgcgcggacgagaagccgctccggaggaaacggagcgctgccctgcagcccgagcccatcaaggtgtacggacaggttagtctgaatgattcccacaatcagatggtggtgcactgggctggagagaaaagcaacgtgatcgtggccttggcccgagatagcctggcattggcgaggcccaagagcagtgatgtgtacgtgtcttacgactatggaaaatcattcaagaaaatttcagacaagttaaactttggcttgggaaataggagtgaagctgttatcgcccagttctaccacagccctgcggacaacaagcggtacatctttgcagacgcttatgcccagtacctctggatcacgtttgacttctgcaacactcttcaaggcttttccatcccatttcgggcagctgatctcctcctacacagtaaggcctccaaccttctcttgggctttgacaggtcccaccccaacaagcagctgtggaagtcagatgactttggccagacctggatcatgattcaggaacatgtcaagtccttttcttggggaattgatccctatgacaaaccaaataccatctacattgaacgacatgaaccctctggctactccactgtcttccgaagtacagatttcttccagtcccgggaaaaccaggaagtgatccttgaggaagtgagagattttcagcttcgggacaagtacatgtttgctacaaaggtggtgcatctcttgggcagtgaacagcagtcttctgtccagctctgggtctcctttggccggaagcccatgagagcagcccagtttgtcacaagacatcctattaatgaatattacatcgcagatgcctccgaggaccaggtgtttgtgtgtgtcagccacagtaacaaccgcaccaatttatacatctcagaggcagaggggctgaagttctccctgtccttggagaacgtgctctattacagcccaggaggggccggcagtgacaccttggtgaggtattttgcaaatgaaccatttgctgacttccaccgagtggaaggattgcaaggagtctacattgctactctgattaatggttctatgaatgaggagaacatgagatcggtcatcacctttgacaaagggggaacctgggagtttcttcaggctccagccttcacgggatatggagagaaaatcaattgtgagctttcccagggctgttcccttcatctggctcagcgcctcagtcagctcctcaacctccagctccggagaatgcccatcctgtccaaggagtcggctccaggcctcatcatcgccactggctcagtgggaaagaacttggctagcaagacaaacgtgtacatctctagcagtgctggagccaggtggcgagaggcacttcctggacctcactactacacatggggagaccacggcggaatcatcacggccattgcccagggcatggaaaccaacgagctaaaatacagtaccaatgaaggggagacctggaaaacattcatcttctctgagaagccagtgtttgtgtatggcctcctcacagaacctggggagaagagcactgtcttcaccatctttggctcgaacaaagagaatgtccacagctggctgatcctccaggtcaatgccacggatgccttgggagttccctgcacagagaatgactacaagctgtggtcaccatctgatgagcgggggaatgagtgtttgctgggacacaagactgttttcaaacggcggaccccccatgccacatgcttcaatggagaggactttgacaggccggtggtcgtgtccaactgctcctgcacccgggaggactatgagtgtgacttcggtttcaagatgagtgaagatttgtcattagaggtttgtgttccagatccggaattttctggaaagtcatactcccctcctgtgccttgccctgtgggttctacttacaggagaacgagaggctaccggaagatttctggggacacttgtagcggaggagatgttgaagcgcgactggaaggagagctggtcccctgtcccctggcagaagagaacgagttcattctgtatgctgtgaggaaatccatctaccgctatgacctggcctcgggagccaccgagcagttgcctctcaccgggctacgggcagcagtggccctggactttgactatgagcacaactgtttgtattggtccgacctggccttggacgtcatccagcgcctctgtttgaatggaagcacagggcaagaggtgatcatcaattctggcctggagacagtagaagctttggcttttgaacccctcagccagctgctttactgggtagatgcaggcttcaaaaagattgaggtagctaatccagatggcgacttccgactcacaatcgtcaattcctctgtgcttgatcgtcccagggctctggtcctcgtgccccaagagggggtgatgttctggacagactggggagacctgaagcctgggatttatcggagcaatatggatggttctgctgcctatcacctggtgtctgaggatgtgaagtggcccaatggcatctctgtggacgaccagtggatttactggacggatgcctacctggagtgcatagagcggatcacgttcagtggccagcagcgctctgtcattctggacaacctcccgcacccctatgccattgctgtctttaagaatgaaatctactgggatgactggtcacagctcagcatattccgagcttccaaatacagtgggtcccagatggagattctggcaaaccagctcacggggctcatggacatgaagattttctacaaggggaagaacactggaagcaatgcctgtgtgcccaggccatgcagcctgctgtgcctgcccaaggccaacaacagtagaagctgcaggtgtccagaggatgtgtccagcagtgtgcttccatcaggggacctgatgtgtgactgccctcagggctatcagctcaagaacaatacctgtgtcaaagaagagaacacctgtcttcgcaaccagtatcgctgcagcaacgggaactgtatcaacagcatttggtggtgtgactttgacaacgactgtggagacatgagcgatgagagaaactgccctaccaccatctgtgacctggacacccagtttcgttgccaggagtctgggacttgtatcccactgtcctataaatgtgaccttgaggatgactgtggagacaacagtgatgaaagtcattgtgaaatgcaccagtgccggagtgacgagtacaactgcagttccggcatgtgcatccgctcctcctgggtatgtgacggggacaacgactgcagggactggtctgatgaagccaactgtaccgccatctatcacacctgtgaggcctccaacttccagtgccgaaacgggcactgcatcccccagcggtgggcgtgtgacggggatacggactgccaggatggttccgatgaggatccagtcaactgtgagaagaagtgcaatggattccgctgcccaaacggcacttgcatcccatccagcaaacattgtgatggtctgcgtgattgctctgatggctccgatgaacagcactgcgagcccctctgtacgcacttcatggactttgtgtgtaagaaccgccagcagtgcctgttccactccatggtctgtgacggaatcatccagtgccgcgacgggtccgatgaggatgcggcgtttgcaggatgctcccaagatcctgagttccacaaggtatgtgatgagttcggtttccagtgtcagaatggagtgtgcatcagtttgatttggaagtgcgacgggatggatgattgcggcgattattctgatgaagccaactgcgaaaaccccacagaagccccaaactgctcccgctacttccagtttcggtgtgagaatggccactgcatccccaacagatggaaatgtgacagggagaacgactgtggggactggtctgatgagaaggattgtggagattcacatattcttcccttctcgactcctgggccctccacgtgtctgcccaattactaccgctgcagcagtgggacctgcgtgatggacacctgggtgtgcgacgggtaccgagattgtgcagatggctctgacgaggaagcctgccccttgcttgcaaacgtcactgctgcctccactcccacccaacttgggcgatgtgaccgatttgagttcgaatgccaccaaccgaagacgtgtattcccaactggaagcgctgtgacggccaccaagattgccaggatggccgggacgaggccaattgccccacacacagcaccttgacttgcatgagcagggagttccagtgcgaggacggggaggcctgcattgtgctctcggagcgctgcgacggcttcctggactgctcggacgagagcgatgaaaaggcctgcagtgatgagttgactgtgtacaaagtacagaatcttcagtggacagctgacttctctggggatgtgactttgacctggatgaggcccaaaaaaatgccctctgcttcttgtgtatataatgtctactacagggtggttggagagagcatatggaagactctggagacccacagcaataagacaaacactgtattaaaagtcttgaaaccagataccacgtatcaggttaaagtacaggttcagtgtctcagcaaggcacacaacaccaatgactttgtgaccctgaggaccccagagggattgccagatgcccctcgaaatctccagctgtcactccccagggaagcagaaggtgtgattgtaggccactgggctcctcccatccacacccatggcctcatccgtgagtacattgtagaatacagcaggagtggttccaagatgtgggcctcccagagggctgctagtaactttacagaaatcaagaacttattggtcaacactctatacaccgtcagagtggctgcggtgactagtcgtggaataggaaactggagcgattctaaatccattaccaccataaaaggaaaagtgatcccaccaccagatatccacattgacagctatggtgaaaattatctaagcttcaccctgaccatggagagtgatatcaaggtgaatggctatgtggtgaaccttttctgggcatttgacacccacaagcaagagaggagaactttgaacttccgaggaagcatattgtcacacaaagttggcaatctgacagctcatacatcctatgagatttctgcctgggccaagactgacttgggggatagccctctggcatttgagcatgttatgaccagaggggttcgcccacctgcacctagcctcaaggccaaagccatcaaccagactgcagtggaatgtacctggaccggcccccggaatgtggtttatggtattttctatgccacgtcctttcttgacctctatcgcaacccgaagagcttgactacttcactccacaacaagacggtcattgtcagtaaggatgagcagtatttgtttctggtccgtgtagtggtaccctaccaggggccatcctctgactacgttgtagtgaagatgatcccggacagcaggcttccaccccgtcacctgcatgtggttcatacgggcaaaacctccgtggtcatcaagtgggaatcaccgtatgactctcctgaccaggacttgttgtatgcaattgcagtcaaagatctcataagaaagactgacaggagctacaaagtaaaatcccgtaacagcactgtggaatacacccttaacaagttggagcctggcgggaaataccacatcattgtccaactggggaacatgagcaaagattccagcataaaaattaccacagtttcattatcagcacctgatgccttaaaaatcataacagaaaatgatcatgttcttctgttttggaaaagcctggctttaaaggaaaagcattttaatgaaagcaggggctatgagatacacatgtttgatagtgccatgaatatcacagcttaccttgggaatactactgacaatttctttaaaatttccaacctgaagatgggtcataattacacgttcaccgtccaagcaagatgcctttttggcaaccagatctgtggggagcctgccatcctgctgtacgatgagctggggtctggtgcagatgcatctgcaacgcaggctgccagatctacggatgttgctgctgtggtggtgcccatcttattcctgatactgctgagcctgggggtggggtttgccatcctgtacacgaagcaccggaggctgcagagcagcttcaccgccttcgccaacagccactacagctccaggctggggtccgcaatcttctcctctggggatgacctgggggaagatgatgaagatgcccctatgataactggattttcagatgacgtccccatggtgatagcctgaaagagctttcctcactagaaaccaaatggtgtaaatattttatttgataaagatagttgatggtttattttaaaagatgcactttgagttgcaatatgttatttttatatgggccaaaaacaaaaaacaaaaaaaaaaaaaaggaaagaaaggaatgaataaactttgtagtaatcaactgtgaacttcaaaccaggttgattttagtaacccaattgctttgatttgacattaatgtagtcttacagggctgtgcttgctgggcatgcttttacgtctgtgagataatttcggttcagtaaattggccaatctttttatttttctaagacacagaaatgtatttaataaaaacctcgagagagtgatgggtggaaccccttctccttgaaagtgtgtacagatattccattttgtttggatatagtttataggaaagtgtgtggatgtattatggcggaaggtttctttatgttattttgttaatttattgggactctgtgtaaggccaggctttagtggtcattagacaccacatgtgttatgagccccttacccatagggttgggggtgggaagagaagcatatttttttgccattccggaagcaatccatttttattcacttgtgtgtcatgtaatggtctttggcaggagagagcactgagtcattgctggagttcagttcaacagagctgcagcttgggaagccctgtaagcccacagcttcctctcttatattaattgatggaattttactgtatgtgcctctgtacaagatgtagctttgagagctacaaaatgataacactgctttattacacactggtttcattgtcattgcaaaaacttaccctggttgtgggggagagttctagatctgtgccatgatccatacactggctaatagagtacataatttttccattttccattttttgtttttacttactactgaaggatctcagatgtaaaattatgtatttggtttgagatggccacttattgtccttaaaaatccatactgatatatgcagtcattttgaattggacagtgccttctctttttttttctcctcttcttccatctccctcacccatgcccccacccaatctaaagagacagtgctgtacattctcatagagatagagaagatctaaaaagttgagactactcaatccagttaacaacagcaggagcactagagtttgttcatttattctctctgtaaaacaagctgtgctttttttcttctgcctttaaaatgccacccgtgtattcaaaccatggccacttgatacttatgtagaatccatcgtgggctgatgcaagccctttatttaggcttagtgttgtgggcaccaatgtcgagcatcgttgtgacttgtgctgtatgattctcactgaagaatttcctttcagccaagaagcagtgaggtctgggaatattccaaagtcatgtctctgaatatgtgtccttgacgtgcaagctttgtaaaaccccatccccgcttaggtgcgaggcatcaccttctcacaagtgtttagtttcttttaaccacaagtatcattcttgggtgataatatagtttcattctacttagggattgtttagaaaacaaagaaagagccaattaaattttttagtttttgaaatttttatttatatgtatacttagatgagtattttaagctgtcgacctttagtttgccatacgggtaggactgtatttcatgttaacaactggtggtaatgataagccttcttctagcgtattttctcttctttcctgtcactttcctaagtttttttttttaaagactggaattttttttggctttatcttgtcttaccgtagagatttgttcaaaactctaagccctaccacctcccctttaataagctctttaaatagttgaatcattaacaacctggtgggaggcaagtcatttaattgaaccactaggaagtgtattttcttttctttttctgccaactttttggtggcatttgtaaaagctgatataaaaggctctgagatgttattttcagttattccataggcaagcctttttacagagcatatgtctccagttggcagcttgagatatttccgagcatccggttctagctaccagtgcctcccaatgcttagtgcacagtactgtagactggccatcacccctctccttggaaaatgccactgtgctgtttgaaaaaaagcagccttttagggctagagtattttatataaacagaagagctaagttcctgaagactaagctagatagctgcagctatatgtaaattgtatatttttatgaacttttgaagcacacactcctgtttccctctgtgtagctttgtggggatttcatgtatatatgctgtctgaaagaatccagaggttggagtgccaatagaaaatgaaaacaaatgccttgtactacaggcagcctctgaaggtgaccacataactgtcttcactgtgaccaatcggagtccctgcttgcttgtgaagaaggggcttttgtaccttgttggagatgccacctcagaagttcacactgtgcaggaaaaaggttttattctctcctggcatacattagaatgtcagatgcttgcatccatgtggaccacgatgggcctctaaaaattggtgggcagggggtttgcttatgagttttctctggaaaccgattttactcctggatgtattgaatgccccttgagctttatgagatacgagtccacatggataaaatgttagagagtggagttctacagaggattccaggaagaggccatgtctgtgcagtcctagttccagacaggtgagaagctccaggaactactggctaccttgacaagctgggtaaatagttatcattctgggtaactggttgaaactctgacttttggacaagtaattcctggggttctgtctttggtagcatcaccagggatatttgggtgggacagacagaagacacacagctgcctgttctctcctgcccatcatgtttggcccactagatgaagctgtactcagcaatttagggaatgtaacccttctcagaactggccattttcaggggaagcttgggagagcaatagtatggtgagccccttagagatgagcgcctactccttcttggcgaatgctgccttcagatgcttaccaagtggtcactgcatctagtaagattatatttccagtacacttccttagggcagaaacaccatcctatcaggtttggtcagtcccttcttcatgaagggagtcatggggaattcctgaaaattttcttccttctgcagacagttggatgagtcccttagagaaggcatccagagacataactaaactgaatatcatcccatattgattttaggaattgactctaaaactctgtgcagaatcttgtgttgggattgtatcttgacattcctgttgtgttatttttcttaactggagtgtgtgctgcctttcaggtacaatttttgtgtaataaaagccagtgcattaagtttatatagactactttctatgcaagactgagatatggaatagataggaagagatatgtactgctgggtacatggacagtaagtgtgttttcagatggagtaccagcaccgaaaatgggttgagggaggatgggttgtatgtatgtttctgcccactaattttgagcagccatattatgaattaaatcgtcacagccaagtaataacccaagaatggtatgagtttcatgtgtaatagctcaaatggaataagcatgaatgctggagtggaccattatcctcaaatattctatgtcacttctcatttaaagactcttgttatgaactattagaaactttaggcaaaatcaaaagtatttgcggcaaaataaaggcctattctactcttatttaaagtgaaacactgtatacttgtttctctccaaagcgaaattaagtatttataatttcaattgcctcgataagtttccaagtcactgaaatctgctgaaggttttactgtattgttgcacaactttaagataatttttgtctcaatgtcaacttttttcactgaataaaaatttaactgggtcaagaaaacacctctttgaaaatccactgtctctgtgtgtctcgagctgttctttagagcgcaataaagatggctgacgcagtctccaaacccc

SEQ ID NO: 223 - DNA, 2095 bp, HOMO SAPIENS
ggcgcacccgggcggccagctgggctcggagtgcagcgggattaggatggacgaggacgtgttgcaccctgaagagcctcatcatcgcctgctcttgaggttcacagatgatacctttgatccagaacttgcagcaacaatagacaatgcaggaatcacatgaacctgtccatccacagataaagtggtaaagaaactgccgtattagatacatgatggtatactcttcagccataaagcttcgggaaaccctgtcatccgcaaccacgtggagaaacctgtccatccacagatgaagggatcaggaagctctggtatatatactgaagggaaatgctttttggctaccaaaataatgaaattttgttgtttggagcaacacagatgaacctgtccatccacaaatgaagacatcaagaaactctagtatgtacacaaggcaaaacacttcagctattaaaatcatgacattatgtcacttggagcaacacagttgacccgccaaggcagcctcttcctccatagatggatgaacgctgtggccgctgctcctgcctgggccatgccctgatgctcccaacaccactgctcctctatttataagtcttagtagagttgctgacccagcaataactgaacagctgatatgtacctcacactaagccaggcgcttcatatgtatctaacttgaaaaatgctgagctagttaccttaacaccattaacttttacttaaaagtttgtttttcttttttaatcccagtgagctccaaacaagttttaggaggctccccaaaaccagtgaagactttaactaaaagtagaatttcaaagtattagaaaccaaaccccaaaattaaatgtgaagatcagtgtctgtactgagctggcccatctggtggacacaggatttgcgttatcgactgcaatgttacccaggattcacgatttctagcatctgtcagggttaagaaaattggattgagtaccaaatacagcagagcaaacccggctttgaggcaagggccccatcaagtagtcatgcagtacttttgttagggttctgggtgcaaatcttcctcgtccctcccaccttctcctggcctccttgtaaacccaaaccgccaggtacctcaattttcttcaagaccaggctgttcttaatgttggtaaattggtcaaggaaatgggtgagccactgcttgctctgcacatcgtcctcagagtgctcggtcttcaggcagtacagcagctgcatggctttggcctgcaggagtaagtggcccattcctaggctgtccccaaagatgtgtcctctgaagaagctggtcaggtagagggggtgtccactatggttatagatggggaaggagatgctgcccaggtcgagcgttttgtccacctgccaggtgtacaggagtgggttgggggcaccacgcagagcatcttgtacctcgcgcacacctgctggtactggagctggcttgcgtttccctgtgccacacgcagatcctgcactgtactgtccagtcaactgacttcagcaaagatgtctgggttcagcagcgagttgctgtgtgaggccaccagaatggaggtgatatcggcctcagtgctcatcctggaggtggagaagtggtcagagtcctctgtggtgaaatggccctacaccaaagtgggagacattcagaatcgaggcgaaattggcctcagtgctcctcttggaggcagagaagcagtaggagtcggtggtgaaatggccctgtgtgaatgtggaagaccagcagattggaggtggaattggcctcagtgcttgtcctggaggtggagaagcggtcagagtccttggtggtgaagtggccctgcacaaaacgttgctcccccttggccggtgaaagaataaaagaaagctggccacttgcatttccgtttcagtttatagaatacatgttttggaaatagtatcttctagatctgtctttttctcttctgatttaacttagtaaagctaagttttatctcttaaaaaaaaaaaaaaaaaaaaaaaaaaaaaaaaaaaaaaaaaaaaaaaaaaaaaaaaaaaaaaaaaaaaaaaa

SEQ ID NO: 224 - DNA, 1885 bp, HOMO SAPIENS
gcagccccgggcggaagccctaccgtgccaactgggccctcctcccgacctgccccgggctcgtgccccgcccacccaaaagtgggtgaaaggtcggcggcgccggcactgcagctggggctgagaagccaggacggcccgagaactgacagacggagtgacagacggactgaccatggccgaccagccaaaacccatcagcccgctcaagaacctgctggccggcggctttggcggcgtgtgcctggtgttcgtcggtcaccctctggacacggtcaaggtccgactgcagacacagccaccgagtttgcctggacaacctcccatgtactctgggacctttgactgtttccggaagactctttttagagagggcatcacggggctatatcggggaatggctgcccctatcatcggggtcactcccatgtttgccgtgtgcttctttgggtttggtttggggaagaaactacaacagaaacacccagaagatgtgctcagctatccccagctttttgcagctgggatgttatctggcgtattcaccacaggaatcatgactcctggagaacggatcaagtgcttattacagattcaggcttcttcaggagaaagcaagtacactggtaccttggactgtgcaaagaagctgtaccaggagtttgggatccgaggcatctacaaagggactgtgcttacccttatgcgagatgtcccagctagtggaatgtatttcatgacatatgaatggctgaaaaatatcttcactccggagggaaagagggtcagtgagctcagtgcccctcggatcttggtggctgggggcattgcagggatcttcaactgggctgtggcaatccccccagatgtgctcaagtctcgattccagactgcacctcctgggaaatatcctaatggtttcagagatgtgctgagggagctgatccgggatgaaggagtcacatccttgtacaaagggttcaatgcagtgatgatccgagccttcccagccaatgcggcctgtttccttggctttgaagttgccatgaagttccttaattgggccacccccaacttgtgaggctgaaggctgctcaagttcacttctggatgctggaagctgtcgttgaggagaaggagtagtaagcagaactaagcagtcttggagggcaaggggaggggaatggtgagatccgagccctgtgcatggacttggtgagactgttgccttaatgacatcctgcaccgtgtataacttagtgtgtcattttgaaacttgaattcattcttatcaatttaagggatcttaaaaggatttggaaatggaacaagtagcttccagaccagatactacctgtggcaagaatgctgcctaccagttaactgctggtcctaccacagtcaaagtattcctcattaaagagagaatctcaggttctcactggaggcactgtgcatattttcaaccagatcaccaggagctgagatcttcttcagtccctagccaggaatacccatttgatttccagggtgccatctaatcctgggctgtacatgtggatatggacttgaggcccacctctgtgtccaagtggattgagcatatatgcctaggaggagatagactgttaatcgttggattttgattttttttttttatgcctgcaaataatcaaaagtaaaactggagtagcctaattttctgggagcaggtggagaactttccctcctacacagtgaggacagtcccagtctgctgggataagtgagaaagcccagggtgtaggaaggccctttttacatactcttttctcatgagagctcactattttaacaataaacaataaacgttgtttctaatttttgcaaaaaaaaaaaaaaaaaa

SEQ ID NO: 225 - DNA, 1679 bp, HOMO SAPIENS
gaaaggcagggaggggaggttgtcccctgctgagaaccattggtttaaggttaatctggctctgctttcatagactactctgttacccaggctggagtgcggtgatgagtgatcatagctcactgcagccttaaactctagtgatcctcccgccttggccttccaaagtgctgagattacagatgtgaaccaccacacccagcccagtcaatttgtttttagaatgttcccaagaatatagttatgttgctaaataagatactaaaataatcccatactatatttcttgacagaaaaactattaaaatgtatacatgataaaaatttcttttatgaagcaaaatatgttttgttttgctcatgaacgtgaggtattttggaaaaatggtaaagaagtgcagagtcaagtcatagcgactaataatgggttattttcttaaattgtatgcttatgttaattctcacagtctttttgtttgggtctgtgacagatcttacaaaagatcttttagacctatgattcttaacaaaattaaagaattaagtcggaaccaattttccacaatgtctcatctaagaaaggactcacagcccagcagcccaggagatgacgcaatggacaggagtgggctccctgaccttcaaggaagatttgagctatctgggaaaaacagacagtatccactggatgcattggaaccccaacccagcattggggatattaaggacattaaaaaagcagccaagtctatgctagacccagcacataaatctcatttccaccctgtgaccccaagtttagtattcttgtgtttcatatttgatgggttacaccaggcattactgagtgttggtgtgagcaagaggtctaatactgtggttgggaatgagaacgaggaaaggggtactccttatgctagcagattcaaagatatgcctaactttattgcccttgagaagtcatcagttctccgccactgctgtgaccttttgataggcattgcggctggatcaagtgataagatttgcaccagcagtctccaagttcagagacgattcaaggcaatgatggcatctattggaagactttcacatggtgagagtgctgatctgctaatcagctgcaatgcagaatcagccataggttggatcagctcaagaccgtgggttggagaattaatgttcacacttctatttggagactttgaatcccctctacacaagctacgcaagtcaagttagttgccaagaaagcacagatgacaacctattaatgctgtgagaatgtttctagatcagtgcatggatggctccattgctctacgggccattgtgtctgagatcccagtctttgaggagaaaaaaaacaatggttaaaaaggcattggggaaatattttgagtttgggggtgtactttgccaccccattattggggagctgtcaccacgaatgttcccaaacttagcaacagcggcaaactactgggccaagatgagcaaccccacatttttgggatttaaagctcctgatgttataccaggatcaaccatcacactccctttgcttcaaatggcatctaccccgtaagatcttgaggggggagtgttgggtggaatcatagatccatgcactcctaacatgaactaattctcattatttaaaaaaaaaaaaaaaaaaa

SEQ ID NO: 226 - DNA, 1301 bp, HOMO SAPIENS
gggaggagagaaaagccatggccgacaaggtcctgaaggagaagagaaagctgtttatccgttccatgggtgaaggtacaataaatggcttactggatgaattattacagacaagggtgctgaacaaggaagagatggagaaagtaaaacgtgaaaatgctacagttatggataagacccgagctttgattgactccgttattccgaaaggggcacaggcatgccaaatttgcatcacatacatttgtgaagaagacagttacctggcagggacgctgggactctcagcagctcctcaggcagtgcaggacaacccagctatgcccacatcctcaggctcagaagggaatgtcaagctttgctccctagaagaagctcaaaggatatggaaacaaaagtcggcagagatttatccaataatggacaagtcaagccgcacacgtcttgctctcattatctgcaatgaagaatttgacagtattcctagaagaactggagctgaggttgacatcacaggcatgacaatgctgctacaaaatctggggtacagcgtagatgtgaaaaaaaatctcactgcttcggacatgactacagagctggaggcatttgcacaccgcccagagcacaagacctctgacagcacgttcctggtgttcatgtctcatggtattcgggaaggcatttgtgggaagaaacactctgagcaagtcccagatatactacaactcaatgcaatctttaacatgttgaataccaagaactgcccaagtttgaaggacaaaccgaaggtgatcatcatccaggcctgccgtggtgacagccctggtgtggtgtggtttaaagattcagtaggagtttctggaaacctatctttaccaactacagaagagtttgaggatgatgctattaagaaagcccacatagagaaggattttatcgctttctgctcttccacaccagataatgtttcttggagacatcccacaatgggctctgtttttattggaagactcattgaacatatgcaagaatatgcctgttcctgtgatgtggaggaaattttccgcaaggttcgattttcatttgagcagccagatggtagagcgcagatgcccaccactgaaagagtgactttgacaagatgtttctacctcttcccaggacattaaaataaggaaactgtatgaatgtctgtgggcaggaagtgaagagatccttctgtaaaggtttttggaattatgtctgctgaataataaacttttttgaaataataaatctggtagaaaaatgaaaaaaaaaaa

SEQ ID NO: 227 - DNA, 3956 bp, HOMO SAPIENS
ggctgaggcagccgcgcaggtcgcagggccagcgtccgcgaggacggcccggctgggcggccccgagctctgtggcgctgtggaggagcgggagcgcggccgagaaagcggggcgccgagggggtcggcggccttcgggaaatttccgccgacccttcgctcccggctctaaaagttcctgatttcctatttccttttaaatcccgagtggctgttagctcttcgcctgcactttttcttccccaggagataagggggagtgtgaggaacggagcgaataatataaaaaaggatttcctcccggaagagagcggcagttcggagagatttttcttaaggaagcagaagcggcgtttgcggccgctgcaggcgccgggccctgccggccacactatgcgcgagccggccccgggctgctgaggcgcggggacgcggaagcggaggccgagcgcgccgggctcccgcgctcgcgagcgagttttgtccgcccggcggcggtggcggggggatggagcccgcgaccgcgccccggcccgacatggcgccggagctgaccccggaggaggagcaggctaccaagcagtttctcgaagagattaacaagtggacagttcagtacaatgtttccccgctgtcttggaatgtggctgtcaagttcctcatggcaaggaagtttgatgtgctccgtgccatagaattgttccactcctacagagaaactcgaaggaaggaaggcattgtaaagctgaaacctcatgaggaacctcttcgttctgagatcctcagtggaaaattcaccatcttaaatgttcgggacccaacaggagcctccattgccctctttactgccaggttgcatcatccccacaagtcagtccaacatgtggtacttcaggctctgttttacttgctagacagagctgtggatagctttgaaactcagaggaatggactggtgtttatctatgacatgtgtggttctaattatgccaactttgagctggatcttggcaagaaagtcctaaacctgctgaagggagcatttccagctcgtttgaagaaggtgctgattgtgggggcacccatatggttccgagtgccctattccatcatcagtctcctcctgaaggacaaagtccgggagaggattcaaatattaaagacatctgaggtcacgcagcatctgcccagggagtgtcttccagaaaacctgggtgggtacgtcaaaattgatctcgccacttggaatttccagttcctaccccaggtgaacggccacccagatcccttcgatgagatcatcctgttctccctccctcctgccttagactgggactcagtacatgttccaggtccccatgctatgaccatccaagagttggtggactatgttaatgccaggcaaaagcaaggaatctatgaggaatatgaagacattcgtcgtgagaaccctgttggcactttccactgttccatgtctccaggaaacctagagaaaaaccgttatggggatgtaccctgcctggaccaaactagagtgaagctaacaaagcgaagtggccatactcagacagattacatcaatgccagtttcatggatggctacaagcagaagaatgcttacattggcacacaaggtcctttggagaatacctatcgtgatttctggctcatggtatgggagcaaaaagtcttggtgattgtcatgaccacccgctttgaggaaggcggcaggagaaagtgtggccagtactggcctttagaaaaagactctcggatccgatttggcttcctcacagtgaccaatctaggcgtggagaacatgaatcattataagaaaacaacgctagaaattcacaacacagaggaacggcagaaacgccaggtgacccacttccagttcttgagctggccagactatggtgtcccttcctcagcagcttccctcattgacttcttgagagtggtcagaaaccagcagagtctggctgtgagcaacatgggagcacgctccaaagggcagtgccctgagccacccattgtggtccattgcagtgcaggcattggcaggacaggtaccttctgctcactggacatctgcctggcacagctggaggagcttggcacccttaatgtgttccagacggtgtcacgcatgaggacccagagggccttcagcatccagacccctgagcagtactatttttgctacaaggccatcctggagttcgcagagaaggagggcatggtatcctctggccaaaacctgctggccgtggagagtcagtaactctcctacgaacctcctacctgttggccagccttccttaaactaccctggacaccgctgagcctataggttgccatcagttacgctgaagccatggatcaacttctttcttgtgtctcccagcacacgtgtgcacgcaaggcagcctttccctttggctagataaatgtggtgaaattgccactagaaagggccagtagcaatgtgttcttaattcctagcatctgctatcaaactgtgccttattaaaaccaaattgtggctattgatttttgctagggtccccgaggtaagtggggaaggaacctccctcctcctttctcccgccattctttttctgaggtctcctgtctcccactccttccctttcctaggattttatggggaggtttgatgagcatttgcctttctccccagagagcttgaccaagttacatattctagagatcgtcctgagtgccaagcacgtttataagtagggcgtgtattccagtcctttctgtcattctgtgtgtgtgtgtgtgtgcacttatgtgtatgggtccatatgtacgtgtgtatataatatatattgtatgtgataatatgatcgtattctataaatacatatacacacgatactcctttccagaagttcctggggctccgtgttgcagttcaggactccttgcttcttggaccctactatttatcctggactagcttgggttggtgatcatgtctcctcttgtcaggctacagagtggtggaagaggacacacacacatctcctccatgttcctgccacagggccccttccttaagtaatgacttatctccttccagttgccacctgttggagccaagaatgtattagtttgtggtgacactgggttagctcagcatggatttcccttatccgatgatttttctacatttacttggccaatttggggaacagacctccactgtgattccatactctctctttgctttcactatcccagggatgggaggcggagggtagagatgaactcactgagcagccagagccaaatgcaatcggtacgaatcttagaaggaaggagggggagcccaggtatgagaaagaaaaaaccactaagaaaatacctccctgggaggatgagctggggccctttttcttttgctggatggttcctttatgcagcttggccctgtctaccgagatgcccatctcttcctgcctgctagcctgctagaccctcaaactgggtgggttctgtgtcaataaaaagcttcaccccctggctgagtgaggtggtcccctgcaatcactgtttgtcccctacccacccaacctgtccctgcctgctcccagcccactcatccttatgtgctagggataaatcaagagtcctcagcactccacattcccaaaaaatcccaggaactcctaaaccttcccctgtgacagaagatgaggttggcagctgatcagacctcaataattttatactgtaataagctctttgaatgtgtatattattattttttacaatcatttcattttgtatttaatatcaatggactgagtctgattcagaaaataattgtaatgttcatattcaatatcttacagtgatacagttttgtatttacatataaatataccgacatgatcaaaaccaaaaaaaaaaaaaaaaaa

SEQ ID NO: 228 - DNA, 187 bp, HOMO SAPIENS
  misc_feature (66)..(66): n is a, c, g, or t
  misc_feature (76)..(76): n is a, c, g, or t
  misc_feature (87)..(87): n is a, c, g, or t
tgtagtaaattgaggtctatgtttctgtaatggatggaaagaaaagcaacaaaacaaataactaantttgttaaanctgattttaantcttctttttaaaaaaagcaaatggcatgatattttggcagactttttgacagcacccacatttgatttgatgagatgtgtgctcctatttgagttatgt

SEQ ID NO: 229 - DNA, 460 bp, HOMO SAPIENS
  misc_feature (44)..(44): n is a, c, g, or t
  misc_feature (56)..(56): n is a, c, g, or t
  misc_feature (88)..(88): n is a, c, g, or t
cccatctcagccttcagttggagatttctgatttatgttaatantaagaaagctgntgatagtttatcataaaggcatttccttatantgctagtataattttctgaaaattagtggtaagatgtgacaatacatcagctgcatccacaggaaaggggaattaattagcagttctgattctgggtacacttgttatgatcataatttacataatattttcatgaaaatggtcagctcacagctatgaaatgtaaatgatagaaatctttaatcatgtatatggatagacttgttactatttccttatcaaagtgtcactttagggacagcagttgcccctttaaattaaggatcaccacaataatactctgccatgtcatggaatcagcatgaagccctggatgctatccaagattctgtttcagttctcattttgtatattcttgtttgtgctcttgat

SEQ ID NO: 230 - DNA, 3154 bp, HOMO SAPIENS
cggggccggccttcctgcagcctcttccgctcgccggctgcggcgcctgggacggttgcggtgggtctgggcgctgggaagtcgtccaagatgattaaaaaattcgacaagaaggacgaggagtctggtagtggctccaatcctttccagcatctggagaagagtgctgttttacaggaggctcgtatattcaatgaaactccaatcaatccaagaagatgtttgcatattcttacaaagattctttacttactgaaccagggtgaacactttggaacaacggaagctacagaagccttctttgcaatgacgcgattgtttcaatctaatgatcaaacattgaggagaatgtgctaccttaccatcaaagaaatggctaccatctctgaggatgtgataattgtcacaagcagtctgactaaagacatgactggaaaagaagatgtataccgaggcccggccatcagagctctctgcaggatcaccgatggaacaatgttgcaagccattgaaagatacatgaagcaggccattgtggataaagtttccagtgtatccagttcagcactggtatcttccctgcacatgatgaagataagctatgatgtggttaagcgctggatcaatgaagcccaagaagctgcatcaagtgataatattatggtccagtaccatgcattgggagtcctgtatcaccttagaaagaatgatcgacttgctgtttccaagatgttgaataagtttactaaatctggtctcaagtcacagtttgcttactgcatgctgatccgaattgccagtcgcttactaaaagaaactgaggatggccatgaaagtccactgtttgatttcattgagagctgcttgcgaaataaacatgaaatggttatttatgaagctgcttcagctatcatccatcttcctaactgcactgcaagagagttggcacctgctgtttcagttcttcaacttttctgtagttctcctaagccagccttgagatatgcagctgtgaggaccttgaacaaggtggcaatgaagcacccctctgctgttactgcctgcaatctggacttagaaaacttaatcacagactcaaacagaagcattgctaccttagccattactacactcctcaaaacaggaagtgagagcagtgtggaccggctcatgaagcagatatcttcttttgtgtctgaaatctcagatgagttcaaggtggtggttgtacaggcaattagtgctctctgtcagaaataccctcgaaagcacagtgtcatgatgactttcctctccaacatgctccgagatgatggaggctttgagtacaagcgggccattgtggactgtataatcagcattgtggaagagaaccctgagagtaaagaagcaggcctagcccacctttgtgaattcattgaggactgtgaacacactgttctggctactaagattctacacttgttgggcaaagagggccctagaacgcctgtcccctccaaatatatccgttttatttttaatagggttgtcctggagaatgaggctgtcagagctgctgctgtgagtgctttggctaaatttggggctcagaatgagagtcttctcccaagcatccttgtactcttacagaggtgtatgatggatactgatgacgaggtacgagacagagctaccttctatctgaatgtgctgcagcagaggcagatggcactaaatgccacatatatctttaatggtttgacggtctctgtaccagggatggaaaaagccttacaccagtacacgttggagccttcagaaaaaccgtttgacatgaaatcaattcctcttgctatggctcctgtctttgaacagaaagcagaaatcacacttgtggctactaagccagagaagttggctccttccaggcaagacattttccaagaacaattggctgccattcctgagtttctgaatataggacccttgttcaagtcttctgagcctgttcaacttacagaagcagagacagaatattttgttcgatgtatcaagcacatgtttaccaatcacatcgtgttccagtttgactgcaccaacactctcaatgaccagctgctggaaaaagtgacagtgcagatggagccatcagattcctatgaagtgctgtcttgtatcccagcccccagccttccttataaccaaccaggaatatgttacactcttgttcgtttgcctgatgatgaccctacagcagttgcaggctcctttagctgcaccatgaagtttacagtccgggactgtgaccctaacactggagttccagatgaggatgggtatgatgatgagtatgtgctggaagatctcgaagtgactgtgtctgaccatattcagaaagtactgaagcctaactttgctgctgcttgggaagaggtgggagatacctttgagaaagaggaaacctttgccctcagttctaccaaaacccttgaagaggctgtcaacaatatcatcacatttctgggcatgcagccatgtgagaggtccgataaagtacctgagaacaagaattcccattcgctctatctggcaggtatattcagaggtggctatgatttattggtgaggtccaggctggccttagccgatggagtgaccatgcaggtgactgtcagaagtaaagagagaacacctgtagatgttatcttagcttctgttggataaatgcttactggacaagaggaaactgatgcacactacatggtcagtgggcttttaggctagtggcatcagtttcccagaatcagacttttgaagatgaatgactttggagaagcaaattaaacatttggccctgagccagcagatcaagcaaatgtctatctttgcgcatgggttgttttttttttttttctttttattctacttggtcagctttgggacgatagtgcagctttgggtgatcttgaaaatcaaatactatcctatactccagctgcttaacttcattttattctttaatgtgtacctgaaagctcctggcaatgctggaaaatttttatcccagaggggtgggggggaggggggaggggaagccagagtccacttttgtcacaattcatttttattaatagaaaataaacacttattccagtttcaaaaaaaaaaaaaa

SEQ ID NO: 231 - DNA, 1398 bp, HOMO SAPIENS
ggccctcgcggggggcttgtgggtcctcctccccctcccactgacaactgccccaactgctcttcccgccccggtcacagtgaaaatgtagacggggtcgttgtccactatgttaggtcttaatggtgggaggacgcccgagtgctcggcccgtttcaccccgaggaggaaggacactgggtcatgacgccatcagagggcgccagagcagggaccggacgcgagttggagatgttggactcgctgttggccttgggcggcctggtgctgcttcgggattccgtggagtgggaggggcgcagtctcttgaaggcgcttgtcaagaaatctgcactgtgtggggagcaagtgcatatcctgggctgtgaagtgagcgaggaagagtttcgtgaaggttttgactctgatatcaacaatcggctggtttaccatgacttcttcagagaccctctcaactggtcaaaaactgaggaggcctttcctggggggccgctgggagccttgagagccatgtgcaagaggacagatcctgttcctgtcaccattgctctcgattcactcagctggctgctacttcgccttccctgcaccacactctgccaggtcctgcatgctgtgagccatcaggactcttgtcctggtgacagctcctcagtggggaaagtgagtgtgctgggcttgctacatgaagagcttcatggaccaggccctgtgggagctctcagcagccttgctcagactgaggtgaccctgggcggtaccatgggccaggcctcggcccacatcctgtgtcggaggccccgacagcgcccaactgaccagactcagtggttctccatccttccggacttcagcctggatctccaagaggggccctctgtagagtcccagccctactccgatcctcatatacccccggtggatcccacaactcatttgacctttaaccttcacctgtccaagaaagagagagaagccagagatagcctgatcctgcccttccagttcagttctgaaaaacagcaggctctcctgcggcctaggccagggcaggctaccagccacatcttctatgagccagatgcttatgatgacctggaccaagaagacccagatgacgacctggatatttgactggccagatttgattagattgtaattggagggggcgcgggaagactttgggcccagaaccatctttctattgtttgtgttagccttaccctgtccctgccccaccttggttccccttgtctatggagccccgccttgtgagccaggaagcagcgtctcatcaggacagaaggtaggatgaagacatggggtaatgtgagagagtagaacacccccgtacctaataaaaatctttatttttttattaaaaaagaaaaacaaaaa

SEQ ID NO: 232 - DNA, 4585 bp, HOMO SAPIENS
gagcggcatgcgacgccgcctctgtggcctgtggaggcccgcttggcggcgctgcttcccgacctactggtctttcggaagcctcggggatgggaacccgagctcgccacggcccagggcgtcctcctaggcgtccatgtgacggggtttacagcattaatggacaggttcaccctgacctacaagtcggaacgtgacatggacaaactggcccatatcttcagttattacattagtgacatcgtggagcatgttctctgttttggaggggatatcctaaatatcacaggtctacctgcaagtcggatttcccaggttattgttggagatgagcggcagcaatacctcttggtgattgggcaggttgtagtgatgtccagttagctcagcgtttggctcaggcgaatgaaattgtcctatcctggaactgctggatgctttgcaagcagtatatgtttgaagtggcaatcatgagggaggatgaagctgtgaagagactcttaagaactgcactggaattggatccacactctgaacttgaccaaaagctgcagaagcacataatgaaaaaccttttgaagaagcttatttcctagttcttgaatcctcatagagtctctctctctctctctctctctctctctctctctctctctctctctctctctctctctgtgtgtgtgtgtgtgtgtgtgtgcatgcacatgcataaacaggtgtacaattataagtgacaacttttttatatttatccagttaatctccagcaacccattgtaattccagcaaatttacccatctgtgccaacataatactgtgatgaacatgtcttaaacctttagttagatttctcagtcctagaaagtagaagccatatttgttctttagtttgttctttaacaatttagtacactgtaagaagggtatagagtgtatgtttggtaaatataagttgactgattgtatatatatgaatatatgtgaattccttagtaagagatgtaatgactaatggatgtgtcaaattaattcttagagagtaaatcttgacagatttcatcagtgaattctgcctaaagtcagttttaattccaagttcattggtttgtatatcttctatactgaattttcttttaagtttttgctgagacccataagttgttttctcatacataccatgaaatacataattaaaaatgcctgaacatgatgttgatagttgaaaatacaggtaggtaactcaatgtgtctttatagattgatgaaggccagcctatagagtatgtatctgaattccgtacgatgactctggttttggtcagcctagagttccacaggacagcgtggatgttgcatttgtgtcatcttatccaggaggctgccttatacatctccacagtcattgagaaagggggcggccagctgagtcggatctttatgtttgagaaaggctgcatgttcctctgtgttttcggccttcctggtgataagaagccagacgagtgtgcacatgccctggagagctccttcagcatcttcagcttctgctgggagaatcttgctaagaccaactgaggaggaagatccctagatttgtttccatcagtatcactaatggaccagtattctgtggcgtggttggagcagtagcaagacacgaatatacagttattggcccaaaagtgagtcttgcggccagaatgataactgcttatccaggtttggtgtcctgtgatgaggtaacatatctaagatccatgctacctgcttacaacttcaagaaactcccagagaaaatgatgaaaaacatctccaacccagggaagatatatgaatatcttggccacagaagatgtataatgtttggaaaaagacatttggcaagaaagagaaacaaaaatcaccctttgttaggagtgttaggtgctccctgtctctctacagactgggagaaagaattggaagccttccaaatggcacagcaagggtgtttgcaccagaagaagggacaagcagttctgtatgaaggtggaaaaggctatggaaaaagccagctgttggctgaaataaactttctggcacagaaagaagggcataggggactcctgatgaccatagtcatattcaccagggtgttgccattgatgctgaaggaagcagattccaagcagtgcttctatgccatccagaccctcatggccatcttctttgagattgatacatgcccagcctattaccggcaagagtgcctacaaagacagctttgtgggatagtggaagaacaacttcactgcctttttagtgacctcttatttgtgaagctacccttcacaggtgctttggaaacccactttattgtgaggtcctatgccaggaccttctctctaaggacgtgttgctctttcatgtcctacaaaaggaggaagaggaaaacagcaagtgggaaaccctctcagccaatgccatgaaatccataatgtatagtatttctcctgccaactctgaggaaggccaggaactttatgtctgcacagtcaaggatgatgtgaacttggatacagtacttctcctaccctttttgaaagagtagacagtaagcaaagaagatgatgttgctaagatttaagaaaatccatggtgttagtgaagatacaatgttatgcacatagcaagagtttaataaaaaaagagtgcaaagtagaatgactgatgccataaagaataatgaaactatcagaatcagaaatagcagtaagccaactggatcaactgagcccagaggaacagttgctggtcaagtgtgctgcaatcattggtcactccttccatatagatttgctgcagcacctcctgcctggctgggataaaaataagctacttcaggtcttgagagctcttgtggatatacatgtgctctgctggtctgacaagagccaagagcttcctgctgagcccatattaatgccttcctctatcgacatcattgatggaaccaaagagaagaagacaaagttagatggtgggtcagcctctcttctcaggctacaagaagaattatccctaccacaaactgaggtgttggaatttggagtgcctctgctacgggcagctgcttgggagctctggcccaaggaacaacagatagctctgcaccttgaatgtgcctgctttctccaagttttggcctgccgctgtgggagctgccatggaggagactttgtcccctttcatcattttgcagtttgttctactaagaattccaaggggacctctcgattctgtacttacagagatactggctcagtgctaacacaagtgatcacagaaaaattgcagctgccttctccccaagatagttttcagttccagacaaaaccatccagaactcaggaggccttctcaagtgaatgctgcagaacagaggaagagttcctagatcaagtgaagaggaagctggctcagaccagccctgagaaagacctgttgaccacaaagccttgtcactgtaaggatatcctgaagttagtgctcttacccctcacccagcattgcttggtcgttggagaaaccacctgtgcattttattacctgctggaggctgcggctgcctgcttggacctgtcagataattatatgtaagaagaatttggcagtcctgcagcagcaggtgcattgcctctccctactctggcagctctataacctggaggccacagccagtagctacaggtttgcctgcctggctactcttatgcagaagaattcagctgatgagtttgcaaatgaagcccaggttgtctctacctatgtggagctctctcagttctcccagagtgtgggcatcaaggacaagtggctgcactgtgagcagatggccattcagaaaagcagtttatgttggttctccagggaggggttgttggccacagctcagctcatgcaggccctggcctacaccaagctctgccttggtcatcttgacttctccatcaagctgggattgctgtgtcggccctttagtgagtgtctgcgtttcgttcaagtctacgagcacagccgtgttctaacctctcagagcaatgtcatgctgggggtccactcctccctggccatgtgtactgtaaggagttcttctctcaatgtgtgacctgccctgtctatcaccagtgggtatctgagcttaaggcctctgtaatgagatgtgaaaagagagaattgatgtccctgactaacagcatcagaccttttgacacctgcttgaccaggatttggataaaaggagaatttctgcaggaaaataactcttagaaaagaaacttaggaatacagagatttgacagagtggctgatgtcaaggagaacaaggatgcagaagaaactcaagatgtatgtattaaaacaaaagaacaataacctgaagggaccatgattctgttattgtatataacacaaggaaatgccccagattctcctttaaaagatataatgtacatattaagtatactagcctttatagttactgctatctacatgtttatcaaaataaaagactatttttttctaaaacaaaaaaaaaaaaaaaaa

SEQ ID NO: 233 - DNA, 5253 bp, HOMO SAPIENS
gtctcgcgtgcgtgtgtccgagcagtcctgggcggtgggcgaaggcgcggcttggggacccgggaggggccggggcgcgggggctgcaggaagtggaggcggccgccgctcggggaccggcttggcggggtgagagacacccggaaacggattccgcttcggggcccgcgcgagttgggtgcttcggagggcgcgagaggagcgggcgggtgctgctgagtaatccccgcggcggcggccggacgcccacctcccacgccgcgccgcagccgggccgcggctcctccctccgcggtccttccctcctcttccctcccgtcttctcccctcccctcccctcccctcccggctccgcttggctccgggcaggtagagccgggctccgggcgcgcgcggggccgcagcagctgctcccgatctcgcctcggcccagcgcagggcctcgcacgcccatggccggctcggagcagcagcggccgcggcggcgggacgacggagactcggacgcggcagcggcggcggcggcgcccctgcaggacgcggagctggccctggccggcatcaacatgctgctcaacaacggcttcagggagtcggaccagcttttcaaacaatacagaaatcatagcccactaatgagttttggagccagctttgtcagttttttgaatgccatgatgacatttgaggaagaaaaaatgcagttggcatgtgatgacttaaaaaccacagaaaaactgtgtgaaagtgaagaggctggagtaattgaaacaatcaagaataaaattaagaagaacgttgatgtccgaaaatccgccccctctatggttgatcggcttcagaggcagataatcatagctgactgccaggtttacctggctgtgctttcatttgtaaaacaagaattgtcagcttatatcaaaggtgggtggatccttaggaaagcctggaagatttacaataaatgctatctggacatcaatgcccttcaggagctgtatcagaagaagctaactgaagagtccttgacttctgatgctgcaaatgataatcacattgtggctgaaggggtgtctgaggagtctctgaacagactgaaaggtgctgttagctttggatatggcctttttcacctttgcatatccatggtgcccccaaacctgctcaaaatcatcaacctgctgggttttcctggagaccgcctacaggggctttcttcactgatgtatgcaagcgaaagtaaggacatgaaggcccctttagctacattagctctgctctggtatcatactgtagtccgcccgttttttgccttggatggcagtgataacaaggcaggcctggatgaagctaaggaaattctccttaaaaaagaagctgcttatccaaattcttccctctttatgtttttcaagggacggatacaacgactagagtgtcaaatcaacagtgccttgacatctttccacactgctttggaacttgcagtagaccagagagaaattcaacatgtctgtctgtatgaaattggttggtgcagcatgatagagctcaatttcaaggatgcatttgattcctttgagaggctaaaaaatgagtccaggtggtcccagtgctattatgcctacttgactgcagtttgtcagggagccactggtgatgtggatggggcacagattgtctttaaagaagttcagaaactcttcaaaaggaaaaacaatcagattgaacagttctcggtgaaaaaggcagagcgatttcggaagcaaaccccaaccaaagcgctctgtgtgttggcgtctattgaagtgttgtacttgtggaaagctcttccaaactgttccttccccaacctgcagaggatgagtcaagcttgccatgaagtggatgactcatctgttgttggattaaagtatttgcttcttggtgccatacacaaatgtctaggaaactcagaagatgctgttcagtacttccagcgagctgttaaagatgaattgtgtcgtcagaataatttatatgttcagccgtatgcctgttatgaacttggctgtcttctattagacaaaccagagactgtaggaagaggcagagctctacttcttcaagcaaaggaggatttctctggctacgactttgaaaacagattgcatgtccgcatccatgctgctctggcctctctgagggaattggttcctcagtgacagacccggaacacccgctccgtccctccccacccagggtccgcactttaaaataaaagcagaggacaaagctcttgtgaagatgggcttttcttctgaaaaccacctgtgccagggacacattttcccagttaagctgacatattaaagatctcctcttttaaacatgtagctgaaaagtaataatgatgttgaggaggatgatgatggtaataataactaaccacctggggagagggttaagtgaccttgctcaaacgttttagttttgtgatttattatttttaaaataaaatcaaacggaacatccaacccaagatcctgtaggaacacctaccttaagcacatatctgaatgggtaacatgatgaggtacctgtaaaattattaacaatatcatgacatagcatttatatttgtgttttgaaaaaataaaagtgctttctagtgttttactttatcctcaaaatactccagtgaataacatagcacagatattcttaaccccactttgcagacagtgaaactcaggcacaaaaaggcaaattgacttatcccaattaattattcctgttatcagcagagcaatgaatagaaagcagatctcctgaccaccaactgacttttattgtaaaaataattcatgttaataggccagaattccatgttttacttattaaaagaacaaaatcttcagctgaagttatgtcaccagaaatagtcatctccagattgtctacagaatgtttcaaagcgatggacactctttttcctttgaaagccaaccaagtaagagcaaatattaatagaagataattttacaactaaaagtgtgactcttttgctaatctattagcctagtctatagattagacaaacagtatctacattttaggagtttacctttctttgtgaaaattgtcaaattaccaacttttggaaatcttttgacacattacttgaaaaggttattcgtgaatgaacatagattttggcctcaaaatatttgctggtggaacatttgctgggctacacagtgccaggatttaatcattttccccttagctcaggttatttagatattatacaaggaattcaaagttatttttttattcttcattgctaatttttgtcatttaatttacctccatgcccggtactgcaaacctgtggttttgaagaatctaaatacctcagtcacttttaagaatctctgccataatttggctcaatgtttaaggttagatttttaaagaaatttttattgagctaaaggatatcattttagggtatcgtttatttacaaattcttttggctgaaacatgatctcatattaatattttaatatttcttttcaaaataaaacagaaaagcaagtagaatgttggcaaattttatctgatttgaccttgttttgagggaatagtcataatttctttgaaagaagttatttctcactgattttggctaaacagtattcatatttcttcatctctgttactgaccacttttcagtagactgtttccaaaatgtgtattcacattgactttctccctgatgtgaattccgtgtgggttttagataatagtaagagagaagagattgctctcctatattcagtgaatgagaagggaacttttttctgaagagcaaaattggtgcccaaaaatattggacatctgttttttgtttttttttttttttttttttttttttgagacggagtctcgctctgtcacccaggctggagtgcagtggcgtgatcttggctcactgcaacctctgcctcctgggttcacaccattctcctgcctcagcctcccaagtagctgggactacaggcacccgcaaccacacccggctaattttttttgtatttttagtagagatggggtttcaccatgttagccaggattgtctccatctcctgacctcgtgatccacccgccttggcctcccaaagagctgggattactggtgtgagccaccgtgcccggcctggacatctggttttaactagatggaagggaagaacattatgaatctttaaaatacggctgttgccatttttctctcttcttaacatgcagcataggtgacaagcttttctgtcatcatcatggagcattctgaatcatgacatttttgtttgagagttcattcttgaattttcagttcaaaatattgtttgaactattattccacattcaaagattatataaggtcctgtgcttttgaatctttttcaaaacatttatttctgcctgcttaaaaaaaatacttttatttccccacagagagttcaggacttcagattagtttgtgttcagctcacttaactggatagacaattttgcgttttgcaacaccatcctgtaggttttctttactagtcaaagtgtaggtctttttaaaatttttaatctttatttttatttttattttgaaacagagtctcactctgttgcccaggctggagtgcagtggtgtgatctgtgctcactgcaacctctgtcacccgggtttaagcgattcttctgcctgagcctcccaagtagctgggattacaagttcctgccaccgtgcctggctaatttttgcagttttagtagaggcagggttccaccaccttggccaggctggtcttgaactcctgacctcatgatccacccaccttgtcctctcaaaatgcttacaggcatgaaccactgtgaccggccaggtctttttttttttaaagagtctatcctaggcttggtacagatggcgcctgtggtaaatctgtgttaacatggtggtagaccatggagaatgggtagatggagcttctagactccaaaacaacaaaaccacagtgtgagtacactgtcccattaggttgactgaagtctgagtacattttctggcctgcgtgccgtgacttatccaacctgtgaactgattgtgatctgcttggtaacttggtttggtgtaaactgctcttaaccctttgctgatgaagaaaataatcatataagtggaactatttgcatctaaaaaaaaaaaaaa

SEQ ID NO: 234 - DNA, 2225 bp, HOMO SAPIENS
agtgacgtctttgccccgcgccgcgccgtcccacccatctccctggcctccggtcccaacttcgcttctctgctgaccctctctcgtcgccgctgccgccgccgcagctgccaaaatgtctacaggtccaactgctgccactggcagtaatcgaagacttcagcagacacaaaatcaagtagatgaggtggtggacataatgcgagttaacgtggacaaggttctggaaagagaccagaagctctctgagttagacgaccgtgcagacgcactgcaggcaggcgcttctcaatttgaaacgagcgcagccaagttgaagaggaaatattggtggaagaattgcaagatgtgggcaatcgggattactgttctggttatcttcatcatcatcatcatcgtgtgggttgtctcttcatgaagaaccagcggaactcaaaactgctgttcaagaaacctcttcaagacttttgacttagaacctgctatattatcaagcttacctactgttatctctaaaattttttttgtgttaatgtaaagttgaatttctaggaaacgtgcctttgttttttaatatgcactccaaattagaaggccggccccgtccacattttgcacagtgcctttacagatttacgtatgggctgatgaagaggccttcttaagttccagagtgctataatctagatgtaatgttgtcactaattaattgccattactcccagttagttacccttgtcatttggcattattttcagaaccacattttaaacctttgggtaatcagatttccaacttatgccttccagaaaaaaacactactgcctaacacaaatctgtgataacaacaggctgtgccttattttgataattttctgattccctagaagagaaccctctactttttgtaagcactactgactctcgctgtatttaagatgctggtgaagagcttttgctcttgcattagatttgaagatgtttacattgttgttattgttatgtatcacttgctaaaaatattgttttaatcagagataacctctttaaaaaaatttttaaagaactatggctatgaccaaagcttctattttgccaaaaagttaaataccgataaaatggccttaagtgtattcctgacagttaaattcagaaacgtgccaaatggaactcaaggtgccccttcagaattaaaatcattaccttgtgtgtgaaccttctacatcttcataggcctttcttccttttgaaaggctgtagacagtgtggctccccttctgattcagtattttgcatgggggttagagaaggtttgaggtagactctgaccgtctcataaaagagttctacccagcagttggcagattatcagctgtggactccagcatgtttctgataattatgcaagcaacaattctgtagcctcaagtaagaccacctgtgaacttgatcattatctggcccaaatatgaagataaactataactttggagtttgtttcctatttgtattcacattctgcttcctaaatcagttttctaaattatgcctgcaattaggcattggtcaggggtgaatggctcttttcacagagagtagccaaccagagacctttgctttgatatcatcaactgcagagaatgctgttgatgggaatgctggaagcagaaactttgtcatcggaaaaacttttcttgtatgcatgagactcaacatcaggatccacagcttaaagatgggaattcaggtatgaaagaaaacaggcaaggaggcactgagggagaaagacacagactttatcgctctgtggctcattgttactggaatattctaaaactcttgttcacatgctattatgacttataaagcagcaacagctgaggcgcaccaggacacagcttccatttctttaacgtctgttcccttaacatcgctgaaatgatttactgttgaagagatgccttgcggtgtggccagctgtgaggagaaagcagctggcagtgttaggacattagtccaccttcagcgcagggtctctggccgggtctgactcagaaaccttggtactcgccccttggccacagtgcccagacccatgtaacccactggctcctgcattaacccagaaatacctcgcttctatctgtgcacttagctgggaacttacccactgtaatcacctaaataaagtgtttataaacatgaaaaaaaaaaaaaaaaaaaaa

SEQ ID NO: 235 - DNA, 4326 bp, HOMO SAPIENS
gctgagcgcggagccgcccggtgattggtgggggcggaagggggccgggcgccagcgctgccttttctcctgccgggtagtttcgctttcctgcgcagagtctgcggaggggctcggctgcaccggggggatcgcgcctggcagaccccagaccgagcagaggcgacccagcgcgctcgggagaggctgcaccgccgcgcccccgcctagcccttccggatcctgcgcgcagaaaagtttcatttgctgtatgccatcctcgagagctgtctaggttaacgttcgcactctgtgtatataacctcgacagtcttggcacctaacgtgctgtgcgtagctgctcctttggttgaatccccaggcccttgttggggcacaaggtggcaggatgtctcagtggtacgaacttcagcagcttgactcaaaattcctggagcaggttcaccagctttatgatgacagttttcccatggaaatcagacagtacctggcacagtggttagaaaagcaagactgggagcacgctgccaatgatgtttcatttgccaccatccgttttcatgacctcctgtcacagctggatgatcaatatagtcgcttttctttggagaataacttcttgctacagcataacataaggaaaagcaagcgtaatcttcaggataattttcaggaagacccaatccagatgtctatgatcatttacagctgtctgaaggaagaaaggaaaattctggaaaacgcccagagatttaatcaggctcagtcggggaatattcagagcacagtgatgttagacaaacagaaagagcttgacagtaaagtcagaaatgtgaaggacaaggttatgtgtatagagcatgaaatcaagagcctggaagatttacaagatgaatatgacttcaaatgcaaaaccttgcagaacagagaacacgagaccaatggtgtggcaaagagtgatcagaaacaagaacagctgttactcaagaagatgtatttaatgcttgacaataagagaaaggaagtagttcacaaaataatagagttgctgaatgtcactgaacttacccagaatgccctgattaatgatgaactagtggagtggaagcggagacagcagagcgcctgtattggggggccgcccaatgcttgcttggatcagctgcagaactggttcactatagttgcggagagtctgcagcaagttcggcagcagcttaaaaagttggaggaattggaacagaaatacacctacgaacatgaccctatcacaaaaaacaaacaagtgttatgggaccgcaccttcagtcttttccagcagctcattcagagctcgtttgtggtggaaagacagccctgcatgccaacgcaccctcagaggccgctggtcttgaagacaggggtccagttcactgtgaagttgagactgttggtgaaattgcaagagctgaattataatttgaaagtcaaagtcttatttgataaagatgtgaatgagagaaatacagtaaaaggatttaggaagttcaacattttgggcacgcacacaaaagtgatgaacatggaggagtccaccaatggcagtctggcggctgaatttcggcacctgcaattgaaagaacagaaaaatgctggcaccagaacgaatgagggtcctctcatcgttactgaagagcttcactcccttagttttgaaacccaattgtgccagcctggtttggtaattgacctcgagacgacctctctgcccgttgtggtgatctccaacgtcagccagctcccgagcggttgggcctccatcctttggtacaacatgctggtggcggaacccaggaatctgtccttcttcctgactccaccatgtgcacgatgggctcagctttcagaagtgctgagttggcagttttcttctgtcaccaaaagaggtctcaatgtggaccagctgaacatgttgggagagaagcttcttggtcctaacgccagccccgatggtctcattccgtggacgaggttttgtaaggaaaatataaatgataaaaattttcccttctggctttggattgaaagcatcctagaactcattaaaaaacacctgctccctctctggaatgatgggtgcatcatgggcttcatcagcaaggagcgagagcgtgccctgttgaaggaccagcagccggggaccttcctgctgcggttcagtgagagctcccgggaaggggccatcacattcacatgggtggagcggtcccagaacggaggcgaacctgacttccatgcggttgaaccctacacgaagaaagaactttctgctgttactttccctgacatcattcgcaattacaaagtcatggctgctgagaatattcctgagaatcccctgaagtatctgtatccaaatattgacaaagaccatgcctttggaaagtattactccaggccaaaggaagcaccagagccaatggaacttgatggccctaaaggaactggatatatcaagactgagttgatttctgtgtctgaagttcacccttctagacttcagaccacagacaacctgctccccatgtctcctgaggagtttgacgaggtgtctcggatagtgggctctgtagaattcgacagtatgatgaacacagtatagagcatgaatttttttcatcttctctggcgacagttttccttctcatctgtgattccctcctgctactctgttccttcacatcctgtgtttctagggaaatgaaagaaaggccagcaaattcgctgcaacctgttgatagcaagtgaatttttctctaactcagaaacatcagttactctgaagggcatcatgcatcttactgaaggtaaaattgaaaggcattctctgaagagtgggtttcacaagtgaaaaacatccagatacacccaaagtatcaggacgagaatgagggtcctttgggaaaggagaagttaagcaacatctagcaaatgttatgcataaagtcagtgcccaactgttataggttgttggataaatcagtggttatttagggaactgcttgacgtaggaacggtaaatttctgtgggagaattcttacatgttttctttgctttaagtgtaactggcagttttccattggtttacctgtgaaatagttcaaagccaagtttatatacaattatatcagtcctctttcaaaggtagccatcatggatctggtagggggaaaatgtgtattttattacatctttcacattggctatttaaagacaaagacaaattctgtttcttgagaagagaatattagctttactgtttgttatggcttaatgacactagctaatatcaatagaaggatgtacatttccaaattcacaagttgtgtttgatatccaaagctgaatacattctgctttcatcttggtcacatacaattatttttacagttctcccaagggagttaggctattcacaaccactcattcaaaagttgaaattaaccatagatgtagataaactcagaaatttaattcatgtttcttaaatgggctactttgtcctttttgttattagggtggtatttagtctattagccacaaaattgggaaaggagtagaaaaagcagtaactgacaacttgaataatacaccagagataatatgagaatcagatcatttcaaaactcatttcctatgtaactgcattgagaactgcatatgtttcgctgatatatgtgtttttcacatttgcgaatggttccattctctctcctgtactttttccagacacttttttgagtggatgatgtttcgtgaagtatactgtatttttacctttttccttccttatcactgacacaaaaagtagattaagagatgggtttgacaaggttcttcccttttacatactgctgtctatgtggctgtatcttgtttttccactactgctaccacaactatattatcatgcaaatgctgtattcttctttggtggagataaagatttcttgagttttgttttaaaattaaagctaaagtatctgtattgcattaaatataatatgcacacagtgctttccgtggcactgcatacaatctgaggcctcctctctcagtttttatatagatggcgagaacctaagtttcagttgattttacaattgaaatgactaaaaaacaaagaagacaacattaaaacaatattgtttctaattgctgaggtttagctgtcagttctttttgccctttgggaattcggcatggtttcattttactgcactagccaagagactttacttttaagaagtattaaaattctaaaattcaaaaaaaaaaaaaaaaaa

SEQ ID NO: 236 - DNA, 2964 bp, HOMO SAPIENS
gctgctgcactgacggcgggtgcccgcgcctcagagttactgatttattcttgagattcctctactctcgttatctgacctcatggatgaacttcaggatgttcagctcacagagatcaaaccacttctaaatgataagaatggtacaagaaacttccaggactttgactgtcaggaacatgatatagaaacaactcatggtgtggtccacgtcactataagaggcttacccaaaggaaacagaccagttatactaacatatcatgacattggcctcaaccataaatcctgtttcaatgcattctttaactttgaggatatgcaagagatcacccagcactttgctgtctgtcatgtggatgccccaggccagcaggaaggtgcaccctctttcccaacagggtatcagtaccccacaatggatgagctggctgaaatgctgcctcctgttcttacccacctaagcctgaaaagcatcattggaattggagttggagctggagcttacatcctcagcagatttgcactcaaccatccagagcttgtggaaggccttgtgctcattaatgttgacccttgcgctaaaggctggattgactgggcagcttccaaactctctggcctgacaaccaatgttgtggacattattttggctcatcactttgggcaggaagagttacaggccaacctggacctgatccaaacctacagaatgcatattgcccaagacatcaaccaagacaacctgcagctcttcttgaattcctacaatggacgcagagacctggagatcgaaagacccatactgggccaaaatgataacaaatcaaaaacattaaagtgttctactttactggtggtaggggacaattcgcctgcagttgaggctgtggtcgaatgcaattcccgcctgaaccctataaatacaactttgctaaagatggcggactgtgggggactgccccaggtagttcagcctgggaagctcaccgaggccttcaagtactttttgcagggaatgggctacataccatctgccagcatgactcggctcgcccgatcacgaacccactcaacctcgagtagcctcggctctggagaaagtcccttcagccggtctgtcaccagcaatcagtcagatggaactcaagaatcctgtgagtcccctgatgtcctggacagacaccagaccatggaggtgtcctgctaagcagatgctcctcccctggaccattgcaagtccatccttcaaatgaccactccataatataacatttcatccagtaaactggcctctactatctttaactcatgcatggccactgaacctctctctagtagcctggatttatcattctctctgcctgcccacccccttttttgtatagcccaagaaccacttccatgccatactgtaacattccaacatctttagctgatcagatctctccatatcctctcttgccagctttttcccgtgctcccccaactatgtatcagataagattctttgatcccgactctgtgtgtgcgagcacgcgtgtctgtgtttgtgtgtgcatagttctgtggttttagacacgctttcttgtagtgcttctgcaaaaaacaaaaaagggacttattttgcattctcaatggtgtttttaagggaattaggcagaacagatttctaggttgggtaggccactgcattctcttttgtttgcaaattggtcaacaaaatttgcaaagtgatttcaggagagagcagctttgaggaatgtggaaaatcataattgccgtctggaccattgattgattgtgaccagtagcagaagggtgcctgttacatagagaggctccttctgtccaaatgaatttctgtatactcttctataaataaaagggaggaatatattctgctggaagcccatgaaccatcgctgaggttctgatacaacatagagttttttccaaggagtgaatgtggtttaattactggactctcttagcacaggaaggtggaaacaaaatgccaggcctctgctctgaagagcaaaactgctgtcgctgcagtatctgataccagacatccacatatccacaagaagtgcctcttaggtctgtgacagagagtgtgtctccattcctcagttcccagaaaggggagaggtttggcctaaaaagcatgtagatgggggagaaatgggtggggggagaggaacagccattaacacagtatcatgtttaacaagtatagccttgatttcagtagatgtaatggaagccaaattaaattgatacagaacccatttctcagagtctttttttttttttgagacagagtctcgctgttacccaggctggagtgcaatggcgcaaacttggctcactgcaacctctgccccctgggttcaagcgattctcctgcctcagcctcccgagtagctgagactacaggcacctgccaccatacccagctaagttatgtatttttagtagagatggagtttcaccatgttggccaggctggtctcaaactcctgacctcaggtgatccacctgcctcagcctcccaaagtgctgggattacaggcatgagtcattgctcccagccattagaaagattgttaatcctatgaactcccttttgtaggagagaaagggccaatctgtaggggtagccctgtccaggtaaagttgttttcagcctcatgtctactgttaggtgagggagtcacagccagacagagagtattgctggagggtgagagaattgtggagaccaactaccacatagcaagagcccagctcttgggagcattgagatgtaagctcagggttacacagttccaaatcttgggaaggggcttttcagacagactgtttgctttctgctgagataaggaatgcatcactctgccagagtatgactttttacagattattaaataaagctgcatatgtctcattgttacctga

SEQ ID NO: 237 - DNA, 5080 bp, HOMO SAPIENS
ccgccgaccaccgaagggggcatcagagaccctcggagaaaccaagcccagggaggagcttggaaggcaaggagaagggattcctggtcacctcccttgctcttttcttcctggatgaaacaagaagataatcagggtgtctgtgcacaccaggactcagaagacaaagggatgggttctgattttgaggactctgaggacagggaaggggacccagaagaaagagaaatgggctctaatccacatgacacaaacaagagagaaggccatccggagccggagatgggctccaacccacaggactcaaggcacagggaagcagtgcccgacatctgcacagaggggcagctgagtgaggaagaaggcgtttctgtccgtggggaagaggatgaccaatccggtgtagctgacatggcgatgttcccaggactgtctgagtctgacagcatatcccggagcctccgggaggacgacgacgagagtgctggggagaaccggctggaggaggaagaggagcagccggcccctcccgtacttccctggaggcgacatctctccctggggagtcggcaccgaggtgacaagcccgcccaccgccgcttccaccggctccaccaccccatggccgtggacctcggggagctggatagcctggtggccagcatcatggacgcgcccaccatctgccccgactgcggggagagcttcagtcctggcgccgccttcctgcagcaccagcgcattcaccgcctggctgaggccgctgccgccgccagcctggagcccttcggcctggcgggcgagtgcgacgcgatggtgggcatgatgggggtgggtgtggcggggggcttcggggccgggcccccgctggcccggcccccgcgcgaaaagcccttccgctgcggggagtgcggcaagggcttcagccgcaacacctacctgaccaaccacctgcgcctgcacacgggcgagcggcccaacctgtgcgccgactgcggcaagagcttcagctggcgcgccgacctgctcaagcaccggcgcctgcacacgggcgagaagccctacccgtgccccgagtgcggcgaggccttcagcctcagctcgcatctgttgagccaccggcgcgcgcacgcggcggccagcggcgcgggggcggcggcgctgcggcccttcgcctgcggggagtgcggcaagggcttcgtgcgccgttcgcacctggccaaccaccagcgcatccacacgggcgagaagccgcacggctgtggcgagtgcggcaagcgcttcagctggcgctcggacttggtgaagcaccagcgcgtgcacacgggcgagaagccctacatgtgctccgagtgcggcgagaccttcagcgtcagctcgcacctcttcacgcacaagcgcacgcactcgggtgagcggccctacgtgtgccgcgagtgcgggaagggcttcgggcgtaactcgcacctggtgaaccacctgcgcgtgcacaccggcgagaagcccttccgctgtggccagtgcgagaagcgcttcagcgacttctccacgctcacgcagcaccagcgcacgcacacgggcgagaagccctacacgtgcatcgagtgcggcaagagctttatccagagctcccacctgatccgccaccgccgcatccacacgggcaacaagccgcacaagtgtgcgggctgcggcaaaggcttccgctataaaacgcacctcgcgcagcaccagaagctgcacctgtgttaggggctgggtccgcgggaggctgccgtctggggagcctgtggggggtagatatcctgggactgacccaggggaaggaagtggggaaggggcgggagggacaatctgagagtgactggggagcctttggtgtttggggtttcctgaagtgggaggagtgttgagtaagttggtctttcccggtgctatacttgcctcctctccacggaagaattgttcaggagatgcgcttggggtgatgacttccttaaatacacgctgtagggggtgaagagcttggaggaccaggcactttgaggaagggcagttcgtgggctggggtgggaacaggatggcgggcaatagactagggtaggccgcgatggcctgtagaaggttgcggggagagggtttaaatgagggttatggggcgaaataaaaccaagtataagtgattctatcttggtcccaccaagagtttgcccgatctccacacatcacctgttgtctcacaaaaagtaggggaaccttgtcagtcacataggacaggatatttaatgtacttttcctttctctgagccacagttagctgctattttgaggcatccaaggggaagtgggctgaaaaacgccacactcatttcaaggggcaatgtctggggtttagaaattcatttataactggttctctgatgtgggaaatcctgattctgtcccgggttctttgctacttccttgaaaatactctagcttcatgctgggtcaaggtggtttacctggatgacccccctcccccgccctcgcccatcccaggtgtgtgccacacccagtatttctttcaggtctcaactgtggtgttttaagtgcagggaaaaggaacaatcacagctatgtgtgactttccttttcccacctcaccttgatgtaggtgtttcaagtgaactttagaccaacagttgcccagtgacctgctaaaaagtcaactagctcagagttttgctggcctttatgtgagaaatccaagaaagtgttcacttttttgggatgcgagactccttggtctcatttgccttcactttgcatttgttagtgacctccactaacccccacttccatgcatattgacgagggatctagtctaagtaagaatgtcttttgcctgcgcgtggaggcacagtagaaatctcaaggctttacccagaagagcccagtcagggagaggtgtaaatgcaaaattgccaaatagcacaaacaatgaatgttttctggttgttatatagatgccaaaatagcactttgatatttgcaaagtgctttatgctttttaataattgttagctgtttctcacatcattgtgagttagatcagtattatgaccgctgtcttagggaaggcctgggaacaggagtgtgcaggctgtcctgaagagaggctgaggacagtgtgaataattgtagcctgaccttttgcattctccagctcagctgctaggaagacttacttgtcatgatttatataataaaattaaggacactgaaaattcttatgcttgatgaaaaacttaaggctagcctagaagggccaaacatgtccttattgacaaagctggtctttgtcgcctaattagggtatcctagctatgttccatttctagtaaggggctgtagttagatgactcttgtatagatttcagttacttatgctgaagatccctgtgctaggttagcctttagaagttagagttgtggaaagcagtattgttttcttctctagtgattgttaccctacacatttcatggaagcatcttcacaaaatatcagacacagtggaagggggaaaaaaagctacgagattgtttttacacttttagcaaagtttctgtggatgctagtaatttatacttgatcagttgtattctagtaaagaacctctttggggactgtaggaaagcatgtttttgtggttataaaaacacttaaaaatcctgataattctgggcttgtataatgcctgttgatcttgccctcttaatcagtttattgttattcacaaatgcaaataggttttcaaactacagacagttttgaaagacattaattctcattttcttctagtcaggagtaatacaagcaaacaagtgtccgttttgaattctgatttgtaatctgaatactaaacatattagacccacctgaaaataatatagccaatttctaggtaatcttactgctttgtgggtttctttccatgtacatctacctcttccagctgttttaagttttctcaagtctgtgcctatgaaatctcatccaacttttgattattcatggattgattatccgctttttttttgcttttttgctgccattgctatgcctggtctcgtctgcatcaaatatactacatatcagcaactttagagaatgggttcaacagggagtggagagtgaagctaatgtaaaatagtttagtggcagtgggaatctttggacttcatttacctctctcattatttctattaccatggataaaaaagtcagctgctacgttgatatcccttctatgagcacattcttagcagaagaaaacaatccaactaccaacacccgactctattggtgcatttaaaatgtgattccattttttcttacaattcttcagggaacttacctgcattaagtgaggttaaatgcattcaggaggttgtttgtttcttctatctagttttagaataatatttcttcggcaaaccctgctaactgcggttcacccttgaaaacgttaatctgaggactttttccaccaactcattaatgatggtggaagcaagtgtattatttgtttcctggagaatttgatgaagagcagtcttcctctgctgccctttactaagcaaaacctggagcaatttaaataggctaaatggttttgattaaatcttgagctccgagttggaaggagaaaatgagaagttaaccccttgagccatgtggtctctttacaatcaagagactgtacatatgtgaaaaaatacaaattaaggacctgtgttcatagacaatctaaactgtgtttctgaagtttgtgcacatttttcttcactgtaatgttattttacagctgtttgttaaaatagtgaataatttaatgatcctaaaagtaacaggtttcgtgtgagtgtgcttgtatacgtgagatttgccttattttcaggttgttttatttaacgatggttccttggacagcattctggtgttcagcaaccaatatggaatatttgtcattaaatccatatcagtcttttaccatgtcattcttctttgccacacattaaatgtcactcagctcta

SEQ ID NO: 238 - DNA, 4087 bp, HOMO SAPIENS
actcctcctctctgcccctcagctcgctcatctttcttcccgccccctctcttttccttctttggttctttgaagtgatgagctagcgcaaccacaaaccatacattccttttgtagaaaaacccgtgcctcgaatgaggcgagactcagagaggacccaggcgcggggcggacccctccaattccttcctcgcgcccccgaaagagcggcgcaccagcagccgaactgccggcgcccaggctccctggtccggccgggatgcggccggtacccgctccccgccgggaacaacctctccactcttcctgcagggagctggtgccagccgacagccgcgccagggccgctccgggtaccagggtcggatcgggtgacgtcgcgaacttgcgcctggccgccaagccggcctccaggctgaagaaggacccgccccggccttgacccgggccccgcccctccagccggggcaccgagccccggccctagctgctcgcccctactcgccggcactcgcccggctcgcccgctttcgcacccagttcacgcgccacagctatgtgtccccgagccgcgcgggcgcccgcgacgctactcctcgccctgggcgcggtgctgtggcctgcggctggcgcctgggagcttacgattttgcacaccaacgacgtgcacagccggctggagcagaccagcgaggactccagcaagtgcgtcaacgccagccgctgcatgggtggcgtggctcggctcttcaccaaggttcagcagatccgccgcgccgaacccaacgtgctgctgctggacgccggcgaccagtaccagggcactatctggttcaccgtgtacaagggcgccgaggtggcgcacttcatgaacgccctgcgctacgatgccatggcactgggaaatcatgaatttgataatggtgtggaaggactgatcgagccactcctcaaagaggccaaatttccaattctgagtgcaaacattaaagcaaaggggccactagcatctcaaatatcaggactttatttgccatataaagttcttcctgttggtgatgaagttgtgggaatcgttggatacacttccaaagaaaccccttttctctcaaatccagggacaaatttagtgtttgaagatgaaatcactgcattacaacctgaagtagataagttaaaaactctaaatgtgaacaaaattattgcactgggacattcgggttttgaaatggataaactcatcgctcagaaagtgaggggtgtggacgtcgtggtgggaggacactccaacacatttctttacacaggcaatccaccttccaaagaggtgcctgctgggaagtacccattcatagtcacttctgatgatgggcggaaggttcctgtagtccaggcctatgcttttggcaaatacctaggctatctgaagatcgagtttgatgaaagaggaaacgtcatctcttcccatggaaatcccattcttctaaacagcagcattcctgaagatccaagcataaaagcagacattaacaaatggaggataaaattggataattattctacccaggaattagggaaaacaattgtctatctggatggctcctctcaatcatgccgctttagagaatgcaacatgggcaacctgatttgtgatgcaatgattaacaacaacctgagacacacggatgaaatgttctggaaccacgtatccatgtgcattttaaatggaggtggtatccggtcgcccattgatgaacgcaacaatggcacaattacctgggagaacctggctgctgtattgccctttggaggcacatttgacctagtccagttaaaaggttccaccctgaagaaggcctttgagcatagcgtgcaccgctacggccagtccactggagagttcctgcaggtgggcggaatccatgtggtgtatgatctttcccgaaaacctggagacagagtagtcaaattagatgttctttgcaccaagtgtcgagtgcccagttatgaccctctcaaaatggacgaggtatataaggtgatcctcccaaacttcctggccaatggtggagatgggttccagatgataaaagatgaattattaagacatgactctggtgaccaagatatcaacgtggtttctacatatatctccaaaatgaaagtaatttatccagcagttgaaggtcggatcaagttttccacaggaagtcactgccatggaagcttttctttaatatttctttcactttgggcagtgatctttgttttataccaatagccaaaaattctccttgcctttaatgtgtgaaactgcattttttcaagtgagattcaaatctgccttttaggacctggctttgtgacagcaaaaaccatctttacaggctcctagaagctgaaggttagagcattataaaatgaagagacagacatgattactcagggtcagcaacctagtgagttagaaaaaaaattaacatagggccctataaggagaaagccaactatgttaagtttacgtgtccaaattttaatgaaattttactaacaattttaaaccatatttttcttcttcatatccatttctaatccatcaaacagcttatgtttacataaaattttatcattcacaaggaagttttaagcacactgtctcatttgatatccacaacttatttttggtaggaaagagagatgtttttcccacctgtcagatgaaaaaactgaagctcaaaaagggttgacttgaccatacagctaatgctgacagatccaagacctagacctaggtcttttgaactcaagtccagcattctcaactatatcaagttactgttcagaatacttaatatctcctctcttcataattatcaatagccccaagctcatggatgacaaatctctgctttatttcttgtctctattttttcactttatagctcctgttataatagcaagtttaatggtataaacacaggataccatcctctcttgcaacacccatgtgcctttgatgagtcaggtagcaagctgtagtagataatgagaaaggccagaggctgcaaaagacagtcaaaggacacgagagaaaggaaggggaagaacaggactccaggactgttttatattatagaaaagcaagagctaaagagcatttacacatgttaaacagatacttgttaagcatagtgcctgacacacggcattagctgttattttatgagattccatcagctctgcctctgtcctctttcttctaacatgaaggtatcatgagaagagaaccttctaacataagctgtaattctaaacctgcacttgtccctctccagcaagaggctagcactgaattcattctactcatactacacacccagttatggaatgtccagagttctcgaagaaaataaatgactttaggaagaggtatacattttttaagtcgctctgcctccaaatctgaacagtcactgtaaatcattcttaagcccagatatgagaacttctgctggaaagtgggaccctctgagtgggtggtcagaaaatacccatgctgatgaaatgacctatgcccaaagaacaaatacttaacgtgggagtggaaccacatgagcctgctcagctctgcataagtaattcaagaaatgggaggcttcaccttaaaaacagtgtgcaaatggcagctagaggttttgataggaagtatgtttgtttcttagtgtttacaaatattaagtactcttgatacaaaatatacttttaaacttcataacctttttataaaagttgttgcagcaaaataatagcctcggttctatgcatatatggattagctataaaaaatgtcaataagattgtacaaggaaaattagagaaagtcacatttagggtttattttttacacttggccagtaaaatagggtaaatcctattagaattttttaaagaactttttttaagtttcctaaatctgtgtgtgtattgtgaagtggtataagaaatgactttgaaccactttgcaattgtagattcccaacaataaaattgaagataaaaaaaaaaaaaaaaaaaaaaaaaaaaaaaa

SEQ ID NO: 239 - DNA, 1161 bp, HOMO SAPIENS
acacgtgtgagcctagaggcgggtcccggttgcagacttgccatggcctccgaagcttctgtgcgtctaggggtgccccctggccgtctgtggatccagaggcctggcatctacgaagatgaggaggggagaacctgggtgactgtggtcgtgcggttcaatccctcgcgtagggaatgggccagggcctcccagggcagcagatatgaacccagcatcacagtgcacttgtggcagatggcagtgcatacccgggagctactctcctccggccagatgcccttctcccagctgcccgccgtgtggcagctctaccccgggaggaagtaccgagcagcggattccagtttctgggaaatagcagaccatggccagattgactctatggagcagctggtcctaacatatcagccggagaggaaagactgacactgggagtggctggccctgctggccctgcctcttctggcctggtgtctcctcatgccccctcagtgaggatcttcatgtacctgctcttctgtttgcacacccagcatagcctccttgcaggcagaaggcagtagggcccctgcacactcagtttctctcgttttccttagttatcagtcctgtcctgtcccactcaggtctgtacttagggcagctggcctggatgggcttcactggggccctgtctgtgtgctgagccagtttcccctgctggctgcaagctgtgggttctttctcctctgtgcccctcatgctgatcttctagatgccactcccaaatccccttcatacccaccaggatgtgtgcccagccaggcctccagcacccccagtgcagctcgtgattggaaactcaccatcggcaggcagtggttcggtttaagagatggcattagagggagcccagtctggatgtggacttggatgccctgtgggtatcagttctgctgacactttggcccgaaatagatccagtgctgagcaagcaatgtacaccagagcctcagtgagcccatctgcacagtggggagcatggagggatgggtttggcctgtgcttctgcttattcagtccttcagctcacggaagggatgctagtccgtgaaggtgacctcacagtactggttaattaaactttattgctcactgtccaaaaaaaaaaaaaaaaaa

SEQ ID NO: 240 - DNA, 3305 bp, HOMO SAPIENS
tgcctgcttctctggatgctccagcaaacatgagccaccaatttagttctcagtccgcgtttagttcaatgagcaggcgggtttatagtaccagctcttctgcaggctctggtggtgggagtccggcagtgggttctgtgtgttatgctcgagggaggtgtggtggtggtggatatgggatccatggaagggggtttggctctaggagcctctacaatctgggtggcagtagaagcatctccattaatctaatggggaggagcaccagtggtttctgccagggtgggggagtagggggatttggagggggcagaggctttggggttggcagcaccggggctggtggctttggaggaggtggttttgggggtgctggatttgggactagcaattttgggcttgggggctttggtccttattgtcctcctgggggcatccaagaggtgaccattaaccagagcctcctagagccacttcacctggaggtggaccctgaaattcagaggatcaagacccaggagcgggagcagattatggttctcaacaacaagtttgcctccttcattgacaaggtgcgattcctggagcagcagaaccaggtgctacaaacaaaatgggagttgctgcagcaggtgaacacctcaactggaaccaacaacctggagcccctcttggagaactacatcggtgacctgcggaggcaggtggatttgctcagtgcggagcagatgcgccagaacgcggaggtcaggagcatgcaggatgtcgtggaggactacaagagcaagtatgaggatgaaatcaacaagaggactggcagcgagaatgactttgtcgtcctgaagaaggatgtggatgctgcttatgtgagcaaagtggacctggagtccagggtggacactctgactggggaggtcaatttcttgaaatatttatttttgacggagctgtctcaggtgcagactcacatcagcgacaccaacgtcatcctgtccatggacaataaccgttccctggacctggacagcatcatcgatgcagtgcggacccagtatgaactgattgcacagaggagcaaggacgaggccgaagccctgtaccagaccaagtaccaggagctccagatcacggcagggagacatggagacgacctgaagaacagcaagatggagattgcagagctcaaccgcaccgtccagaggctgcaggcagagatcagcaacgtgaagaagcagattgaacagatgcagtcactcatttcggatgctgaggagagaggcgagcaggccctccaggatgcgtggcagaagctgcaggacctggaggaggccctgcagcagtccaaggaggagctggcccggctgctgcgtgactaccaggccatgctgggggtcaagctgtccctggatgtggagatcgccacctaccgccagctgctggagggcgaggagagcaggatgtcaggagagctgcagagccatgtgagcatctccgtgcagaacagccaggtgagcgtcaacggcggcgcgggaggcggcggcagctacggctcaggaggctacggcggcggcagcggtgggggctatggcggcggaagaagctaccgcggaggcggggcacgaggcaggagtggaggcggttatggcagcggctgcggcggcggtggcgggagctacggagggagcggcagaagcggccgcggatcctcgcgcgtgcagatcatccagacctccaccaacacctcccacaggcggatcttggagtagaggcctcgtttctgccacacatcacgcctgcccctcaccgccctctcctcaaactcctcccctccacgcccttcctgatcccctctcattcacttttcttaatgggtctcagcaattttgccaataaattcgactctaatgggggaagcagggtggataagtccaaacagcagatctctctttggagggcactggcttgcagtcagattcacagctaggcacattctcactcagaccccgctctgctggccctgctgctgttcctgctcccacctttttggaagatcggtagcccagggtgagcacaaacattccagttagaggcagaggctgcgtgagttggcaaggtagggagaagtcattgttatcattcctctgcctccaagtagaatgcccttatgccccagttcaagccactgcagctaagtattaatccccagtgctaaaagataccaggcatctagtttagcaatggagggaaacagaaacagcctgtagagagcatcgacaaggcgcataatggagagttggtatctcaaccccaagctccctttgctgtacctgggctgctctgtgaacaagaatccacgcccccctgccctgctggggaccacataatgatccctttgggggaagttgctgattgcagggcaagctagcttggtaaggaaaacctctgcaccagcggcctattcctgcctcttggtccatagcctcatacactcatgttgatggatagtatagatttgctgcccacaccagatatctgtaaggcatcactgtcctgattctgaacctctgtttcaggaagcattctcccctgtgtaaacaactcaaggtggaagtatttcagagggcatagggtcatgaatccttacccaaaggaagcctgttttagcagtggatgcaggagttgatgaacagacaagcaagttctgcttctgtcctgtttcctcctgacagctccattcttttgaagcctgacccttcctaagctctgcatcataaccactctgagaattgccccattgggtgggcatgtgaagcccagctctgttccatccaggtgcctcgggcctgaggagtctgaggatctgacttgggtcttggaagggttccaaccccaagtcagtcaggaagctgcccatttttttgcaaggcattttaatgccctttcccagacctctctagtccctcctgccttctgttctctgtagctgtgagccctttgtgagaatatgactcttaattttgaatcttatgtaagaggcttgagatgtgctggagagggcaggaagaggaaagtatcaggccttgagagagggaatgtagctttgcttctatgatctggagtcaccttcacttgctagctgagtcctaacacaacttccaagtccatgattctcttggggcattggatgggctcagtgtgggtctcttaggctgttcttgtgacttcatcatttcctggttcaaagttgtactgtcaaggggcagcatttctggtatttctataataaatttttctgtgatctcaaa

SEQ ID NO: 241 - DNA, 3680 bp, HOMO SAPIENS
gtcattggaggagcttgaagttaaagactcctgctaaaaaccagtacgtttcattttgcagttactgggagggggcttgctgtggccctgtcaggaagagtagagctctggtccagctccgcgcagggagggaggctgtcaccatgccggcctgctgcagctgcagtgatgttttccagtatgagacgaacaaagtcactcggatccagagcatgaattatggcaccattaagtggttcttccacgtgatcatcttttcctacgtttgctttgctctggtgagtgacaagctgtaccagcggaaagagcctgtcatcagttctgtgcacaccaaggtgaaggggatagcagaggtgaaagaggagatcgtggagaatggagtgaagaagttggtgcacagtgtctttgacaccgcagactacaccttccctttgcaggggaactctttcttcgtgatgacaaactttctcaaaacagaaggccaagagcagcggttgtgtcccgagtatcccacccgcaggacgctctgttcctctgaccgaggttgtaaaaagggatggatggacccgcagagcaaaggaattcagaccggaaggtgtgtagtgtatgaagggaaccagaagacctgtgaagtctctgcctggtgccccatcgaggcagtggaagaggccccccggcctgctctcttgaacagtgccgaaaacttcactgtgctcatcaagaacaatatcgacttccccggccacaactacaccacgagaaacatcctgccaggtttaaacatcacttgtaccttccacaagactcagaatccacagtgtcccattttccgactaggagacatcttccgagaaacaggcgataatttttcagatgtggcaattcagggcggaataatgggcattgagatctactgggactgcaacctagaccgttggttccatcactgccgtcccaaatacagtttccgtcgccttgacgacaagaccaccaacgtgtccttgtaccctggctacaacttcagatacgccaagtactacaaggaaaacaatgttgagaaacggactctgataaaagtcttcgggatccgttttgacatcctggtttttggcaccggaggaaaatttgacattatccagctggttgtgtacatcggctcaaccctctcctacttcggtctggccgctgtgttcatcgacttcctcatcgacacttactccagtaactgctgtcgctcccatatttatccctggtgcaagtgctgtcagccctgtgtggtcaacgaatactactacaggaagaagtgcgagtccattgtggagccaaagccgacattaaagtatgtgtcctttgtggatgaatcccacattaggatggtgaaccagcagctactagggagaagtctgcaagatgtcaagggccaagaagtcccaagacctgcgatggacttcacagatttgtccaggctgcccctggccctccatgacacacccccgattcctggacaaccagaggagatacagctgcttagaaaggaggcgactcctagatccagggatagccccgtctggtgccagtgtggaagctgcctcccatctcaactccctgagagccacaggtgcctggaggagctgtgctgccggaaaaagccgggggcctgcatcaccacctcagagctgttcaggaagctggtcctgtccagacacgtcctgcagttcctcctgctctaccaggagcccttgctggcgctggatgtggattccaccaacagccggctgcggcactgtgcctacaggtgctacgccacctggcgcttcggctcccaggacatggctgactttgccatcctgcccagctgctgccgctggaggatccggaaagagtttccgaagagtgaagggcagtacagtggcttcaagagtccttactgaagccaggcaccgtggctcacgtctgtaatcccagcgctttgggaggccgaggcaggcagatcacctgaggtcgggagttggagacccgcctggctaacaaggcgaaatcctgtctgtactaaaaatacaaaaatcagccagacatggtggcatgcacctgcaatcccagctactcgggaggctgaggcacaagaatcacttgaacccgggaggcagaggttgtagtgagcccagattgtgccactgctctccagcctgggaggcacagcaaactgtcccccaaaaaaaaaaaagagtccttaccaatagcaggggctgcagtagccatgttaacatgacatttaccagcaacttgaacttcacctgcaaagctctgtggccacattttcagccaaagggaaatatgctttcatcttctgttgctctctgtgtctgagagcaaagtgacctggttaaacaaaccagaatccctctacatggactcagagaaaagagattgagatgtaagtctcaactctgtccccaggaagttgtgtgaccctaggcctctcacctctgtgcctctgtctccttgttgcccaactactatctcagagatattgtgaggacaaattgagacagtgcacatgaactgtcttttaatgtgtaaagatctacatgaatgcaaaacatttcattatgaggtcagactaggataatgtccaactaaaaacaaacccttttcatcctggctggagaatgtggagaactaaaggtggccacaaattctttgacactcaagtcccccaagacctaagggttttatctcctccccttgaatatgggtggctctgattgctttatccaaaagtggaagtgacattgtgtcagtttcagatcctgatcttaagaggctgacagcttctacttgctgtcccttggaactcttgctatcggggaagccagacgccatttaaaagtctgcctatcctggccaggtgtggtggctcacacctgtaatcccagcactttgggagaccaaggcgggcggatcacttaaagtcaggagtccaagaccagactcgccaacatggtgaaaccgtatctctaataaaaatacaaaaattagctgggcatggtgcgggcacctgtagtcctagctatcaagaggctgagacaggagaaacacttgaacctgggaggtggaggttgcattgagctgagatcgtgccactgcactccaggctgggtgacagagcgagactccatctcaaaaaaaaaaaaaagaaaaaaaaaatgtctgcctatcctgagactgccctgctgtgaggaagcccaagcagtcacgtggacagtgcctgaccagccccagctttcaagccatccaagcccagtcaccaaacatgagagagaagaagccttcaggtgattctggactccactaacatatgactgataccgcatgatacatcccaagtgagaactgccccataaatccagaaaaccacattgctatcttaagtccctaagtttggggcttatttgttccacagcaacaggtaactggaacagagggcaagcctgatgaatgggcacacagactcagcccataccttccctggttctaatgttctcagggagcccggaccaaccctgggagcctcaggaacttaggtttccactggacagttctagaagggctatagaccaaatcaggtaactcaccagaccagccttggaatctatcaaatctaactgctgagctaccca

SEQ ID NO: 242 - DNA, 1270 bp, HOMO SAPIENS
ctctgcctgtgcgaccgccgcccacccgagcctatctgggctgcgtcttctcgccgctgctcttcgtggcccaacgccccaatccttgcgtgtgcttgcagtcccaccccacactcagccttgtgtccctcgatccagtctccgacttccatttcccaccctaaaccgcctacccggtgtctgttccccgcccggttgtcctcgccctgctgcgctgagtgtcccctgttagcctcgaccccatggcgctgcagacgctgcagagctcgtgggtgaccttccgcaagatcctgtctcacttccccgaggagctgagtctggctttcgtctacggctccggggtgtaccgccaggcagggccgagttcagaccagaagaatgctatgctggactttgtgttcacagtagatgaccctgtcgcatggcattcaaagaacctgaagaaaaattggagtcactactctttcctaaaagttttagggcccaagattatcacgtccatccagaataactatggcgctggagtttactacaattcattgatcatgtgtaatggtaggcttatcaaatatggagttattagcactaacgttctgattgaagatctcctcaactggaataacttatacattgctggacgactccaaaaaccggtgaaaattatctcagtgaacgaggatgtcactcttagatcagccctcgatagaaatctgaagagtgctgtgaccgctgctttcctcatgctccccgaaagcttttctgaagaagacctcttcatagagattgccggtctctcctattcaggtgactttcggatggtggttggagaagataaaacaaaagtgttgaatattgtgaagcccaatatagcccactttcgagagctctatggcagcatactacaggaaaatcctcaagtggtgtataaaagccagcaaggctggctggagatagataaaagcccagaaggacagttcactcagctgatgacattgcccaaaaccttacagcaacagataaatcatattatggaccctcctggaaaaaacagagatgtggaagaaactttattccaagtggctcatgatcccgactgtggagatgtggtgcgactaggcctgaagaagtcagtgatttatagttcactaaaactgcacaaaatgtggaaagggtggctgaggaaaacatcctgattttgcttgcttttatatatgttatgtgtagatgaataaagtgtttgatcctttttgacaaaaaaaaaaaaaaaaaa

SEQ ID NO: 243 - DNA, 2576 bp, HOMO SAPIENS
agtccgggggcatcgcgatgctgctgcgcctgttgctggcctgggcggccgcagggcccacactgggccaggacccctgggctgctgagccccgtgccgcctgcggccccagcagctgctacgctctcttcccacggcgccgcaccttcctggaggcctggcgggcctgccgcgagctggggggcgacctggccactcctcggacccccgaggaggcccagcgtgtggacagcctggtgggtgcgggcccagccagccggctgctgtggatcgggctgcagcggcaggcccggcaatgccagctgcagcgcccactgcgcggcttcacgtggaccacaggggaccaggacacggctttcaccaactgggcccagccagcctctggaggcccctgcccggcccagcgctgtgtggccctggaggcaagtggcgagcaccgctggctggagggctcgtgcacgctggctgtcgacggctacctgtgccagtttggcttcgagggcgcctgcccggcgctgcaagatgaggcgggccaggccggcccagccgtgtataccacgcccttccacctggtctccacagagtttgagtggctgcccttcggctctgtggccgctgtgcagtgccaggctggcaggggagcctctctgctctgcgtgaagcagcctgagggaggtgtgggctggtcacgggctgggcccctgtgcctggggactggctgcagccctgacaacgggggctgcgaacacgaatgtgtggaggaggtggatggtcacgtgtcctgccgctgcactgagggcttccggctggcagcagacgggcgcagttgcgaggacccctgtgcccaggctccgtgcgagcagcagtgtgagcccggtgggccacaaggctacagctgccactgtcgcctgggtttccggccagcggaggatgatccgcaccgctgtgtggacacagatgagtgccagattgccggtgtgtgccagcagatgtgtgtcaactacgttggtggcttcgagtgttattgtagcgagggacatgagctggaggctgatggcatcagctgcagccctgcaggggccatgggtgcccaggcttcccaggacctcggagatgagttgctggatgacggggaggatgaggaagatgaagacgaggcctggaaggccttcaacggtggctggacggagatgcctgggatcctgtggatggagcctacgcagccgcctgactttgccctggcctatagaccgagcttcccagaggacagagagccacagataccctacccggagcccacctggccacccccgctcagtgcccccagggtcccctaccactcctcagtgctctccgtcacccggcctgtggtggtctctgccacgcatcccacactgccttctgcccaccagcctcctgtgatccctgccacacacccagctttgtcccgtgaccaccagatccccgtgatcgcagccaactatccagatctgccttctgcctaccaacccggtattctctctgtctctcattcagcacagcctcctgcccaccagccccctatgatctcaaccaaatatccggagctcttccctgcccaccagtcccccatgtttccagacacccgggtcgctggcacccagaccaccactcatttgcctggaatcccacctaaccatgcccctctggtcaccaccctcggtgcccagctaccccctcaagccccagatgcccttgtcctcagaacccaggccacccagcttcccattatcccaactgcccagccctctctgaccaccacctccaggtcccctgtgtctcctgcccatcaaatctctgtgcctgctgccacccagcccgcagccctccccaccctcctgccctctcagagccccactaaccagacctcacccatcagccctacacatccccattccaaagccccccaaatcccaagggaagatggccccagtcccaagttggccctgtggctgccctcaccagctcccacagcagccccaacagccctgggggaggctggtcttgccgagcacagccagagggatgaccggtggctgctggtggcactcctggtgccaacgtgtgtctttttggtggtcctgcttgcactgggcatcgtgtactgcacccgctgtggcccccatgcacccaacaagcgcatcactgactgctatcgctgggtcatccatgctgggagcaagagcccaacagaacccatgccccccaggggcagcctcacaggggtgcagacctgcagaaccagcgtgtgatggggtgcagacccccctcatggagtatggggcgctggacacatggccggggctgcaccagggacccatgggggctgcccagctggacagatggcttcctgctccccaggcccagccagggtcctctctcaaccactagacttggctctcaggaactctgcttcctggcccagcgctcgtgaccaaggatacaccaaagcccttaagacctcagggggcgggtgctggggtcttctccaataaatggggtgtcaaccttacccaaggaaaaaaaaaaaaaaaaaa

SEQ ID NO: 244 - DNA, 1205 bp, HOMO SAPIENS
ctggtagaccccgccaagcgcctcggagcgcgcaggatgcgctgggcggccgccaccctccgtggcaaggcgaggccccgggggcgggccggggtcaccacgcctgccccagggaaccgcacaggcacgtgcgctaagctgcggctacccccgcaagcaaccttccaagtccttcgtggcaatggtgcttccgtggggaccgtgctcatgttccgctgcccctccaaccaccagatggtggggtctgggctcctcacctgcacctggaaggggagcatcgctgagtggtcttcagggtccccagtgtgcaaactggtgccaccacacgagacctttggcttcaaggtggccgtgatcgcctccattgtgagctgtgccatcatcctgctcatgtccatggccttcctcacctgctgcctcctcaagtgcgtgaagaagagcaagcggcggcgctccaacaggtcagcccagctgtggtcccagctgaaagatgaggacttggagacggtgcaggccgcataccttggcctcaagcacttcaacaaacccgtgagcgggcccagccaggcgcacgacaaccacagcttcaccacagaccatggtgagagcaccagcaagctggccagtgtgacccgcagcgtggacaaggaccctgggatccccagagctctaagcctcagtggctcctccagctcaccccaagcccaggtgatggtgcacatggcaaaccccagacagcccctgcctgcctctgggctggccacaggaatgccacaacagcccgcagcatatgccctagggtgaccacgcagtgaggctggtgcccatgctccacactgggaggccaggctgaccccaccagccagtcagctacaactccacatcaactccacatgcgcccagctcgagactgatgagtggaatcagcttccaggtgtagggaccccttgaggggccaagctgacatccaaggctgaggaccccagtggggagtgttctgttccggcatatcctggccgtaacgatttttatagttatggactacttgaaaccactactgagggtaatttactagctgtggcctcccactaactagcattcctttaaagagactgggaaatgttttaagcaaatctagttttgtataataaaataagaaaatagcaataaacttcttttcagcaactacaaaaaaaaaaaaaaaa

SEQ ID NO: 245 - DNA, 3272 bp, HOMO SAPIENS
aaataaacgtggcgggacgtatgtgtcatggcgctctccatctaaagtctgtgcagcttccggagagtggcgggttgattttctcactttggactggtttttacttcccgacttctggactcatctttcaagaggactttagactaattgcagataattaagagaatatgccttctgcatcctgtgatacactactggatgacatcgaagatatcgtgtctcaggaagattcaaaaccacaagataggcattttgtaagaaaggatgttgtcccgaaggtacgaaggcgaaatacccaaaaatatttgcaagaggaagaaaacagtccaccaagtgacagcactattccaggcatacagaaaatttggatacgaacatggggttgttctcataataattcagatggagaatatatggctggacagctagctgcttatggctataaaattacagaaaatgcatccgatgcagatttatggctcctgaacagttgcactgtaaaaaacccagctgaagaccactttagaaactcaattaaaaaagctcaagaggagaacaagaaaatcgtactggctggatgcgttcctcaagcccagcctcgccaggactaccttaagggactgagtatcattggggttcagcagatagatcgtgtggtagaagttgtggaggagacaattaaaggtcactctgtgagactgctgggtcagaaaaaggataatggaaggcggcttgggggagcacgattggatttgccgaagattaggaagaatccactgatagaaatcatttccatcaataccgggtgtctcaatgcttgtacctactgcaaaactaaacacgccagaggaaatttggccagttatccaattgatgaactagtagatagagccaaacaatcttttcaagagggtgtttgtgagatatggttgaccagtgaagacacgggggcttatggcagagatattggcaccaatctccccacactcctgtggaaactggttgaagtgattcctgagggagcaatgctgaggcttggcatgacaaatccgccctatattttagagcatctggaggaaatggcaaaaatccttaatcaccccagagtctacgcttttctgcacataccagtccagtctgcctccgacagcgtactcatggaaatgaaaagagaatactgtgtggctgacttcaaaagagtagtggattttctgaaagagaaagttcctggaataactattgctacagatattatctgtggttttcctggagaaacagatcaggattttcaagaaacagtgaaacttgttgaagagtacaaattcccaagcctgtttattaaccaattttacccaagaccaggaactcctgctgcaaaaatggaacaagttccagcacaagtgaaaaagcaaaggacaaaagatctttctcgggtgtttcattcttacagtccatatgatcacaagattggtgaaagacaacaagtgttagtaacagaagaatcttttgattccaagttttatgttgcacacaatcaattctatgagcaggttttagtgccaaagaaccctgcgttcatggggaagatggttgaagtggacatctatgaatcaggcaaacattttatgaaagggcagccagtatctgatgccaaagtgtacacgccctccatcagcaaaccgctagcaaagggagaagtctcgggtttgacaaaggacttcagaaatgggcttgggaaccagctgagttcaggatcccacacctctgctgcatctcagtgtgactcagcgagttccagaatggtgctgcccatgccaaggctacatcaagactgtgcgctgaggatgtccgtgggcttggctctgctgggtcttctttttgctttttttgtcaaggtctataattagaatacaactaatggaaacatctataaagaagaatacatttctaattaaaatcttcaatgaacaggaaagcgacatctccattctccaagggcaataatttgtactggtcatgctgcctccttctcagccactcttcttaatgaggctccccctgtctcacattgagttgggcccattggttatttgacctaaaacctaatcaccgctaccatagcacatccttcaaattaaactgcttttggtttacttttagcaagaaatgcaagcggttgcatttttttctgtttgtttcaatctctaatctttaagtcagaacctaattgtacagtggctctggccatcttttcctcatgtggaagaattttctatctttaataaactttttctttgttttttttttccagatggagtttcgctcttgtcccccaggctggagtggtgcagtggcacgatctcaggtcactgcaacctctgcctcctgggttcaaacgattctcctgcctcagcctcccaagtagctgggattacaggcatgcgccaccaagcccagacaatttttttgtgttttcagtagagacggagtttcaccatgttggccaggctagtctcgaactcctgacctcaagtgatccgcccgcctcggcctcccaaagtgctaggattacaggcgtgagccactgcgcccggcctctttaataaatatttttaagtgcatcttccccttcaggctttgtttggagtcccagtgctacaaacattgtatttttcacagcagatgtgttcctgaaaagtgtatagaaacctgttctgggaacctgaatgcttttggaatgcacggggagagtctgccagctaaaggactcctggcaacattctgtgaaatatgaaactggaaaactggatttgtcgaaaactaattgtgcccattttctcacatttttgatccattggggttttttttttgtttttgtttttttttttttttgagtcaaggtctcactctgtcaccctggctggagtgcaatggcactatcttggctcactgcagccttgacctcctggactcaagcagtcctcctacctcagcctccctaatagccaggggctacaggcatataccaccatgcccaactaattttttaattttttgtagagatgagtgtcactatgttgcccaggcttgcctggaactcctagcctcaagcagtcttcttgcctcagcctcccaaagtgctgggattacaggcgtgagccactccacccagcccagattaaatgtttttatttctacctgccatcattggtctttactaagtgaagtgacttctttctttaacaataaatagaattggtatactaagcaaa

SEQ ID NO: 246 - DNA, 1854 bp, HOMO SAPIENS
cttttccggcccgcagcgcggcctgggctcccgcgtgtttaaaagtgcgcttgtggctgctgctgtcttaactcctgtgcttggcggacagacaggcgagatggcggcggaggtgttgccgagtgcgaggtggcagtattgtggggcgcccgacgggagccagagagctgtactggtccagttctccaacgggaagctacagagtccaggcaacatgcgctttaccttgtatgagaacaaagattccaccaaccccaggaagaggaatcaacggatcctggcagctgaaacagataggctctcctatgtgggaaacaattttgggactggagccctcaaatgcaacactttgtgcaggcactttgtgggaattttgaacaagacctctggccaaatggaagtatatgatgctgaattgttcaacatgcagccactattttcagatgtatcagttgagagtgaactggcgctagagagtcagaccaaaacttacagagaaaagatggattcttgtattgaagcctttggtaccaccaaacagaagcgagctctgaacaccaggagaatgaacagagttggcaatgaatctttgaatcgtgcagtggctaaagctgcagagactatcattgatacgaagggtgtgactgctctggtcagcgatgctatccacaatgacttgcaagatgactccctctaccttcctccctgctatgatgatgcagccaagcctgaagacgtgtataaatttgaagatcttctttcccctgcggagtatgaagctcttcagagcccatctgaagctttcaggaacgtcacgtcagaagaaatactgaagatgattgaggagaacagccattgcacctttgtcatagaagcgttgaagtctttgccatcagatgtggagagccgagaccgccaggcccgatgcatatggtttctggataccctcatcaaatttcgagctcatagggtagttaagcggaaaagtgctctgggacctggagttccccacatcatcaacaccaaactgctgaagcactttacttgcttgacctacaacaatggcagattacggaacttaatttcggattctatgaaggcgaagattactgcatatgtgatcatacttgccttgcacatacatgacttccaaattgacctgacagtgttacagagggacttgaagctcagtgagaaaaggatgatggagatagccaaagccatgaggctgaagatctccaaaagaagggtgtctgtggccgccggcagtgaagaagatcacaaactgggcaccctgtccctcccgctgcctccagcccagacctcagaccgcctggcaaagcggaggaagattacctagacgcatgctttccagacagggcgttttggctgcatcacagccactggctggtcctattcatttccatttttatgtatgttttgaaaagaaaaggtccggggatggtggctcacacctgaaatcccagcactttgggaggccgaggcaggaagatcattgagctcaggagtttgaaaccagtctggacaacatggggagaccccatctctaccggaggaaaaaaaaaagagtcaggcctggtggtgtgcgcctgtaatcccagctactcgggaggctgaggcaggacgattacttgagcttgggaaatcaaggttgcagtgagctatgattgtgtggccacactccatcctgggtcacagagtgagaccttgtctcaaaaaagtaacataaggaaaaaagaagccttgctttagcacaggtatgaagccagaagccagcatctcaactgtgcttgtcttatgcagaaatataaagcgatggccaggttggacttc

SEQ ID NO: 247 - DNA, 3686 bp, HOMO SAPIENS; identical to SEQ ID NO: 153

SEQ ID NO: 248 - DNA, 410 bp, HOMO SAPIENS
gactgcagggcacatgtgggaagtgacaggaatttgaggactaacattttagttttcctcatttctttttaaatctgagcaattgttcattgatcgataatctatgttcttacattcagataaataaaaacaccaactggctattttgttcttacttagttttatgtgtatgtccaggcatttgccactgctcctaaatagctctccctgaagtcttctggtcatgagttaggtttcttatccagaagctcatgtagtgccagagcttagctctcctatgacaacgcaatcacattattgaaacatctatttagggatctgtcttctctaatagattataaacgccttgagcttgggtatcgtgatttaatgatgaatcctccatggtatctgaatcccagaatcctaca

SEQ ID NO: 249 - DNA, 3478 bp, HOMO SAPIENS
ctcttcggctccacggctccctcggccgctgccgtttccaacccccccaccccactcccccgccacggcccctagcccctggccgtttggcaagacccccccctaccccggggctccccgaaatccagttcccctcccccaccccagctcatgccccagcccccgaactccggggctgccagcccccggtgcccccgcccctcctgagaatcggggtgtgctccccaagccccctcccctccactggggagccccttttagggcccccttcccctccctcccacgctcccctccccttcccttctccaaccccctccttcccctctcacccctccccccatcctggccccccctgcaaaagtggggtgcggaggggggaggggtgagaacccacggaggggaggaacgaaactccgatgaagtcagagccccttacccgccgccgcggccaggccccccaacatggactgtctctgtatagtgacaaccaagaaataccgctaccaagatgaagacacgccccctctggagcacagcccggcccacctccccaaccaggccaattctcccccagtgattgtcaacacagataccctagaagccccaggatatgtgaacgggaccgagggggagatggaatacgaggaaatcacattggaaaggggtaactcaggtctgggcttcagcatcgcaggtggcactgacaacccacacatcggtgacgacccatccattttcatcaccaagatcattcctggtggggctgcggcccaggatggccgcctcagggtcaacgacagcatcctgtttgtaaatgaagtggacgtgcgcgaggtgacccactcagcggcggtggaagccctcaaagaggcaggctccatcgttcgcctctatgtcatgcgccggaagcccccggctgagaaggtcatggagatcaagctcatcaaggggcctaaaggtcttggcttcagcatcgcagggggcgtagggaaccagcacatcccaggagataatagcatctatgtaacaaagatcatcgaagggggtgctgcccacaaggatgggaggttgcagattggagacaagatcctggcggtcaacagtgtggggctagaggacgtcatgcatgaagatgctgtggcagccctgaagaacacgtatgatgttgtctacctaaaggtggccaagcccagcaatgcctacctgagtgacagctatgctcccccagacatcacaacctcttattcccagcacctggacaatgagatcagtcacagcagctacctgggcaccgactaccccacagccatgacccccacttcccctcggcgctactctccagtggccaaggacctgctcggggaggaagacattccccgagaaccgaggcgaattgtgatccaccggggctccacgggcctgggcttcaacatcgtgggtggcgaggacggtgaaggcatcttcatctcctttatcctggccgggggccctgcagacctcagtggggagctgcggaagggggaccagatcctgtcggtcaacggtgtggacctccgaaatgccagccatgagcaggctgccattgccctgaagaatgcgggtcagacggtcacgatcatcgctcagtataaaccagaagagtacagccgattcgaggccaagatccacgaccttcgggaacagctcatgaacagcagcctgggctcagggactgcgtccctgcggagcaaccccaaaaggggtttctacatcagggccctgtttgattacgacaagaccaaggactgcggcttcctgagccaggccctgagcttccgctttggggatgtgctgcatgtcatcgatgctagtgatgaggagtggtggcaggcacggcgggtccactctgacagtgagaccgacgacattgggttcatccccagcaaacggcgggttgagcgacgagagtggtcaaggttaaaggccaaggactggggctccagctctggatcgcagggtcgagaagactcggttctgagctacgagacagtgacgcagatggaagtgcactatgctcgccccatcatcatccttgggcccaccaaggaccgcgccaacgatgatcttctctccgagttccccgacaagtttggatcctgtgttccccatacgacacggcccaagcgggagtatgagatagatggccgggattaccactttgtgtcgtcccgggagaaaatggagaaggacattcaggcgcacaagttcattgaggccggccagtacaacagccacctctatgggaccagcgtccagtccgtgcgagaggtggcagagcaggggaagcactgcatcctcgatgtctcggccaatgccgtgcggcggctgcaggcggcccacctgcaccccatcgccatcttcatccgcccccgctccctggagaatgtgctagagattaacaagcggatcacagaggagcaagcccgcaaagccttcgacagagccaccaagctggagcaggagttcacagagtgcttctcagccatcgtggagggtgacagctttgaggagatctaccacaaggtgaagcgtgtcatcgaggacctctcaggcccctacatctgggttccagcccgagagagactctgattcctgccctggcttggcctggactcgccctgcctccatcacctgggcccttggtctggactgaattgcccaagcccttggctccccccggcctccctcccaccccttcttatttatttcctttctaactggatccagcctgttggaggggggacactcctctgcatgtatccccgcaccccagaactgggctcctgaacgccaggaacctggggtctgggggggagctgggctccttgttccgagcccttgctccttaggatccccgcccccacctgcccccaatgcacacacagacccaccgggggccacctgccctcccccatcctctcccacacacattccagaagtcagggccccctcgaggagcacccgctgcagggatgcagggccacaggcctccgctctctcctaaggcagggtctggggtcacccctgccctcatcgtaattccccatgttccttgatttctcatttattttttccactttttttcttctcaaaggtggttttttggggggagaagcaggggactccgcagcgggcccctgccttccacatgcccccaccatttttctttgccggtttgcatgagtggaaggtctaaatgtggcttttttttttttttttcctgggaatttttttggggaaaagggagggatgggtctagggagtgggaaatgcgggagggagggtggggggcaggggtcgggggtcgggtgtccgggagccagggaagactggaaatgctgccgccttctgcaatttatttatttttttcttttgagagagtgaaaggaagagacagatacttgaaaaaaaaaaaaaaaaaaaaaaaaaaaaaaaaaaa

SEQ ID NO: 250 - DNA, 2849 bp, HOMO SAPIENS
agatatctccggcgccgcccgccattttgactccagtgtctcgtttgcagtcggcgctttaggggaactgtcttcctccgcaggcgcgaggctgggtacagggtctattgtctgtggttgactccgtactttggtctgaggccttcgggagctttcccgaggcagttagcagaagccgcagcggccgcccccgcccgtctcctctgtccctgggcccgggagggaccaacttggcgtcacgcccctcagcggtcgccactctcttctctgttgttgggtccgcatcgtattcccggaatcagacggtgccccatagatggccagctttcccccgagggtcaacgagaaagagatcgtgagattacgtactataggtgaacttttagctcctgcagctccttttgacaagaaatgtggtcgtgaaaattggactgttgcttttgctccagatggttcatactttgcttggtcacaaggacatcgcacagtaaagcttgttccgtggtcccagtgccttcagaactttctcttgcatggcaccaagaatgttaccaattcaagcagtttaagattgccaagacaaaatagtgatggtggtcagaaaaataagcctcgtgaacatattatagactgtggagatatagtctggagtcttgcttttgggtcatcagttccagaaaaacagagtcgctgtgtaaatatagaatggcatcgcttcagatttggacaagatcagctacttcttgctacagggttgaacaatgggcgtatcaaaatatgggatgtatatacaggaaaactcctccttaacttggtagatcatactgaagtggtcagagatttaacttttgctccagatggaagcttgatcctggtgtcagcttcaagagacaaaactctcagagtatgggacctgaaagatgatggaaacatgatgaaagtattgagggggcatcagaattgggtgtacagctgtgcattctctcctgactcttctatgctgtgttcagtcggagccagtaaagcagttttcctttggaatatggataaatacaccatgatacggaaactagaaggacatcaccatgatgtggtagcttgtgacttttctcctgatggagcattactggctactgcatcttatgatactcgagtatatatctgggatccacataatggagacattctgatggaatttgggcacctgtttcccccacctactccaatatttgctggaggagcaaatgaccggtgggtacgatctgtatcttttagccatgatggactgcatgttgcaagccttgctgatgataaaatggtgaggttctggagaattgatgaggattatccagtgcaagttgcacctttgagcaatggtctttgctgtgccttctctactgatggcagtgttttagctgctgggacacatgacggaagtgtgtatttttgggccactccacggcaggtccctagcctgcaacatttatgtcgcatgtcaatccgaagagtgatgcccacccaagaagttcaggagctgccgattccttccaagcttttggagtttctctcgtatcgtatttagaagattctgccttccctagtagtagggactgacagaatacacttaacacaaacctcaagctttactgacttcaattatctgtttttaaagacgtagaagatttatttaatttgatatgttcttgtactgcattttgatcagttgagcttttaaaatattatttatagacaatagaagtatttctgaacatatcaaatataaatttttttaaagatctaactgtgaaaacatacatacctgtacatatttagatataagctgctatatgttgaatggacccttttgcttttctgatttttagttctgacatgtatatattgcttcagtagagccacaatatgtatctttgctgtaaagtgcaaggaaattttaaattctgggacactgagttagatggtaaatactgacttacgaaagttgaattgggtgaggcgggcaaatcacctgaggtcagcagtttgagactagcctggcaaacatgatgaaaccctgtctctactaaaaatacaaaaaaaaaaaaaattagccaggcgtggtggtgcacacctgtagtcctagctacttgggaggctgaggcaggagaattgcttgaacccaggaggtggaggttgcagtaagccaagatcacaccactgcactccaacctggacaacagagcgagactccatctcaaaaaaaaaaaaaaattgtgttgcctcatacgaaatgtatttggttttgttggagagtgtcagactgatctggaagtgaaacacagtttatgtacagggaaaaggattttattatccttaggaatgtcatccaagacgtagagcttgaatgtgacgttatttaaaaacaacaacaaagaaggcagagccaggatataactagaaaaaggatgtctttttttttttttttactccccctctaaacactgctgctgccttaattttagaaagcagcttactagtttacccttgtggtataaagtattataaattgttgtgaatttgaagaatccgtctactgtattattgctaaatattttgtttatactaagggacaattattttaagaccatggatttaaaaaaaaaaaaaaaaactctgtttctgcaggggatgatattggtgagttgccaaagaagcaatacagcatatctgcttttgccttctgttgtttatcttacctgcagatattaagaatgtatgcattatgtaaaatgctcaattatatatttttgttgagttttttaattaaagacttgttaaaaaaaaaaaaaaaa

SEQ ID NO: 251 - DNA, 3086 bp, HOMO SAPIENS
agttgggctgctggagtgcggcgccaccgcggaggacaggggcagctggcgggcagcgggtgagggggtggcggggacgcgagtggcggccgcggggccccggacaagggtccgcagagctgcagccttcgagggccagccctctccgagtccggggctgggtcccaccagtgacaaggcggcagccccgcgcacaccaaagagaaggcggctgtggcggcagcggcagccccagccatgctgtgttatgtgacgaggccggacgcggtgctgatggaggtggaggtggaggcgaaagccaacggcgaggactgcctcaaccaggtgtgcaggcgactgggaatcatagaagttgactattttggactgcagtttacgggtagcaaaggtgaaagtttatggctaaacctgagaaaccggatctcccagcagatggatgggctagccccttacaggcttaaacttagagtcaagttcttcgtggagcctcatctcatcttacaggagcagactaggcatatctttttcttgcacatcaaggaggccctcttggcaggccacctcttgtgttccccagagcaggcagtggaactcagtgccctcctggcccagaccaagtttggagactacaaccagaacactgccaagtataactatgaggagctctgtgccaaggagctctcctctgccaccttgaacagcattgttgcaaaacataaggagttggaggggaccagccaggcttcagctgaataccaagttttgcagattgtgtcggcaatggaaaactatggcatagaatggcattctgtgcgggatagcgaagggcagaaactgctcattggggttggacctgaaggaatctcaatttgtaaagatgactttagcccaattaataggatagcttatcctgtggtgcagatggccacccagtcaggaaagaatgtatatttgacggtcaccaaggaatctgggaacagcatcgtgctcttgtttaaaatgatcagcaccagggcggccagcgggctctaccgagcgataacagagacgcacgcattctacaggtgtgacacagtgaccagcgccgtgatgatgcagtatagccgtgacttgaagggccacttggcatctctgtttctgaatgaaaacattaaccttggcaagaaatatgtctttgatattaaaagaacatcaaaggaggtgtatgaccatgccaggagggctctgtacaatgctggcgttgtggacctcgtttcaagaaacaaccagagcccttcacactcgcctctgaagtcctcagaaagcagcatgaactgcagcagctgcgagggcctcagctgccagcagacccgggtgctgcaggagaagctacgcaagctgaaggaagccatgctgtgcatggtgtgctgcgaggaggagatcaactccaccttctgtccctgtggccacactgtgtgctgtgagagctgcgccgcccagctacagtcatgtcccgtctgcaggtcgcgtgtggagcatgtccagcacgtctatctgccaacgcacaccagtcttctcaatctgactgtaatctaatctgttgtgcttttgttggacttggcatgtttccatgaactgcactattataaactattaaaatgatagattgtggagaaagtaattattccaacacccatctgccatgcgatgttaaaaaaaaaaaaaaggaagaaaaataacacagctactcctcactgcaaaaacatatccatgcgtagaatcaacaactccagtcatgggaccaggaggagctctgggacgcagacacattccttggatgttgattttttttatgatctagtaaaggaataggtaaagtctttgatgtcagtgaagtggcaacatagccaaaaagttgggtaccttttaggaaatgatgttgtaagtctccttaatgtatcctgaggtaagtttcctactggcagcagattttgtaagaattacttttaagaatttcattctttttgtatggtcatggagctccaaccatttttaataggaaagtcttttgtaaattgttgtcgttttaatgtcatttctgtctttataacttgatcaagaatgattggaaggcaaacaggtttacaaatcaattctgtgacttttaaaaagttgacaatgttgtcagatttaaaccagtgtggctagtaaaaagcagctcactcaatgtgggtggctccctattcctttacgctccccctatccctaccccacaagcctttcgattataaaatactaccaatcttgttataagattactgtggagtagtcaagtactccccgggccttctgagctggtggaatattttatttcagactgaaaacagagagcactctccttgggaagggaaagcggagcttgctgagtgagagatggagcctcatggtgtacaactgagggtagttaactcatcacttctcccaagcactcgatcccagcttcacccactggtgttgctttgcttgaactgttcaagccttttatagccttaccataagtatttagatatggtgtccttttctgtttttggggggggagttttgttgtgtttttttaaagtaagtgcttaagtattaactttgggttgtcccctctgtatgtttcgaaggggttttggttctttttgcttctgttttcttaaacatgttttccactcccacttgggcattttggaagctggtcagctagcaggttttctgggatgtcgggagacctagatgaccttatcgggtgcaatactagctaaggtaaagctagaaacctacactgtcactttactgagatttctgagtatacttttcatattgccttaatgtagcagtaatgtgtttatgcatttgtttctttgcacagacattttgtcaaatattaaaactctacttttttatggcacatattagcatataagcctttattccaagaggtatttattttttcacttgtaaaaaaataatgtttccacgtaaagaactctgttatatcctagaggactctgtcttttatattcgggataataaagactttaaagcaaaaaaaaaaaaaaaaa

SEQ ID NO: 252 - DNA, 357 bp, HOMO SAPIENS
ttcctcttgaccccaagtttaggaggaagcctttccagccagttctctccatccagacgctggagaggactttccctgttggcccagggtttaggaagggcttctcagtcagtctatgccagtctataaggttttgtggggatgctcacagtaagggcactgaaaggagcaagtttgtcaggtcactgcaatgagtaggccatgctttcagttcttcctatctggtcagctgccttctggcactccagctggatttacgagccaaaattatggtttgaggtgttgtaattggctaagtctctggacaaaaattacccaaaataatctgaaactttactggccaaagtgggactcctt

SEQ ID NO: 253 - DNA, 1825 bp, HOMO SAPIENS
gaagccggggccggggctgcggggcgagttgtcggccctgggccgggagctggagtcccagactcataggtcccggcccagcccccgaagagccgcctcagccggggggagttgctcggactcaaacgtccagtcctcgtgcgaccgcgctgggtcggaagtgagcaggctgaggccaccatggagcagtgtgcgtgcgtggagagagagctggacaaggtcctgcagaagttcctgacctacgggcagcactgtgagcggagcctggaggagctgctgcactacgtgggccagctgcgggctgagctggccagcgcagccctccaggggacccctctctcagccaccctctctctggtgatgtcacagtgctgccggaagatcaaagatacggtgcagaaactggcttcggaccataaggacattcacagcagtgtatcccgagtgggcaaagccattgacaggaacttcgactctgagatctgtggtgttgtgtcagatgcggtgtgggacgcgcgggaacagcagcagcagatcctgcagatggccatcgtggaacacctgtatcagcagggcatgctcagcgtggccgaggagctgtgccaggaatcaacgctgaatgtggacttggatttcaagcagcctttcctagagttgaatcgaatcctggaagccctgcacgaacaagacctgggtcctgcgttggaatgggccgtctcccacaggcagcgcctgctggaactcaacagctccctggagttcaagctgcaccgactgcacttcatccgcctcttggcaggaggccccgcgaagcagctggaggccctcagctatgctcggcacttccagccctttgctcggctgcaccagcgggagatccaggtgatgatgggcagcctggtgtacctgcggctgggcttggagaagtcaccctactgccacctgctggacagcagccactgggcagagatctgtgagacctttacccgggacgcctgttccctgctggggctttctgtggagtccccccttagcgtcagctttgcctctggctgtgtggcgctgcctgtgttgatgaacatcaaggctgtgattgagcagcggcagtgcactggggtctggaatcacaaggacgagttaccgattgagattgaactaggcatgaagtgctggtaccactccgtgttcgcttgccccatcctccgccagcagacgtcagattccaaccctcccatcaagctcatctgtggccatgttatctcccgagatgcactcaataagctcattaatggaggaaagctgaagtgtccctactgtcccatggagcagaacccggcagatgggaaacgcatcatattctgattcctacctggaaggaattttgttgaaaggggttttcacctgtgagccttggtctgtctcggtagggtggtcaacttcagtggactgtggttggtttcagagcgcctggctgaggagttccactgaggggagcactggagcagccctttggcagaggctgaggagggagatggaccagcccacgcctggcacctggctccatggcataaggaaagggagatgctggcctctgtgctcctgctgtcttttcctgtttctgtttgcgtttgacttagtagcaaccgacagagtggcaagggatttggtcttcagcagtagacatccttccacccctgccctcagccaagtctcttgctgccatgccaatgctatgtccacccttgcccctcggcccaagagtgtccagcggtggcccacctcttcctcccactacagcctcaacagtaaaaaaaaaaaaaaaaaa

SEQ ID NO: 254 - DNA, 2035 bp, HOMO SAPIENS
ggtgccctgcgactccgcagacgcggagccttttgggaaatgaagtcttttctcaaagaccttgccgctcaactggatccaggcccttgcatcttggcggatctgaggcgtttggagggacaacaacctagatgtggagccgaaatttgagggtgtgacctatcttatgcggagcggacctttgaggatctctgagtggaagatggaacagattaaacgtgcaaaccgcctttatactaatgactccatcttcctgaagaaaaccctctacatccccatcctgacagagcccagagacctgttcaatggtttggactctgaggaagagaaagatggagaggaaaaagtacacccaagtaacagtgaagtttggccacactcaactgagaggaagaaacaagagacaggagcaggacgtgccaatggtgaagtcctccccacacctggccaggaaacccccacgcccatccatgacctctctgcctctgatttccttaagaagcttgattcacagatcagcctgtccaagaaggctgctgctcagaagctgaaaaaaggggaaaatggggtacctggggaggatgcaggtctccacctgagctccccttggatgcagcaacgagcagtcctaggtcctgtgccgctgacccgtacctctcggacccggacactacgggaccaggaggatgaaatcttcaaactctgatgtccccagaactgactgagagaagcaagatgttgaaagagaaacttcagggggagaggagcctgaggtgaggctcaagaacatggcttatgagcctgcctccctccactccagccatcctccccagcctccttgtctgccaaaaattccttggcctggggcagttttattggcaagattagggaatgggaactggacctttcccagttcttgggctgaatctagagttgagtcctttagactcaaaaggctctttttatatccttgttgcctttcctatcctttttacctttccctggccttagaacagggaagcagagactccccctcagcttcttcctcatctccaactatgtgacataatttatttggtgctaatattgaagtaatatttatttgctatattttatttcttcccactcttagctgaaaaatggaatttctatagccctggggtgaggagaacccgggaacagtgagccagtgactgctggttctccactttccccaccttgttagccaaacatgttattgaggatgaggcaatcggtgatatagcccaccacagagaatggatgactgttggccttttctccaatctcaaagtgacagatttgggctgattctttttttttttttttttggtaccccattcctgttgaatgggctcagtcttgacaaaccaattccctgtaactttttcacaattcttgactctgagaaaaagcagcactgtagggacctgaactctccattctaccagttcacccttctgacctgttctgctcagcctgtggtgaggggaacagatggaagaaggctttccttggggtttgaagaggaagccagttgtgggagtctctttgttacaccccctcccctccagaccctctctctctatgccttcctcctcactgcatatttatttgcgatttgtagcactgatctatggtacagttgttttgtttcttaaacagaagtaggtaagggaacctcagtaataatggaaatctgcctcagtctcctgtttggaaatgatgagaggtgagataagtaatgtttatatacctcctttcttctgtgatgattataaggtatacgaagctggacagattaaacattgagccctgtgcaaaaaaaaaaaaaaaaaaaaaaaaaaaaaaaaaaaaaaaaaaaaaaaaaaaaaaaaaaaaaaaaaaaaaaaaaaaaaaaaaaaaaaaaaaaaaaaaaaaaaaaaaaaaaaaaaaaaaaaaaaaaaaaaaaaaaaaaaaaaaaaaaaaaaaaaaaaaaaaaaaaaaaaaaaaaaaaaaaaaaaaaaaaaaaaaaaaa

SEQ ID NO: 255 - DNA, 5663 bp, HOMO SAPIENS
attacaaagaaagccggactcttttcttataactgagctcagccaaggaaactcttgcacaaatgtacaatactgtttggaatatggaagacctggatttagaatatgccaagacagatataaattgtggcacagacttgatgttttatatagaaatggacccaccagcactgcctcctaaaccaccaaaacctactactgtagccaacaacggtatgaataacaatatgtccttacaagatgctgaatggtactggggagatatctcgagggaagaagtgaatgaaaaacttcgagatacagcagacgggacctttttggtacgagatgcgtctactaaaatgcatggtgattatactcttacactaaggaaagggggaaataacaaattaatcaaaatatttcatcgagatgggaaatatggcttctctgacccattaaccttcagttctgtggttgaattaataaaccactaccggaatgaatctctagctcagtataatcccaaattggatgtgaaattactttatccagtatccaaataccaacaggatcaagttgtcaaagaagataatattgaagctgtagggaaaaaattacatgaatataacactcagtttcaagaaaaaagtcgagaatatgatagattatatgaagaatatacccgcacatcccaggaaatccaaatgaaaaggacagctattgaagcatttaatgaaaccataaaaatatttgaagaacagtgccagacccaagagcggtacagcaaagaatacatagaaaagtttaaacgtgaaggcaatgagaaagaaatacaaaggattatgcataattatgataagttgaagtctcgaatcagtgaaattattgacagtagaagaagattggaagaagacttgaagaagcaggcagctgagtatcgagaaattgacaaacgtatgaacagcattaaaccagaccttatccagctgagaaagacgagagaccaatacttgatgtggttgactcaaaaaggtgttcggcaaaagaagttgaacgagtggttgggcaatgaaaacactgaagaccaatattcactggtggaagatgatgaagatttgccccatcatgatgagaagacatggaatgttggaagcagcaaccgaaacaaagctgaaaacctgttgcgagggaagcgagatggcacttttcttgtccgggagagcagtaaacagggctgctatgcctgctctgtagtggtggacggcgaagtaaagcattgtgtcataaacaaaacagcaactggctatggctttgccgagccctataacttgtacagctctctgaaagaactggtgctacattaccaacacacctcccttgtgcagcacaacgactccctcaatgtcacactagcctacccagtatatgcacagcagaggcgatgaagcgcttactctttgatccttctcctgaagttcagccaccctgaggcctctggaaagcaaagggctcctctccagtctgatctgtgaattgagctgcagaaacgaagccatctttctttggatgggactagagctttctttcacaaaaaagaagtaggggaagacatgcagcctaaggctgtatgatgaccacacgttcctaagctggagtgcttatcccttctttttctttttttctttggtttaatttaaagccacaaccacatacaacacaaagagaaaaagaaatgcaaaaatctctgcgtgcagggacaaagaggcctttaaccatggtgcttgttaatgctttctgaagctttaccagctgaaagttgggactctggagagcggaggagagagaggcagaagaaccctggcctgagaaggtttggtccagcctggtttagcctggatgttgctgtgcacggtggacccagacacatcgcactgtggattatttcattttgtaacaaatgaacgatatgtagcagaaaggcacgtccactcacaagggacgctttgggagaatgtcagttcatgtatgttcagaagaaattctgtcatagaaagtgccagaaagtgtttaacttgtcaaaaaacaaaaacccagcaacagaaaaatggagtttggaaaacaggacttaaaatgacattcagtatataaaatatgtacataatattggatgactaactatcaaatagatggatttgtatcaataccaaatagcttctgttttgttttgctgaaggctaaattcacagcgctatgcaattcttaattttcattaagttgttatttcagttttaaatgtaccttcagaataagcttccccaccccagtttttgttgcttgaaaatattgttgtcccggatttttgttaatattcatttttgttatccttttttaaaagtaaatgtacaggatgccagtaaaaaaaaaaaatggcttcagaattaaaactatgaaatattttacagtttttcttgtacagagtacttggctgttagcccaaggttaaaaagttcataacagattttttttggactgttttgttgggcagtgcctgataagcttcaaagctgctttattcaataaaaaaaagaaatgaaaaagatatatgaatatgacaaagtattgctgagtccaacaatgttgttttaagactcttaaaatacggtacctggcaatgtttatttcataaagaattgtgaacttcttgaatctagggagggggaatgtagtgaagggatgtatcaagtggggtggtgggagggggaggcaaggttatatgcactttctcatgatttacagagaagtgaataactgcaaagtgaagttgcttcttctacttcagtcttctctcactttgatttgctagttgttatcaattaatgacaattacaaacctactgtatctctaatacagtgtgactggtcaggtatttcagttcttaggaaggaagtgccaagtttgtttttgggttcctggaacagcgctcacctttgtttagaacactggtttaaagggataatcatctctgtcacattagactatccatcatgaccagcaaatactcattttaggaaaaaaaaaagcatgatctgaaaaatacttttggtggtatgttggttaccctcctagctttccatttggtttagaacataaagcaaatagacacagtcatactgtcactgctctggactgtgtggagctcgctaaagtcatggtcattgcaggaatccaagtggcagtccttctcattcattctaatcattgtatgtgcttcactacgggggggagaaggaaacgttagcatcatgtttcccatttagggcaggagtgagaggtctctcttcctgatttagatatgcaaaagctggtatgttcagtaggaactgtacatgtgttgggaggcataaagactaattagcaaccataatatggtcactaccctaatagactaaatgaaatcttgcaatttcaaattactctttctccatattagatttacccacagctatatttctgtttaagtactagggtgagggttttctgttactttgttttttaatgttgttccttttgaaagaatcagtcttgcagctgagtgaaaaatctgtggaatgtattatttgtcctctttacatgaaactactcatacttaagcaaaagtcagtcttatagcaagactgttagccctcaaacttgactctactgatctgaccatttccctctcatcgccagacaactgacgatttccctggttttagtctgcgtctctgctttaaagttattgtgatatccttctagatcatacacaagtctaacagttaattagttaacagtttttaaactaggtttgtgggtatttttttggtagcacatgtatgctattacatacaaatttttatttctaaaatataagatctgagattgaatattttcattaaaagctacagttttgtgaatctttgtgcttcaacattctttgcaagatgatacggtatttaggcatttgccttatttttgcatctcacaaacataagtgcaatagatcttttcattgaacagcaaagtaggattcatcattccatatgacttgagttacaccagacctgttctgcccaatgcctttttgattacagtgtagcttgcccaccgcatttgtcgttttagatactttgctagccggccactttggatttcatcagacagtcctaacaatattgtctgaacggctgaatatgaatagatacagcagaggcactcctgatatatgatttttatccatgcgtcagtttttcccacccagtgtagcatcctaaagataaagccagaagctaagctgcagtgaggctgtgattgggcgtagaagtgggagcattgggacctcacattacacacacgagagatcataaccatgtgaaaaggcaaaaagcatgtgtttgcaacatctgataacttcatggcctttgataaatgtatatatgtatatgtgcatggactgtgtttccagtacacctttcagccaaaacagatccacagtagttgttgagttcaagtacataaagtacataacaagcgaacgtctagtacaattcttacttatgtgtatgggatttttccctttgaggttgctttgttttgtcttacaaaggtgaaaattgtttgtaagtgaagtgagaagttcatatttctttggcttttttgtgtttttaaaagttactccttttagggagctggtctgatgacttgcttagcttggaaatccttgttttcagtgtgtcgagtcaaaatgtgtttatgtgagctgtcactgtggggaaccaattgctttgtcatatagctggttatgaactagtaacatgtttgggaagtcctactgatgttcctttggaagaaaaaatctgctggttttaacaactgtgcttttgctatgtatggtatccaagttagttgaaacgcagacactgagatctgtttgagtttagggtcatttttagaaaggggcagtttaaagcacaatgtctcacatgggacaaagttccaaaatgccaaattcttattttttaaaaagctagttctataaaatactggtattatgggtggggaggaaatagaattgagtcaattggaaagactatccaacttaacatgaaacttgtcaccatgagatagcattagctgcccaggatgctgctatatatatatatatatatatatatgtgtgtgtgtgtgtgtgtgtgtgtgtatatatatatatatatatatatatatatatatatatatatgtgtgtgtatatatatatatatgtgtatatatatatgtatatacatatatgtatatatatgcacatatatatatgtatttaaaaaaatcaaaacaaaaaaaaactcatttatacctgtgtattttttaaagctacaatctgttcaatgtttttaaaaatctgtttatatgacattgttaaaataaagttggtcttttgacgagagggaggatgtcacggtcagttgtaactttgccttcacaaggcaactggggtggggggtgggggtagtgtgcctccttgacatttcgttcaagttatagattcaatggagctatgtcttgttttaagttgctttaatgcattgtattagatcttcaaacagaataaaggttgttttgaaactgaaaaaaaaaaaaaaaaaa

SEQ ID NO: 256 - DNA, 2795 bp, HOMO SAPIENS
atcagcgagggattcacggcgaaatgagactgttcgtgagtgatggcgtcccgggttgcttgccggtgctggccgccgccgggagagcccggggcagagcagaggtgctcatcagcactgtaggcccggaagattgtgtggtcccgttcctgacccggcctaaggtccctgtcttgcagctggatagcggcaactacctcttctccactagtgcaatctgccgatatttttttttgttatctggctgggagcaagatgacctcactaaccagtggctggaatgggaagcgacagagctgcagccagctttgtctgctgccctgtactatttagtggtccaaggcaagaagggggaagatgttcttggttcagtgcggagagccctgactcacattgaccacagcttgagtcgtcagaactgtcctttcctggctggggagacagaatctctagccgacattgttttgtggggagccctatacccattactgcaagatcccgcctacctccctgaggagctgagtgccctgcacagctggttccagacactgagtacccaggaaccatgtcagcgagctgcagagactgtactgaaacagcaaggtgtcctggctctccggccttacctccaaaagcagccccagcccagccccgctgagggaagggctgtcaccaatgagcctgaggaggaggagctggctaccctatctgaggaggagattgctatggctgttactgcttgggagaagggcctagaaagtttgcccccgctgcggccccagcagaatccagtgttgcctgtggctggagaaaggaatgtgctcatcaccagtgccctcccttacgtcaacaatgtcccccaccttgggaacatcattggttgtgtgctcagtgccgatgtctttgccaggtactctcgcctccgccagtggaacaccctctatctgtgtgggacagatgagtatggtacagcaacagagaccaaggctctggaggagggactaaccccccaggagatctgcgacaagtaccacatcatccatgctgacatctaccgctggtttaacatttcgtttgatatttttggtcgcaccaccactccacagcagaccaaaatcacccaggacattttccagcagttgctgaaacgaggttttgtgctgcaagatactgtggagcaactgcgatgtgagcactgtgctcgcttcctggctgaccgcttcgtggagggcgtgtgtcccttctgtggctatgaggaggctcggggtgaccagtgtgacaagtgtggcaagctcatcaatgctgtcgagcttaagaagcctcagtgtaaagtctgccgatcatgccctgtggtgcagtcgagccagcacctgtttctggacctgcctaagctggagaagcgactggaggagtggttggggaggacattgcctggcagtgactggacacccaatgcccagtttatcacccgttcttggcttcgggatggcctcaagccacgctgcataacccgagacctcaaatggggaacccctgtacccttagaaggttttgaagacaaggtattctatgtctggtttgatgccactattggctatctgtccatcacagccaactacacagaccagtgggagagatggtggaagaacccagagcaagtggacctgtatcagttcatggccaaagacaatgttcctttccatagcttagtctttccttgctcagccctaggagctgaggataactataccttggtcagccacctcattgctacagagtacctgaactatgaggatgggaaattctctaagagccgcggtgtgggagtgtttggggacatggcccaggacacggggatccctgctgacatctggcgcttctatctgctgtacattcggcctgagggccaggacagtgctttctcctggacggacctgctgctgaagaataattctgagctgcttaacaacctgggcaacttcatcaacagagctgggatgtttgtgtctaagttctttgggggctatgtgcctgagatggtgctcacccctgatgatcagcgcctgctggcccatgtcaccctggagctccagcactatcaccagctacttgagaaggttcggatccgggatgccttgcgcagtatcctcaccatatctcgacatggcaaccaatatattcaggtgaatgagccctggaagcggattaaaggcagtgaggctgacaggcaacgggcaggaacagtgactggcttggcagtgaatatagctgccttgctctctgtcatgcttcagccttacatgcccacggttagtgccacaatccaggcccagctgcagctcccacctccagcctgcagtatcctgctgacaaacttcctgtgtaccttaccagcaggacaccagattggcacagtcagtcccttgttccaaaaattggaaaatgaccagattgaaagtttaaggcagcgctttggagggggccaggcaaaaacgtccccgaagccagcagttgtagagactgttacaacagccaagccacagcagatacaagcgctgatggatgaagtgacaaaacaaggaaacattgtccgagaactgaaagcacaaaaggcagacaagaacgaggttgctgcggaggtggcgaaactcttggatctaaagaaacagttggctgtagctgaggggaaaccccctgaagcccctaaaggcaagaagaaaaagtaaaagaccttggctcatagaaagtcactttaatagatagggacagtaataaataaatgtacaatctctata

SEQ ID NO: 257 - DNA, 3685 bp, HOMO SAPIENS
agtggactcacgcaggcgcaggagactacacttcccaggaactccgggccgcgttgttcgctggtacctccttctgacttccggtattgctgcggtctgtagggccaatcgggagcctggaattgctttcccggcgctctgattggtgcattcgactaggctgcctgggttcaaaatttcaacgatactgaatgagtcccgcggcgggttggctcgcgcttcgttgtcagatctgaggcgaggctaggtgagccgtgggaagaaaagagggagcagctagggcgcgggtctccctcctcccggagtttggaacggctgaagttcaccttccagcccctagcgccgttcgcgccgctaggcctggcttctgaggcggttgcggtgctcggtcgccgcctaggcggggcagggtgcgagcaggggcttcgggccacgcttctcttggcgacaggattttgctgtgaagtccgtccgggaaacggaggaaaaaaagagttgcgggaggctgtcggctaataacggttcttgatacatatttgccagacttcaagatttcagaaaaggggtgaaagagaagattgcaactttgagtcagacctgtaggcctgatagactgattaaaccacagaaggtgacctgctgagaaaagtggtacaaatactgggaaaaacctgctcttctgcgttaagtgggagacaatgtcacaagttaaaagctcttattcctatgatgccccctcggatttcatcaatttttcatccttggatgatgaaggagatactcaaaacatagattcatggtttgaggagaaggccaatttggagaataagttactggggaagaatggaactggagggctttttcagggcaaaactcctttgagaaaggctaatcttcagcaagctattgtcacacctttgaaaccagttgacaacacttactacaaagaggcagaaaaagaaaatcttgtggaacaatccattccgtcaaatgcttgttcttccctggaagttgaggcagccatatcaagaaaaactccagcccagcctcagagaagatctcttaggctttctgctcagaaggatttggaacagaaagaaaagcatcatgtaaaaatgaaagccaagagatgtgccactcctgtaatcatcgatgaaattctaccctctaagaaaatgaaagtttctaacaacaaaaagaagccagaggaagaaggcagtgctcatcaagatactgctgaaaagaatgcatcttccccagagaaagccaagggtagacatactgtgccttgtatgccacctgcaaagcagaagtttctaaaaagtactgaggagcaagagctggagaagagtatgaaaatgcagcaagaggtggtggagatgcggaaaaagaatgaagaattcaagaaacttgctctggctggaatagggcaacctgtgaagaaatcagtgagccaggtcaccaaatcagttgacttccacttccgcacagatgagcgaatcaaacaacatcctaagaaccaggaggaatataaggaagtgaactttacatctgaactacgaaagcatccttcatctcctgcccgagtgactaagggatgtaccattgttaagcctttcaacctgtcccaaggaaagaaaagaacatttgatgaaacagtttctacatatgtgccccttgcacagcaagttgaagacttccataaacgaacccctaacagatatcatttgaggagcaagaaggatgatattaacctgttaccctccaaatcttctgtgaccaagatttgcagagacccacagactcctgtactgcaaaccaaacaccgtgcacgggctgtgacctgcaaaagtacagcagagctggaggctgaggagctcgagaaattgcaacaatacaaattcaaagcacgtgaacttgatcccagaatacttgaaggtgggcccatcttgcccaagaaaccacctgtgaaaccacccaccgagcctattggctttgatttggaaattgagaaaagaatccaggagcgagaatcaaagaagaaaacagaggatgaacactttgaatttcattccagaccttgccctactaagattttggaagatgttgtgggtgttcctgaaaagaaggtacttccaatcaccgtccccaagtcaccagcctttgcattgaagaacagaattcgaatgcccaccaaagaagatgaggaagaggacgaaccggtagtgataaaagctcaacctgtgccacattatggggtgccttttaagccccaaatcccagaggcaagaactgtggaaatatgccctttctcgtttgattctcgagacaaagaacgtcagttacagaaggagaagaaaataaaagaactgcagaaaggggaggtgcccaagttcaaggcacttcccttgcctcattttgacaccattaacctgccagagaagaaggtaaagaatgtgacccagattgaacctttctgcttggagactgacagaagaggtgctctgaaggcacagacttggaagcaccagctggaagaagaactgagacagcagaaagaagcagcttgtttcaaggctcgtccaaacaccgtcatctctcaggagccctttgttcccaagaaagagaagaaatcagttgctgagggcctttctggttctctagttcaggaaccttttcagctggctactgagaagagagccaaagagcggcaggagctggagaagagaatggctgaggtagaagcccagaaagcccagcagttggaggaggccagactacaggaggaagagcagaaaaaagaggagctggccaggctacggagagaactggtgcataaggcaaatccaatacgcaagtaccagggtctggagataaagtcaagtgaccagcctctgactgtgcctgtatctcccaaattctccactcgattccactgctaaactcagctgtgagctgcggataccgcccggcaatgggacctgctcttaacctcaaacctaggaccgtcttgctttgtcattgggcatggagagaacccatttctccagacttttacctacccgtgcctgagaaagcatacttgacaactgtggactccagttttgttgagaattgttttcttacattactaaggctaataatgagatgtaactcatgaatgtctcgattagactccatgtagttacttcctttaaaccatcagccggccttttatatgggtcttcactctgactagaatttagtctctgtgtcagcacagtgtaatctctattgctattgccccttacgactctcaccctctccccactttttttaaaaattttaaccagaaaataaagatagttaaatcctaagatagagattaagtcatggtttaaatgaggaacaatcagtaaatcagattctgtcctcttctctgcataccgtgaatttatagttaaggatccctttgctgtgagggtagaaaacctcaccaactgcaccagtgaggaagaagactgcgtggattcatggggagcctcacagcagccacgcagcaggctctgggtggggctgccgttaaggcacgttctttccttactggtgctgataacaacagggaaccgtgcagtgtgcattttaagacctggcctggaataaatacgttttgtctttccctcaaaaaaaaaaaaaaaaaaaaaaa

SEQ ID NO: 258 - DNA, 2072 bp, HOMO SAPIENS
aaacccccctgcatcgtagagagcgggctggattctctgtggtgctgatggaggagggggagcaggttgaaacaatcgagtgggcgcgccaggactccccagctcctggcggggaagggagggggagcccctgttctgcgcagggaggcggcggggctggggggcccccggaacgaggaagaggcaggggtgaccgctagaataggaaagtgctcacccccgggaggcaaaatttcgttcagatcgcacattaattggagatatctgattaattccagcttctgatgactataaatggcgattctctaccaaggtgtctatattaaaaaaaaaatcattccgtgtcatcccccacgtcaggcctgctcgtgggcgtgaggctgtacttcctccgcccccttctaatggagtgaaccattcccagctctcccccccccctcagcctctctctctctctctctttctctctctctctctctttctgtctcttcctcgctccctctctttctctcctccctctgccttcccagtgcataaagtctctgtcgctcccggaacttgttggcaatgcctattttttggctttcccccgcgttctctaaactaactatttaaaggtctgcggtcgcaaatggtttgactaaacgtaggatgggacttaagttgaacggcagatatatttcactgatcctcgcggtgcaaatagcgtatctggtgcaggccgtgagagcagcgggcaagtgcgatgcggtcttcaagggcttttcggactgtttgctcaagctgggcgacagcatggccaactacccgcagggcctggacgacaagacgaacatcaagaccgtgtgcacatactgggaggatttccacagctgcacggtcacagcccttacggattgccaggaaggggcgaaagatatgtgggataaactgagaaaagaatccaaaaacctcaacatccaaggcagcttattcgaactctgcggcagcggcaacggggcggcggggtccctgctcccggcgttcccggtgctcctggtgtctctctcggcagctttagcgacctggctttccttctgagcgtggggccagctccccccgcgcgcccacccacactcactccatgctcccggaaatcgagaggaagatccattagttctttggggacgttgtgattctctgtgatgctgaaaacactcatataggattgtgggaaatcctgattctcttttttatttcgtttgatttcttgtgttttatttgccaaatgttaccaatcagtgagcaagcaagcacagccaaaatcggacctcagctttagtccgtcttcacacacaaataagaaaacggcaaacccaccccattttttaattttattattattaattttttttgttggcaaaagaatctcaggaacggccctgggccacctactatattaatcatgctagtaacatgaaaaatgatgggctcctcctaataggaaggcgaggagaggagaaggccaggggaatgaattcaagagagatgtccacggacgaaacatacggtgaataattcacgctcacgtcgttcttccacagtatcttgttttgatcatttccactgcacatttctcctcaagaaaagcgaaaggacagactgttggctttgtgtttggaggataggagggagagagggaaggggctgaggaaatctctggggtaagagtaaaggcttccagaagacatgctgctatggtcactgaggggttagctttatctgctgttgttgatgcatccgtccaagttcactgcctttattttccctcctccctcttgttttagctgttacacacacagtaatacctgaatatccaacggtatagatcacaagggggggatgttaaatgttaatctaaaatatagctaaaaaaagattttgacataaaagagccttgattttaaaaaaaaaagagagagagatgtaatttaaaaagtttattataaattaaattcagcaaaaaaagatttgctacaaagtatagagaagtataaaataaaagttattgtttgaaaaaaaaaaaaaaaaaa

SEQ ID NO: 259 - DNA, 2529 bp, HOMO SAPIENS
ggaggcgagcgaacagagggagggacccgcccgccgcgccccggccgctgggcatgtgtgtccgcaggcgcccgacgctgccgatgtcccggggctgagccgcgcccaggtgtcccggacagtgcgtgcgagcgtgtgtgtccgcgcaggcgagcaccgcgccggccctgagcctcccgctcgctccccacggccgcggtgcatgttcgcctcctgccactgtgtgccgagaggcaggaggaccatgaaaatgatccactttcggagctccagcgtcaaatcgctcagccaggagatgagatgcaccatccggctgctggacgactcggagatctcctgccacatccagagggaaaccaaagggcagtttctcattgaccacatctgcaactactacagcctgctggagaaggactactttggcattcgctatgtggacccagagaagcaaaggcactggcttgaacctaacaagtccatcttcaagcaaatgaaaactcatccaccatacaccatgtgctttagagtgaaattctacccacatgaacccttgaagattaaagaagagctcacaagataccttttataccttcagattaaaagggacatttttcatggccgcctgctgtgctccttttctgatgctgcctacctgggtgcctgtattgttcaagctgagcttggtgattacgatcctgatgagcatcctgagaattacatcagtgagtttgagattttccccaagcagtcacagaagctggaaagaaaaatagtggaaattcataaaaatgaactcagggggcagagcccaccagttgctgaatttaacttgctcctgaaagctcacactttggaaacctacggggtggatcctcacccatgcaaggattcaacaggcacaacaacatttttaggattcacagctgcaggctttgtggtctttcagggaaataagagaatccatttgataaaatggccagatgtctgcaaattgaagtttgaagggaagacattttatgtgattggcacccagaaggagaaaaaagccatgttggcattccatacttcaacaccagctgcctgcaaacatctttggaagtgtggagtggaaaaccaggccttttataagtatgcaaaatccagtcagatcaagactgtatcaagcagcaagatattttttaaaggaagtagatttcgatatagtgggaaagttgccaaagaggtggtggaggccagttccaagatccagagggagcctcctgaggtgcacagagccaacattactcagagccgcagttcccactccttgaacaaacagctcatcattaacatggaacccctgcagcccctgcttccttcccccagcgagcaagaagaagaacttcctctgggtgagggtgttccattgcctaaagaggagaacatttctgctcccttgatctccagctccccagtgaaggcagcccgggagtatgaagatccccctagtgaagaggaagataaaataaaagaagaacctttaaccatctctgaactagtgtacaacccaagtgccagcctgctccccacccctgtggatgacgatgagattgacatgctctttgactgtccttctaggcttgagttggaaagagaagacacagattcatttgaggatctggaagcagatgaaaacgcctttttgattgctgaagaagaggagctgaaggaggctcgccgtgctttgtcgtggagctatgacattctgactggccatattcgggtgaacccactggtcaagagtttttccaggctccttgtggtgggcctgggactgctgctctttgtatttcccctgctcctcctccttttggagtcaggtattgatctctccttcttatgcgaaatccgccagacaccagagtttgagcagtttcactatgaatactactgtcccctcaaggagtgggtggctgggaaagtccacctcatcctctacatgctgggttgctcatgaagttaatctctcacgtgactaagggctatattcaatgctagtgatttctttttttcagcaaatgcctggttctgaagggtcacggggctgtcaacaggtgttccttactcataattgattattcaaacctttaagttagctttccataattcactgcacttaaataagtttaaatcaaatacagttattttagttacaggttaggaagatggtctttaaataaccaaaaatatgtttattttttattatagtgtagacatacccttcatctattatatcataatacatgttacattggactgaattagattttcccatttctaatagttggcaccattataagctataaggttcagaatcagaattttagtaacaactcaagagaaagttgttgaatataatccttagtgaaaacagtgtcctctaaccaatgcctatacaactaaatttatgctgggtttttggttctgtttttttaaaaatatttttatgtgttcaaactattttggtaaatttttagcaaaaaaaaaaaa

SEQ ID NO: 260 - DNA, 2106 bp, HOMO SAPIENS
agccacgttcggttgagctccaagtagaccagcggcggcggcggcggcggcggcggcagcggtgctggaggcgcagagggcggcgcaggcggagccgggcgggcgcgcgagcgagcggagagcgggcggccgtgcgggcggcggcggcggcacccccaggccgagccggcgcggaaggagttccagggcgatggggccgcggccggggctgacgctttgacagctggaaagagcgcggagccagcgcctgggggggagggaggggagcgcggcgaggagagcgccagcgagcgagagagcgagcgagcgccggggagggggccgggagcgaggggcagctcgggagagccggagcggtagcggcggcggcggcggcggcggcgaggctcggcgccctcttccctgcaaaccatgtttgccaaaggcaaaggctcggcggtgccctcggatgggcaggctcgggaaaagttagctttatacgtctacgaatatttactgcacgtaggagcacagaaatctgcacagaccttcttatcggagattcgatgggaaaaaaacatcacgttgggagaaccgcctgggtttttgcactcgtggtggtgtgtattttgggacctttactgtgcagctcctgaaaggagagacacttgtgaacattcaagtgaagcaaaagcctttcatgattatagtgcagcagctgccccgagccccgtgcttggcaacattccccccaacgatgggatgccgggaggccccatcccgccaggtttctttcagccttttatgtcaccgcgatacgcaggcggccccaggcccccgatcagaatgggaaaccagcctccgggaggagttcctgggacacagccattgctgcccaattctatggatcccacacgacaacaaggccaccccaacatgggaggatcaatgcagagaatgaaccctccccgaggcatggggcccatgggtcccggcccacagaattacggcagcggcatgagaccaccacccaactccctcggccccgccatgcccgggattaacatgggcccgggagctggcagaccctggcccaatcctaacagtgctaactcaattccatactcctcctcatcacctggtacctatgtgggaccccctggtggtggcggtcctccaggaacacccattatgcccagtcccgcagattcaacaaattccagtgacaacatctacacaatgattaatccagtgccgcctggaggcagccggtccaacttcccgatgggtcccggctcggacggtccgatgggcggcatgggtggcatggagccacaccacatgaatggatcattagggtcaggcgacatagacggacttccaaaaaattctcctaacaacataagtggcattagcaatcctccaggcacccctcgagatgacggcgagctaggagggaacttcctccactcctttcagaacgacaattattctccaagcatgacgatgagtgtgtgatccccccttctccgagacgctgagagagcaggcattgcaggcgggaagatgccagaaattatgcaagaagtgaggtgtcattatccaggagctggtggggagggcatctccctgctcccctcaaccccctcccaccccatccacgccccctacctttcccaattttagtttcatgcaataaaaaggccaaactttttattccataaaacaagaaggacaaaactctcaaaaatgtatttcaagtcagtgaccagaaaaatcccaccccttgccctttccccaaaggaccttttctgtacatgacacttttttgttgttttttgtttggggttttaccattgttgggatttttttatttgttttcaggggggttttttgggggaaaatttttttaaatggaagcttctagcaagccccccaccccaatcaacctctatgctttcttcttaaaaaaaaaaaaaaaggaaaaaggaaaaaaaaaaaaggaaaaccagaagccctgctgtctgtctgtgcccaagcccttccaccagaaaagctagtctaggtgtgagagcccacattgtctgtagccatcaaaaataataataataaactggacagtttaca

SEQ ID NO: 261 - DNA, 6927 bp, HOMO SAPIENS
gatggctgagcgcgcaggagcccgggaggtctgagccgggcgaggctcgctccctgcgcatcgcctcctccgcccgccgcgtggtcgcgggcaggtgggccggggggcgctgggcaggggcggggcagggccagggcaggccggtctgcagccggaggggccggagcggagaagctgcccaccttcccgggctcggagcggccggggctgctcagccggccgggctcgcgatgacctgctgagaagcgtcgtcggaggctgcaggaggcggcctagctgtgggcggtgcagctcgcggcctcctccctcgtcgttcccggccccggccccccacccatccccgtgccccctccctaccgccggccgagatggcggatccagccgaatgcagcatcaaagtgatgtgccggttccggcccctcaacgaagcggagatcctccgcggggacaaattcatccccaaatttaaaggcgatgagaccgtggtgatcgggcaagggaagccatatgtcttcgacagagtgctacctcccaacacgacccaagagcaggtttacaatgcatgtgcgaagcaaattgtcaaagatgtccttgaaggttataacgggacgatttttgcgtatgggcagacttcatcaggaaaaacccacaccatggaggggaagctgcatgacccccagctcatggggatcatcccacgaattgcccatgatatctttgaccatatctactccatggatgagaacctggagtttcacataaaggtttcctattttgagatctacttggacaaaataagggacttacttgatgtatccaagaccaacttggctgttcatgaagataaaaacagagtcccgtatgtaaaggggtgcactgagcggtttgtgtcgagccctgaggaagtcatggatgtaatagatgaaggcaaagcaaaccgacacgtggctgtgacaaacatgaatgaacacagctctagaagtcacagtatcttcctgataaatattaaacaagagaatgtagagactgaaaaaaaactcagtgggaaactttatttggttgatttggctgggagcgaaaaggtcagcaaaactggtgccgagggagctgttcttgacgaagctaaaaatatcaataagtctttgtctgctcttggaaatgtgatctctgctttggcagaagggacaaaaacacatgtgccataccgggacagcaagatgactcggattcttcaggactctttgggtgggaactgcagaaccaccatcgtcatttgctgttctccttctgtcttcaatgaggctgagaccaagtccacactgatgttcggacagagagctaagaccatcaagaatacagtctctgtgaacctagaactgacagcagaagaatggaagaagaaatatgaaaaagagaaagagaaaaacaagactttgaagaatgttatccagcatctggagatggagctaaacaggtggaggaatggagaagctgtgcctgaggatgaacagatcagtgccaaggaccagaagaacctggagccttgtgataacacccccatcatagacaatattgctcctgttgttgctggcatctctacagaggagaaagagaagtacgatgaggagatctccagtctctacagacaactggatgacaaggatgatgaaattaaccagcagagccagctggctgaaaagctgaagcaacagatgttggatcaggatgagcttttagcttccacaagaagagactatgagaagatacaggaggagctgacacgtctccagattgaaaatgaggcagccaaggatgaggtgaaagaagttctccaggccctggaggagctggctgtcaattatgaccagaaatcacaggaagtggaggataagacccgggccaatgagcagctgacagacgagctggcccagaaaacgactacattgacaaccacacagagagagctgagccagctacaagagcttagcaaccaccagaagaaaagggcaactgagatcctgaatttgctgttgaaagatctgggggagataggtggaattattggcaccaatgatgtgaaaactttggcagatgtgaatggagtcattgaggaggagtttaccatggcccgcctgtacatcagcaagatgaagtcagaggtcaagtccctggtgaaccgcagcaaacagctcgagagcgcccagatggactccaacaggaagatgaatgccagcgagcgggagctggcagcctgccagctgctcatctcccagcacgaagccaagatcaagtctctgacagactacatgcagaacatggaacagaagaggaggcagctagaagagtcccaggactcgctcagcgaagagctggcaaagctccgagcccaggaaaaaatgcacgaagtcagcttccaggataaggagaaggaacatctgacgcggttgcaggatgctgaagaaatgaagaaggcgctggagcagcagatggagagccaccgggaagctcaccagaagcagctgtccagactccgagacgaaattgaggagaagcagaaaatcattgatgagattcgggatttgaatcagaaactgcaactggaacaggagaagcttagttctgattataacaagctgaaaatagaggaccaagagagagaaatgaagctggaaaagctcttattgctcaacgataaaagggaacaagccagagaagacctcaaagggctggaggagacagtgtctagagaattgcagacactgcacaaccttcggaaactctttgtccaggatctgaccacccgagttaaaaaaagtgtggagttggacaacgatgatggagggggcagtgctgcccagaagcagaaaatttccttcttggagaataacctggagcagctcaccaaagttcacaagcagctggtccgggacaacgcagacctgcgctgtgaactgcccaagctggagaagcggctgcgtgccacggcggagcgcgtcaaggctctggagagcgcgctgaaggaggccaaggagaacgccatgcgggaccgtaagcgctaccagcaggaggtggatcgtatcaaggaggccgtgcgggccaagaacatggccagaagggcccattcagcccagatcgccaagcccatccgccccggacactacccggcctcatctccaacggccgtccatgccattcgagggggaggaggcagctcttcaaattccactcactaccagaaataaatacaaaatatgactccacgtagcatgtcaaggactacattaatcaccaattcctttatttttccccccctacagtttccattttttttttatacttgcttactccagccatctgcagtacaccagtttcaggtcttttgagctgtgtagagtttctgtgtgtacagatgtgtgctcggacttttctctttttgagaaatctgaaggagatggttgcagaagatccacttactactgagaaccattaccaccgactcggcctccggggtgttgggtggtttctgggtggttcctggagcctcctctgggcagtgcactgtcccatctgtacgccctaatgtgccattccctagaggggaacaaccaagtgccgtggaggcagatgatcatggtctgcctcaactgtctggtttcctgtaaaataaacacattgttttatatttttagggaacaaaaagtgctgctatagggttcaaagttttccttctgaacacttttccgaaacaaattaccccaaagacacattttgaatatcctggtcacatctttggatctgtaaaatataccttttagtatggcacctgttaaaatgcaaagcaaatttctttggggcagaaaaacaatctgacagtagcagtgtagaatttgttcattcaaatacatctgtgtaaatgcaaaaagtcataaaattcacctccgagctgcttgcttttgaacctgcagcaactagtcttagccggcccggtttgaacatcgttctttcagaagtgctgaaaatgctgcaaagttggataagtggaaatgtggctgcccctctcctcactacttcctctctgatcgttctgaagcttgcattgggaatggctgctttctctaaccattttcagcttgagtgggtattgctgaagaaatccaacatcattccagcagttgaaaaaggaagccttcgggagaaagtgcttgtcaaaattttgttctttgtgcttgtgtatgagtaagttgccatgaataagttattattttaacccataattggcgactgtttatatgaattctttctttggcaccaaataggtttcatcttcttaggcacaattagaaaaaatccacatagatggatattttacatttagttattgctttatccaaatacatgaatctaaagctgaatcaacccttacttccagttgtgcttattaagaagatcaatttccaagtagtaaagttttcagggaaactgactgtgctgctatttgttttgacaaatttgggggtaagtcaatgacaaccaaaccaatctcggtggaaactcctatcctatcatgttgtgtgcccaagatgagtgagctggcactgtgccctgaagctttcaccactgtaatgaaatatatgccaggggagactttgggcttttctcatgactgtgtgggtcgaaggtagctcaagtgtgtgtgtgtgtgtgtgtgtgtgtgtgtgtgtgtgtgtgtatgtgtgtaaagtgctaagaactgtgcattgacatccaaacatttcttgtacaaaatttccctagcaaagcaaacctgctttgacttaatttatttgttaaatgttgcactttgtttatgtatgttttgtttttggtggggaataaggagagagaggacgacaaattctattgaagtatttattttgtgaagatggcaattttgcatttgtttaaatttttttcattctttaattttgttatcagtgccagcccaatatacctgctctaccattatttgcggtctgataaaagggtccttgtggggcaggttttgcaaagcttatcaggtaataacatatgccacataaccttgttgatatgtttgcttctgatttgggaagctaaacattggtgtttgagaggattgccaattattaattgtcattaccactactctccattactttttgtttggaaattgaacaaaggtcagtaatggtttttggctcttgttaatatccatcataaaatagattgttttagattctttccagggtgatttttccctgggtaccccgtttctacttctaaagaattgcttggcactttcatgtttcaaagggaaacattcgcttgtagttccattttacttgatctctacaagggactgacaacatttgctttatttttattcacagagaaagttggctttgatgtctcttaaagataattctgctagttgctgatcagccagtcagttcacctagcttcaatctttataggacttctaatctaattttcctatagtgtgactaaaagggaggcaaattattggaacggattattcaaatggatccttaaatattgctatgtataataagccagttattatatcaggaccatgttctctgtaggccactttctaaaaaagccacatatgtgcaattttcaggtttttagactattgctccctgtactttaaatgtaaaaaccacacttctgaacaactaagctcatgaatatgattttggttatatgcagcttttgactagcatgtattgtgtctttttctcctctatgaataattttatatttcatgctacttcttgaaagtttactctttgatgctctaagagaacagccagatggtttatatgaataatctttatctgcaggatggtggattggtaaattaggagaatgttgtttgagatatcaagatttatgtctgggaactaaaatatataatgccaaatgtgtttttgtcaattactagagaattctgtgcaaacatatcatctcttcaaatgctgcacactttgcttttgttaaacagcaggtagtagacagaacaataacagtttcgcgttaagacttttaaaggaaatagaatcgtgattaagaaatcagaatttatagatatattgggataaatgaagaaataaaaatgtttgtctagaatgtagcatctagtgactttttaaagccctaacgtttacataaagaagctctagttcttatagaaataacaaagcaaataaaagttcttaacaatcccctctttcgaagtgcatttttttaaagcagggcaggagacatttggactctagctatatgacatactgggaaaggcagagggtggagggaagatttcacttcattgtctagcccagaatcttgagcaagctaaagaaaccatcataatctaaaattgcttcatttaacactaacaatttagactttttaaaccaagcattgaataatggctggataactgccgaagtaagcgccgctccatgaagtctgcttacttatttaaaaattgtgtatcagttttaaatactgttcattgtgtgcagatataaggggaatagggcattctgtagaattatacatgtctagtttgtaaagtgtgtcctgtgtactgcagatgtgtgttctctgggctttatgtatctgtacagtagctttcacattaaaaaaattgtggacaaacttgtccggggggtttgaggggagaatggtggtttatatcaataacgatgctgtactatagtccatgtaacaaaagatctggaagtcaccctcctctggcccacggaaaattttggtaatcttctaggttctaaaatgaagatgtatgggtactctggcagactgcatgttgtataatttgaaaaatactaaaagtggaaaataaaattgaattaaactttg

SEQ ID NO: 262 - DNA, 2811 bp, HOMO SAPIENS
ccatttcaatagtcgcgggatacttgaactgcaagaacagccgccgctccggcgggctgctcgctgcatctctgggcgtctttggctcgccacgctgggcagtgcctgcctgcgcctttcgcaacctcctcggccctgcgtggtctcgagctgggtgagcgagcgggcgggctggtaggctggcctgggctgcgaccggcggctacgactattctttggccgggtcggtgcgagtggtcggctgggcagagtgcacgctgcttggcgccgcaggctgatcccgccgtccactcccgggagcagtgatgttgggcaactctgcgccggggcctgcgacccgcgaggcgggctcggcgctgctagcattgcagcagacggcgctccaagaggaccaggagaatatcaacccggaaaaggcagcgcccgtccaacaaccgcggacccgggccgcgctggcggtactgaagtccgggaacccgcggggtctagcgcagcagcagaggccgaagacgagacgggttgcaccccttaaggatcttcctgtaaatgatgagcatgtcaccgttcctccttggaaagcaaacagtaaacagcctgcgttcaccattcatgtggatgaagcagaaaaagaagctcagaagaagccagctgaatctcaaaaaatagagcgtgaagatgccctggcttttaattcagccattagtttacctggacccagaaaaccattggtccctcttgattatccaatggatggtagttttgagtcaccacatactatggacatgtcaattgtattagaagatgaaaagccagtgagtgttaatgaagtaccagactaccatgaggatattcacacataccttagggaaatggaggttaaatgtaaacctaaagtgggttacatgaagaaacagccagacatcactaacagtatgagagctatcctcgtggactggttagttgaagtaggagaagaatataaactacagaatgagaccctgcatttggctgtgaactacattgataggttcctgtcttccatgtcagtgctgagaggaaaacttcagcttgtgggcactgctgctatgctgttagcctcaaagtttgaagaaatataccccccagaagtagcagagtttgtgtacattacagatgatacctacaccaagaaacaagttctgagaatggagcatctagttttgaaagtccttacttttgacttagctgctccaacagtaaatcagtttcttacccaatactttctgcatcagcagcctgcaaactgcaaagttgaaagtttagcaatgtttttgggagaattaagtttgatagatgctgacccatacctcaagtatttgccatcagttattgctggagctgcctttcatttagcactctacacagtcacgggacaaagctggcctgaatcattaatacgaaagactggatataccctggaaagtcttaagccttgtctcatggaccttcaccagacctacctcaaagcaccacagcatgcacaacagtcaataagagaaaagtacaaaaattcaaagtatcatggtgtttctctcctcaacccaccagagacactaaatctgtaacaatgaaagactgcctttgttttctaagatgtaaatcactcaaagtatatggtgtacagtttttaacttaggttttaattttacaatcatttctgaatacagaagttgtggccaagtacaaattatggtatctattactttttaaatggttttaatttgtatatcttttgtatatgtatctgtcttagatatttggctaattttaagtggttttgttaaagtattaatgatgccagctgtcaggataataaattgatttggaaaactttgcaagtcaaatttaacttcttcaggattttgcttagtaaagaagtttacttggtttactatataatgggaagtgaaaagccttcctctaaaattaaagtaggtttaggaaaacagaccctcaaattctgacattcattttcctaagcaactggatcaatttgctgacttgggcataatctaatctaagcatatctgaatacagtattcagagatagatacagtagagattccccagactttttcgctctttgtaaaacctgtttgtttaggttttgcgaggtaaactcaacagaggttgggagtggaagagggtgggaagcttatatgcaaattaacagacgagaaatgctccagaaggtttattattttaaagcacattaaaaacaaaaaactatttttaaaatcctgctagattttataatggatttgtgaataaaaaatacccagggttctcagaatggaataaatatcccttttaatagttatatatacagatatacaactgttagctttaattggcagctctcttcttttttcttcttttcactggctttttacttggtgctttttcttgttttgcactggtggtctgtgttctgtgaataaagcaaagtaagaatttactaagagtatgttaagttttggattattgaaataagaggcatttcttagttttccagtaggatctaaaatgtgtcagctatgagtaagactggcatccaagaagtttatattatagatttaggtcctaatttttataaatcacaaggtaaaaaaatcacagaacagatggatctctaatgaaaaagggatgtctttttgtttatagtcatgtggcaagatgagagtaaaaccagagagcaaacctctataagtgttgagtatatgtatacatttgaaataaaccagaaatttgttaccttaaaaaaaaaaaaaa

SEQ ID NO: 263 - DNA, 2773 bp, HOMO SAPIENS
ggaggatgctgggaaggaggtaaaatggccaccggcggcggcgcggaggaagagaggaaacgggggcggccgcagcttctgccccccgcgcggcccgcggcccggggcgaggaggccgacggcggccgcgagaagatgggctgggcccaggtggtgaagaatctagccgagaagaagggcgaattccgcgagccgcggccgccgcggcgggaggaggaaagcggcggcggtggagggagcgccgggctcggcggccccgcgggcctggcggcgccggacctcggcgacttcccaccggctggccgcggggatccgaagggccgtcggagagatccggccggcgaggcggtggacccccgcaaaaagaagggcgctgcggaggcgggcaggaggaagaaggccgaggcggcggcggccgccatggcgaccccggccaggcccggcgaggccgaggacgcggccgagcggcccctccaggatgagccggcggcggcggcaggcccgggcaagggtcgcttcctcgtccgcatctgtttccagggagacgagggcgcctgcccgacccgggacttcgtggtaggagcgcttatcctgcgctccatcggcatggacccgagcgacatctacgcggtcatccagatcccgggcagccgcgaattcgacgtgagcttccgctcagcggagaagctggccctgttcctacgcgtctacgaggagaagcgggagcaggaggactgctgggagaactttgtggtgctggggcggagcaagtccagcttgaagacgctcttcatcctcttccggaacgagacggtggacgtggaggacattgtgacttggctcaagcgccactgcgacgtgctggccgtgccggtgaaagtgaccgacaggtttgggatctggaccggggagtacaaatgcgagatcgagctgcgccagggggagggcggggtcaggcacttgccaggggccttcttcctgggggccgagaggggctacagctggtacaaggggcagcccaagacatgctttaaatgtggttcccggacccacatgagcggcagctgcacgcaggacaggtgcttcaggtgcggggaggaggggcacctgagcccttactgccggaagggcatcgtgtgcaacctctgtggcaagcgaggacacgcctttgcccagtgtcccaaagcagtgcacaattccgtggcagctcagctaaccggcgtggccgggcactaaacacccgcctgcctgccagggtgaacacacagccagcttatccctcttaagtgccaaaacttttttttaaaccattttttatcgtttttgaaggagatctttttaaaacctacaagagacatctctctatgccttcttaaaccgagtttactccatttcagcctgttctgaattggtgactctgtcaccaataacgactgcggagaactgtagcgtgcagatgtgttgcccctcccttttaaaattttattttcgtttttctattgggtatttgttttgtttcttgtactttttctctctctccttgcccccctcccgccctccccgccccataccttttcttcccctggattttcaccctttgggctgccttgctcatctttatgccccagcactaggtacggggcccaacacgtggtaggcactccatcagtgtttgctgaattgaaaacattgttgactgtggcttctatcagagtgtctaccttttgcagctcttcccctccctcatttaatttgctgcttttaatctacgtggtctgagaatttgtgaaaccagtgttgttagaagtgtatataatctgaatcaataagctctgaatggtggccaagggcctctcttatggcacaaagatgcatggacttcatgacagctcttttggtggctcagaagccattttttatagaatcatggaatctagaatattcctgctggaaagaacctgagagttggtttggaccaattccctggttttccagcagatgaaacaggcccaaagaggttaaatgactgggtgaaaatcacatagctgtctggtgccagagccagcctatagtagagtcccctgaccccaagcccggtgctcattccactacctctcacacttcacaacaatttcctcaacacttgagggcccagaaagtctgatctctccagaatgatcagcccagaggaatgctgagaaatcacctggaggagggagcagaaagagaaggtttttaaggaggggcttctgaatacttgggagatacggaacggaccaaggaccacactccagggtgcattcgttgctccctggggcaccacttctggattacagtgtgccaggtcctttggaggccctaccccttccccattcattgccaccagtgagaaatgggggtgcccctgtgtaaagaaacctaccaaaggtttacatttgcaccttagcctcaatagctacgaaccctagagaagcagctagctggagctcatgtgcaactcctgattctcaggagaaagatggattttaacccaaaattatgagtgagctgttaactctaaaatgtacttgggagataggccaagcgagaggtcatgggccaactaagtgttatccagtagaaaagacagtacactgcttttcttttagtgtttgcttttcctttgctatatgttttgctatttccttgtggcttagaatgtaaaattgattgttaaaagttttgttctgaataaatatttatcttttgtattgctaaaaaaaaaaaaaaaaaa

SEQ ID NO: 264 - DNA, 2826 bp, HOMO SAPIENS
gctccaagaaaccagccaacggctggaggatgtggaggagcaggtagggtggctcatggctacattagattcaggggacatctcctcagatgccctgcaaaccatgaaataaaaatggaggaggaacaacaacaacaaacaaaaaaaaaaagcaaagaggaactgcaagttcagtccctagcgactaacagtgagcagaggaagtaaagggggagttgtaagagaggcggtatcaacagcctgctgatgaaagaggcgactctgcagaaagaggcaacttgacatatcaggactttaaccgctgtagaaatagctcaggcataccaagcccatgcaaacacagaattgcagaagttcaggagaggcttatcacttccctgagaagaaaaacacattttcagttttgcctgcatcataagagtgagcactccattgctttctttcctggccacactgctacaatccagcactaactatccatgtccagggtaaggatcgagatcgagaagcccacactgccagtgaaaaagctacgtctttactgcataaattagaggaagcaatttcggaacaacggaaccttcaaactataaatactgaattatcgaacacttgccaggcacttcagcagaagacaaggaaactgaagaagctttttagatgaggaatttcctcactatgattccctgtcctgcgcagatgcaattcaacaacctcttcaagaaaaattgaagcagtgttgccacaaactatatggtggtcaagaagcaagaatacatcagacacccctgaccttgaaacatacgtgctggtacacacctctgctggatgccttatctctggatagttttacagcagttccaaccctggaatcaacacctttctcaggtgtagccaaccaaatccacactctgtgtgaaaggcccacatatggagaagtaaaggatggtgctttggatgtaaaaagacaacacaagtgcccaggccccacaagtggccccagcccaggaacgaatctctcaggctgcatcaggatgaatgatgacccaagtatggaagagaatggtgttgaacgcgtgtgtcctgagagcctgctgcagtccagggaatattcctcactaccattacccagacacacttcatcgacagacggtactataacttcaagtgatcctggattagaaattctgaatatggcttcttgtgaccttgacagaaactcgctctgtaagaaagaggaggatacaagatcagcttctcccacgatagaggcccaaggcacaagtccagctcatgataatattgcattccaagactctacgagtaaggataaaaccatattaaatctggaagccaaagaggaaccagaaacaatagaagaacataaaaaagaacatgcttcaggagactctgtggtttcccctcttcctgtaaccactgtgaaatcggttaaccttagacaaagtgagaacacttctgctaatgagaaggaggtggaggcagaatttctcagattatctttgggatttaagtgtgactggtttaccttggagaagagagtgaagcttgaagagaggtcccgtgacttggcagaagaaaatttgaagaaagaaatcactaactgtttaaaactattagagtctttaacacctctgtgtgaagatgacaaccaggcacaggaaatcattaagaagctggagaagagtataaagtttcttagccagtgtgcagcacgagtggccagtagggctgagatgttgggagccatcaatcaggaaagccgggttagtaaagcagttgaagtgatgattcagcacgtagaaaacttgaagaggatgtatgccaaagagcacgctgaattagaagaactgaaacaggttcttctgcagaatgaaaggtctttcaatcctcttgaagatgatgatgactgccaaattaaaaaacgttcagcttctctaaactccaagccatcttctctacgaagagtgactattgcctctttacccagaaatattggaaatgcaggaatggtggctgggatggaaaataatgatcgattcagtagaaggtcaagcagttggcgtattttggggtcaaagcagagtgaacaccgtccctcattacctcgatttattagcacctattcctgggcagatgctgaagaagaaaaatgtgaactaaaaactaaagatgactcagagccatctggagaagaaacagtagaaaggacaaggaagccaagtctttctgaaaagaaaaataatccatcaaagtgggatgtctcttcagtttatgacacaatagcttcctgggcaacaaatctcaagtcctccatcagaaaggctaataaggccctctggctctctattgcattcattgtactgtttgcagctttgatgagcttcctcacaggccaattattccagaagtctgtggatgccgctcccacacagcaagaggactcatggacgtctctagaacatatcttgtggccatttaccagactccgacacaatgggccaccaccagtgtgacagcaggacatcctaatatatggatcttgatttttaagtttcagtatctgaacttcgtaaattagtaacttttagctgggaaagtatagcatgaaaccagaggttctcagaatgactgtaagatagcttacatttcctctttttgcctttatctccccaactaaaatacaatggggaagaagtctgcctatgatctttgaatgagctttttaaggaagaaatattatatattgtttgttaaagtttattgaaataaagaatcatttaaatcttcaaaaaaaaaaaaaaaaaa

SEQ ID NO: 265 - DNA, 496 bp, HOMO SAPIENS
  misc_feature (26)..(26): n is a, c, g, or t
  misc_feature (32)..(32): n is a, c, g, or t
  misc_feature (41)..(41): n is a, c, g, or t
  misc_feature (72)..(72): n is a, c, g, or t
  misc_feature (96)..(96): n is a, c, g, or t
  misc_feature (197)..(214): n is a, c, g, or t
  misc_feature (256)..(256): n is a, c, g, or t
  misc_feature (417)..(439): n is a, c, g, or t
attctactcttgagttgacataagtncatctnaagcttctnatctccgatgagaacaatgggggacaccaancagaatataaaacccatgattgantacatcaaattgctaacatggcagtaaacagacatgaggtgaagatggagaagaaggaaacccaggacgaaagtcagcctcgcatttggaacccatttccnnnnnnnnnnnnnnnnnnttccagaaggaactactgagatgcaaagaagcacagcagctnttgcacacatgcgtgggattagatggaaaacaagtggattgagggtctgccaatgaaagcgacccatactgaagtccactggctctggttgagacccagaagagtcatgcatcagaataaaggtggacaggaaataccctggcctttgtagggactgagcnnnnnnnnnnnnnnnnnnnnnnngcctgtatggaggacccctgaccatcccccagaagtagactcccatctcttctgcag

SEQ ID NO: 266 - DNA, 7274 bp, HOMO SAPIENS
catagagccagcgggcgcgggcgggacgggcgccccgcggccggacccagccagggcaccacgctgcccggccctgcgccgccaggcacttctttccggggctcctagggacgccagaaggaagtcaacctctgctgcttctccttggcctgcgttggaccttcctttttttgttgtttttttttgtttttcccctttcttccttttgaattaactggcttcttggctggatgttttcaacttctttcctggctgcgaacttttccccaattgttttccttttacaacagggggagaaagtgctctgtggtccgaggcgagccgtgaagttgcgtgtgcgtggcagtgtgcgtggcaggatgtgcgtgcgtgtgtaacccgagccgcccgatctgtttcgatctgcgccgcggagccctccctcaaggcccgctccacctgctgcggttacgcggcgctcgtgggtgttcgtgcctcggagcagctaaccggcgggtgctgggcgacggtggaggagtatcgtctcgctgctgcccgagtcagggctgagtcacccagctgatgtagacagtggctgccttccgaagagtgcgtgtttgcatgtgtgtgactctgcggctgctcaactcccaacaaaccagaggaccagccacaaacttaaccaacatccccaaacccgagttcacagatgtgggagagctgtagaaccctgagtgtcatcgactgggccttcttatgattgttgttttaagattagctgaagatctctgaaacgctgaattttctgcactgagcgttttgacagaattcattgagagaacagagaacatgacaagtacttctagctcagcactgctccaactactgaagctgattttcaaggctacttaaaaaaatctgcagcgtacattaatggatttctgttgtgtttaaattctccacagattgtattgtaaatattttatgaagtagagcatatgtatatatttatatatacgtgcacatacattagtagcactacctttggaagtctcagctcttgcttttcgggactgaagccagttttgcatgataaaagtggccttgttacgggagataattgtgttctgttgggactttagacaaaactcacctgcaaaaaactgacaggcattaactactggaacttccaaataatgtgtttgctgatcgttttactcttcgcataaatattttaggaagtgtatgagaattttgccttcaggaacttttctaacagccaaagacagaacttaacctctgcaagcaagattcgtggaagatagtctccactttttaatgcactaagcaatcggttgctaggagcccatcctgggtcagaggccgatccgcagaaccagaacgttttcccctcctggactgttagtaacttagtctccctcctcccctaaccacccccgcccccccccaccccccgcagtaataaaggcccctgaacgtgtatgttggtctcccgggagctgcttgctgaagatccgcgcccctgtcgccgtctggtaggagctgtttgcagggtcctaactcaatcggcttgttgtgatgcgtatccccgtagatgccagcacgagccgccgcttcacgccgccttccaccgcgctgagcccaggcaagatgagcgaggcgttgccgctgggcgccccggacgccggcgctgccctggccggcaagctgaggagcggcgaccgcagcatggtggaggtgctggccgaccacccgggcgagctggtgcgcaccgacagccccaacttcctctgctccgtgctgcctacgcactggcgctgcaacaagaccctgcccatcgctttcaaggtggtggccctaggggatgttccagatggcactctggtcactgtgatggctggcaatgatgaaaactactcggctgagctgagaaatgctaccgcagccatgaagaaccaggttgcaagatttaatgacctcaggtttgtcggtcgaagtggaagagggaaaagcttcactctgaccatcactgtcttcacaaacccaccgcaagtcgccacctaccacagagccatcaaaatcacagtggatgggccccgagaacctcgaagacatcggcagaaactagatgatcagaccaagcccgggagcttgtccttttccgagcggctcagtgaactggagcagctgcggcgcacagccatgagggtcagcccacaccacccagcccccacgcccaaccctcgtgcctccctgaaccactccactgcctttaaccctcagcctcagagtcagatgcaggatacaaggcagatccaaccatccccaccgtggtcctacgatcagtcctaccaatacctgggatccattgcctctccttctgtgcacccagcaacgcccatttcacctggacgtgccagcggcatgacaaccctctctgcagaactttccagtcgactctcaacggcacccgacctgacagcgttcagcgacccgcgccagttccccgcgctgccctccatctccgacccccgcatgcactatccaggcgccttcacctactccccgacgccggtcacctcgggcatcggcatcggcatgtcggccatgggctcggccacgcgctaccacacctacctgccgccgccctaccccggctcgtcgcaagcgcagggaggcccgttccaagccagctcgccctcctaccacctgtactacggcgcctcggccggctcctaccagttctccatggtgggcggcgagcgctcgccgccgcgcatcctgccgccctgcaccaacgcctccaccggctccgcgctgctcaaccccagcctcccgaaccagagcgacgtggtggaggccgagggcagccacagcaactcccccaccaacatggcgccctccgcgcgcctggaggaggccgtgtggaggccctactgaggcgccaggcctggcccggctgggccccgcgggccgccgccttcgcctccgggcgcgcgggcctcctgttcgcgacaagcccgccgggatcccgggccctgggcccggccaccgtcctggggccgagggcgcccgacggccaggatctcgctgtaggtcaggcccgcgcagcctcctgcgcccagaagcccacgccgccgccgtctgctggcgccccggccctcgcggaggtgtccgaggcgacgcacctcgagggtgtccgccggccccagcacccaggggacgcgctggaaagcaaacaggaagattcccggagggaaactgtgaatgcttctgatttagcaatgctgtgaataaaaagaaagattttatacccttgacttaactttttaaccaagttgtttattccaaagagtgtggaattttggttggggtggggggagaggagggatgcaactcgccctgtttggcatctaattcttatttttaatttttccgcaccttatcaattgcaaaatgcgtatttgcatttgggtggtttttatttttatatacgtttatataaatatatataaattgagcttgcttctttcttgctttgaccatggaaagaaatatgattcccttttctttaagttttatttaacttttcttttggacttttgggtagttgtttttttttgttttgttttgtttttttgagaaacagctacagctttgggtcatttttaactactgtattcccacaaggaatccccagatatttatgtatcttgatgttcagacatttatgtgttgataattttttaattatttaaatgtacttatattaagaaaaatatcaagtactacattttcttttgttcttgatagtagccaaagttaaatgtatcacattgaagaaggctagaaaaaaagaatgagtaatgtgatcgcttggttatccagaagtattgtttacattaaactccctttcatgttaatcaaacaagtgagtagctcacgcagcaacgtttttaataggatttttagacactgagggtcactccaaggatcagaagtatggaattttctgccaggctcaacaagggtctcatatctaacttcctccttaaaacagagaaggtcaatctagttccagagggttgaggcaggtgccaataattacatctttggagaggatttgatttctgcccagggatttgctcaccccaaggtcatctgataatttcacagatgctgtgtaacagaacacagccaaagtaaactgtgtaggggagccacatttacataggaaccaaatcaatgaatttaggggttacgattatagcaatttaagggcccaccagaagcaggcctcgaggagtcaatttgcctctgtgtgcctcagtggagacaagtgggaaaacatggtcccacctgtgcgagaccccctgtcctgtgctgctcactcaacaacatctttgtgttgctttcaccaggctgagaccctaccctatggggtatatgggcttttacctgtgcaccagtgtgacaggaaagattcatgtcactactgtccgtggctacaattcaaaggtatccaatgtcgctgtaaattttatggcactatttttattggaggatttggtcagaatgcagttgttgtacaactcataaatactaactgctgattttgacacatgtgtgctccaaatgatctggtggttatttaacgtacctcttaaaattcgttgaaacgatttcaggtcaactctgaagagtatttgaaagcaggacttcagaacagtgtttgatttttattttataaatttaagcattcaaattaggcaaatctttggctgcaggcagcaaaaacagctggacttatttaaaacaacttgtttttgagttttcttatatatatattgattatttgttttacacacatgcagtagcactttggtaagagttaaagagtaaagcagcttatgttgtcaggtcgttcttatctagagaagagctatagcagatctcggacaaactcagaatatattcactttcatttttgacaggattccctccacaactcagtttcatatattattccgtattacatttttgcagctaaattaccataaaatgtcagcaaatgtaaaaatttaatttctgaaaagcaccattagcccatttcccccaaattaaacgtaaatgttttttttcagcacatgttaccatgtctgacctgcaaaaatgctggagaaaaatgaaggaaaaaattatgtttttcagtttaattctgttaactgaagatattccaactcaaaaccagcctcatgctctgattagataatcttttacattgaacctttactctcaaagccatgtgtggagggggcttgtcactattgtaggctcactggattggtcatttagagtttcacagactcttaccagcatatatagtatttaattgtttcaaaaaaaatcaaactgtagttgttttggcgataggtctcacgcaacacatttttgtatgtgtgtgtgtgtgcgtgtgtgtgtgtgtgtgtgaaaaattgcattcattgacttcaggtagattaaggtatctttttattcattgccctcaggaaagttaaggtatcaatgagacccttaagccaatcatgtaataactgcatgtgtctggtccaggagaagtattgaataagccatttctactgcttactcatgtccctatttatgatttcaacatggatacatatttcagttctttctttttctcactatctgaaaatacatttccctccctctcttccccccaatatctccctttttttctctcttcctctatcttccaaaccccactttctccctcctccttttcctgtgttctcttaagcagatagcacatacccccacccagtaccaaatttcagaacacaagaaggtccagttcttcccccttcacataaaggaacatggtttgtcagcctttctcctgtttatgggtttcttccagcagaacagagacattgccaaccatattggatctgcttgctgtccaaaccagcaaactttcctgggcaaatcacaatcagtgagtaaatagacagcctttctgctgccttgggtttctgtgcagataaacagaaatgctctgattagaaaggaaatgaatggttccactcaaatgtcctgcaatttaggattgcagatttctgccttgaaatacctgtttctttgggacattccgtcctgatgatttttatttttgttggtttttatttttggggggaatgacatgtttgggtcttttatacatgaaaatttgtttgacaataatctcacaaaacatattttacatctgaacaaaatgcctttttgtttaccgtagcgtatacatttgttttgggatttttgtgtgtttgttgggaattttgtttttagccaggtcagtattgatgaggctgatcatttggctctttttttccttccagaagagttgcatcaacaaagttaattgtatttatgtatgtaaatagattttaagcttcattataaaatattgttaatgcctataactttttttcaatttttttgtgtgtgtttctaaggactttttcttaggtttgctaaatactgtagggaaaaaaatgcttctttctactttgtttattttagactttaaaatgagctacttcttattcacttttgtaaacagctaatagcatggttccaattttttttaagttcactttttttgttctaggggaaatgaatgtgcaaaaaaagaaaaagaactgttggttatttgtgttattctggatgtataaaaatcaatggaaaaaaataaactttcaaattgaaatgacggtataacacatctactgaaaaagcaacgggaaatgtggtcctatttaagccagcccccacctagggtctatttgtgtggcagttattgggtttggtcacaaaacatcctgaaaattcgtgcgtgggcttctttctccctggtacaaacgtatggaatgcttcttaaaggggaactgtcaagctggtgtcttcagccagatgacatgagagaatatcccagaaccctctctccaaggtgtttctagatagcacaggagagcaggcactgcactgtccacagtccacggtacacagtcgggtgggccgcctcccctctcctgggagcattcgtcgtgcccagcctgagcagggcagctggactgctgctgttcaggagccaccagagccttcctctctttgtaccacagtttcttctgtaaatccagtgttacaatcagtgtgaatggcaaataaacagtttgacaagtacatacaccata

SEQ ID NO: 267 - DNA, 1441 bp, HOMO SAPIENS
aagctggcgaggccgagcccctcctagtgcttccggaccttgctccctgaacactcggaggtggcggtggatcttactccttccagccagtgaggatccagcaacctgctccgtgcctcccgcgcctgttggttggaagtgacgaccttgaagatcggccggttggaagtgacgaccttgaagatcggcgggcgcagcggggccgagggggcgggtctggcgctaggtccagcccctgcgtgccgggaaccccagaggaggtcgcagttcagcccagctgaggcctgtctgcagaatcgacaccaaccagcatcatgtccatgacactggggtactgggacatccgcgggctggcccacgccatccgcctgctcctggaatacacagactcaagctacgaggaaaagaagtatacgatgggggacgctcctgactatgacagaagccagtggctgaatgaaaaattcaagctgggcctggactttcccaatctgccctacttgattgatggggctcacaagatcacccagagcaacgccatcctgtgctacattgcccgcaagcacaacctgtgtggggagacagaagaggagaagattcgtgtggacattttggagaaccaggctatggacgtctccaatcagctggccagagtctgctacagccctgactttgagaaactgaagccagaatacttggaggaacttcctacaatgatgcagcacttctcacagttcctggggaagaggccatggtttgttggagacaagatcacctttgtagatttcctcgcctatgatgtccttgacctccaccgtatatttgagcccaactgcttggacgcctttccaaatctgaaggacttcatctcccgctttgagggcttggagaagatctctgcctacatgaagtccagccgcttcctcccaaaacctctgtacacaagggtggctgtctggggcaacaagtaatgccttgaaggccaggaggtgggagtgaggagcccatactcagcctgctgcccaggctgtgcagcgcagctggactctgcatcccagcacctgcctcctcgttcctttctcctgtttattcccatctttacccccaagactttattgggcctcttcacttcccctaaacccctgtcccatgcaggccctttgaagcctcagctacccactttccttcatgaacatccccctcccaacactacccttccctgcactaaagccagcctgaccttccttcctgttagtggttgtatctgctttgaagggcctacctggcccctcgcctgtggagctcagccctgagctgtccccgtgttgcatgacagcattgactggtttacaggccctgctcctgcagcatggcccctgccttaggcctacctgatcaaaataaagcctcagccacatttgctataaaaaaaaaaaaaaaa

SEQ ID NO: 268 - DNA, 3913 bp, HOMO SAPIENS
ctttcactggcaagagacggagtcctgggtttcagttccagttgcctgcggtgggctgtgtgagtttgccaaagtcccctgccctctctgggtctcggttccctcgcctgtccacgtgaggttggaggagctgaacgccgacgtcatttttagctaagagggagcagggtccccgagtcgccggcccagggtctgcgcatccgaggccgcgcgccctttcccctcccccacggctcctccgggccccgcactctgcgccccggctgccgcccagcgccctacaccgccctcagggggccctcgcgggctccccccggccgggatgccagtgccccgcgccacgcgcgcctgctcccgcgccgcctgccctgcagcctgcccgcggcgcctttatacccagcgggctcggcgctcactaatgtttaactcggggccgaaacttgccagcggcgagtgactccaccgcccggagcagcggtgcaggacgcgcgtctccgccgcccgcggtgacttctgcctgcgctccttctctgaacgctcacttccgaggagacgccgacgatgaagacaccgtggaaggttcttctgggactgctgggtgctgctgcgcttgtcaccatcatcaccgtgcccgtggttctgctgaacaaaggcacagatgatgctacagctgacagtcgcaaaacttacactctaactgattacttaaaaaatacttatagactgaagttatactccttaagatggatttcagatcatgaatatctctacaaacaagaaaataatatcttggtattcaatgctgaatatggaaacagctcagttttcttggagaacagtacatttgatgagtttggacattctatcaatgattattcaatatctcctgatgggcagtttattctcttagaatacaactacgtgaagcaatggaggcattcctacacagcttcatatgacatttatgatttaaataaaaggcagctgattacagaagagaggattccaaacaacacacagtgggtcacatggtcaccagtgggtcataaattggcatatgtttggaacaatgacatttatgttaaaattgaaccaaatttaccaagttacagaatcacatggacggggaaagaagatataatatataatggaataactgactgggtttatgaagaggaagtcttcagtgcctactctgctctgtggtggtctccaaacggcacttttttagcatatgcccaatttaacgacacagaagtcccacttattgaatactccttctactctgatgagtcactgcagtacccaaagactgtacgggttccatatccaaaggcaggagctgtgaatccaactgtaaagttctttgttgtaaatacagactctctcagctcagtcaccaatgcaacttccatacaaatcactgctcctgcttctatgttgataggggatcactacttgtgtgatgtgacatgggcaacacaagaaagaatttctttgcagtggctcaggaggattcagaactattcggtcatggatatttgtgactatgatgaatccagtggaagatggaactgcttagtggcacggcaacacattgaaatgagtactactggctgggttggaagatttaggccttcagaacctcattttacccttgatggtaatagcttctacaagatcatcagcaatgaagaaggttacagacacatttgctatttccaaatagataaaaaagactgcacatttattacaaaaggcacctgggaagtcatcgggatagaagctctaaccagtgattatctatactacattagtaatgaatataaaggaatgccaggaggaaggaatctttataaaatccaacttagtgactatacaaaagtgacatgcctcagttgtgagctgaatccggaaaggtgtcagtactattctgtgtcattcagtaaagaggcgaagtattatcagctgagatgttccggtcctggtctgcccctctatactctacacagcagcgtgaatgataaagggctgagagtcctggaagacaattcagctttggataaaatgctgcagaatgtccagatgccctccaaaaaactggacttcattattttgaatgaaacaaaattttggtatcagatgatcttgcctcctcattttgataaatccaagaaatatcctctactattagatgtgtatgcaggcccatgtagtcaaaaagcagacactgtcttcagactgaactgggccacttaccttgcaagcacagaaaacattatagtagctagctttgatggcagaggaagtggttaccaaggagataagatcatgcatgcaatcaacagaagactgggaacatttgaagttgaagatcaaattgaagcagccagacaattttcaaaaatgggatttgtggacaacaaacgaattgcaatttggggctggtcatatggagggtacgtaacctcaatggtcctgggatcgggaagtggcgtgttcaagtgtggaatagccgtggcgcctgtatcccggtgggagtactatgactcagtgtacacagaacgttacatgggtctcccaactccagaagacaaccttgaccattacagaaattcaacagtcatgagcagagctgaaaattttaaacaagttgagtacctccttattcatggaacagcagatgataacgttcactttcagcagtcagctcagatctccaaagccctggtcgatgttggagtggatttccaggcaatgtggtatactgatgaagaccatggaatagctagcagcacagcacaccaacatatatatacccacatgagccacttcataaaacaatgtttctctttaccttagcacctcaaaataccatgccatttaaagcttattaaaactcatttttgttttcattatctcaaaactgcactgtcaagatgatgatgatctttaaaatacacactcaaatcaagaaacttaaggttacctttgttcccaaatttcatacctatcatcttaagtagggacttctgtcttcacaacagattattaccttacagaagtttgaattatccggtcgggttttattgtttaaaatcatttctgcatcagctgctgaaacaacaaataggaattgtttttatggaggctttgcatagattccctgagcaggattttaatctttttctaactggactggttcaaatgttgttctcttctttaaagggatggcaagatgtgggcagtgatgtcactagggcagggacaggataagagggattagggagagaagatagcagggcatggctgggaacccaagtccaagcataccaacacgagcaggctactgtcagctcccctcggagaagagctgttcacagccagactggcacagttttctgagaaagactattcaaacagtctcaggaaatcaaatatgcaaagcactgacttctaagtaaaaccacagcagttgaaaagactccaaagaaatgtaagggaaactgccagcaacgcaggcccccaggtgccagttatggctataggtgctacaaaaacacagcaagggtgatgggaaagcattgtaaatgtgcttttaaaaaaaaatactgatgttcctagtgaaagaggcagcttgaaactgagatgtgaacacatcagcttgccctgttaaaagatgaaaatatttgtatcacaaatcttaacttgaaggagtccttgcatcaatttttcttatttcatttctttgagtgtcttaattaaaagaatattttaacttccttggactcattttaaaaaatggaacataaaatacaatgttatgtattattattcccattctacatactatggaatttctcccagtcatttaataaatgtgccttcattttttcagaaaaaaaaaaaaaaa

SEQ ID NO: 269 - DNA, 3606 bp, HOMO SAPIENS
attggctgagcccggctgtcagtcctttcgcgcctcggcggcgcggcatagcccggctcggcctgtaaagcagtctcaagcctgccgcagggagaagatggcggtcgccgtgagaactttgcaggaacagctggaaaaggccaaagagagtcttaagaacgtggatgagaacattcgcaagctcaccgggcgggatccgaatgacgtgaggcccatccaagccagattgctggccctttctggtcctggtggaggtagaggacgtggtagtttattactgaggcgtggattctcagatagtggaggaggacccccagccaaacagagagaccttgaaggggcagtcagtaggctgggcggggagcgtcggaccagaagagaatcacgccaggaaagcgacccggaggatgatgatgttaaaaagccagcattgcagtcttcagttgtagctacctccaaagagcgcacacgtagagaccttatccaggatcaaaatatggatgaaaagggaaagcaaaggaaccggcgaatatttggcttgttgatgggtacccttcaaaaatttaaacaagaatccactgttgctactgaaaggcaaaagcggcgccaggaaattgaacaaaaacttgaagttcaggcagaagaagagagaaagcaggttgaaaatgaaaggagagaactgtttgaagagaggcgtgctaaacagacagaactgcggcttttggaacagaaagttgagcttgcgcagctgcaagaagaatggaatgaacataatgccaaaataattaaatatataagaactaagacaaagccccatttgttttatattcctggaagaatgtgtccagctacccaaaaactaatagaagagtcacagagaaaaatgaacgctttatttgaaggtagacgcatcgaatttgcagaacaaataaataaaatggaggctaggcctagaagacaatcaatgaaggaaaaagagcatcaggtggtgcgtaatgaagaacagaaggcggaacaagaagagggtaaggtggctcagcgagaggaagagttggaggagacaggtaatcagcacaatgatgtagaaatagaggaagcaggagaggaagaggaaaaggaaatagcgattgttcatagtgatgcagagaaagaacaggaggaggaagaacaaaaacaggaaatggaggttaagatggaggaggaaactgaggtaagggaaagtgagaagcagcaggatagtcagcctgaagaagttatggatgtgctagagatggttgagaatgtcaaacatgtaattgctgaccaggaggtaatggaaactaatcgagttgaaagtgtagaaccttcagaaaatgaagctagcaaagaattggaaccagaaatggaatttgaaattgagccagataaagaatgtaaatccctttctcctgggaaagagaatgtcagtgctttagacatggaaaaggagtctgaggaaaaagaagaaaaagaatctgagccccaacctgagcctgtggctcaacctcagcctcagtctcagccccagcttcagcttcaatcccagtcccaaccagtactccagtcccagcctccctctcagcctgaggatttgtcattagctgttttacagccaacaccccaagttactcaggagcaagggcatttactacctgagaggaaggattttcctgtagagtctgtaaaactcactgaggtaccagtagagccagtcttgacagtacatccagagagcaagagcaaaaccaaaactaggagcagaagtagaggtcgagctagaaataaaacaagcaagagtagaagtcgaagcagtagcagtagcagttctagtagcagttcaaccagtagcagcagtggaagtagttccagcagtggaagtagtagcagtcgcagtagttccagtagcagctccagtacaagtggcagcagcagcagagatagtagcagtagcactagtagtagtagtgagagtagaagtcggagtaggggccggggacataatagagatagaaagcacagaaggagcgtggatcggaagagaagggatacttcaggactagaaagaagtcacaaatcttcaaaaggtggtagtagtagagatacaaaaggatcaaaggataagaattcccggtccgacagaaagaggtctatatcagagagtagtcgatcaggcaaaagatcttcaagaagtgaaagagaccgaaaatcagacaggaaagacaaaaggcgttaatggaagaagccaggctttcttagccattctttgcagcagaagatttcttgataaaaaaggattacctttccttgtaaagaggatgctgccttaagaattgcatgttgtaaaaaatctttttggaaaatacagactgtttgtttaccagacattcttgtactttttgcataattttgtaagagttatttatcaaaattatgtgaggttccaaaatatgtaaaaatgataataataaaaaaagattaacatcccttgtcatcttttttaaatatcctatactcttcagtaagaatctgtatattttaataggcaaatctttaagtctgttcccttctaattctgtatcatacattgcttttgtagaaataaatgtgtgtttatttcattatttttgggatgtcctcgttgacacttgtataataaatatcctctttatcattttcagcttttaacactagatactgcacgtgattagaatgtttttgaaggtttcctcgtttttatttgccttggacagtttttagttgtcagagtcagagctttgcagctttgagggggaacagttctctttaaaatcatttgctattttctattctcccttgttattttaatctaagcattttcccccgtttctcatattttaaccatatgttcggtagataactaaacagtatgatctggttggcattttcttcctgatgatgggagcgtcattcttttgtcttcatggttacttgtgtgatataacatacatctgttaaagaaaatcacttctttctaggggagggaggtagaaaagtatctttcaaacttggtttttgagtttgtgtcttgtcttaactttgtgttggctctaacttaaacatgctgatatgtgttttcaagaattttgtttaaggaagtattgtatggaagtccacaaaatgaaggaagttcatctaggttttaatatgtaagcaagataacacacaagtgtaccaagtgattattaactttgttgttttacaaatttgtatgaacttggagtatctgttggccattactatacatgtgcaaataaatgtggcttagacttgtgtgactgcttaagactagtacttgtattaactttctgatgctttatacaagagagcacttaaattgcatccttctttgagtttaacactgtagctttagccttgactttgaatattcattttgccttcccttgacaagtaaatggttacagtgaaaatgtgaagaagtatttccagttagtttttgtgtgtatataactcacttgtgtaagtggatgtgttaaaagatctctttttaaaaatccttttattggagtaattattaaaacagtaaatgca

SEQ ID NO: 270 - DNA, 7250 bp, HOMO SAPIENS
ccttggccgagaccggtcctctgcggagagggccccgccctctgtgaaggcccgcccgggaattggcggcggcgctgcagccatttccggtttcggggaggtgggtggggtgcggagcgggacttggagcagccgccgccgctgccaccgcctacagagcctgccttgcgcctggtgctgccaggaagatgcggccggagcccggaggctgctgctgccgccgcacggtgcgggcgaatggctgcgtggcgaacggggaagtacggaacgggtacgtgaggagcagcgctgcagccgcagccgcagccgccgccggccagatccatcatgttacacaaaatggaggactatataaaagaccgtttaatgaagcttttgaagaaacaccaatgctggttgctgtgctcacgtatgtggggtatggcgtactcaccctctttggatatcttcgagatttcttgaggtattggagaattgaaaagtgtcaccatgcaacagaaagagaagaacaaaaggactttgtgtcattgtatcaagattttgaaaacttttatacaaggaatctgtacatgaggataagagacaactggaatcggccaatctgtagtgtgcctggagccagggtggacatcatggagagacagtctcatgattataactggtccttcaagtatacagggaatataataaagggtgttataaacatgggttcctacaactatcttggatttgcacggaatactggatcatgtcaagaagcagccgccaaagtccttgaggagtatggagctggagtgtgcagtactcggcaggaaattggaaacctggacaagcatgaagaactagaggagcttgtagcaaggttcttaggagtagaagctgctatggcgtatggcatgggatttgcaacgaattcaatgaacattcctgctcttgttggcaaaggttgcctgattctgagtgatgaactgaatcatgcatcactggttctgggagccagactgtcaggagcaaccattagaatcttcaaacacaacaatatgcaaagcctagagaagctattgaaagatgccattgtttatggtcagcctcggacacgaaggccctggaagaaaattctcatccttgtggaaggaatatatagcatggagggatctattgttcgtcttcctgaagtgattgccctcaagaagaaatacaaggcatacttgtatctggatgaggctcacagcattggcgccctgggccccacaggccggggtgtggtggagtactttggcctggatcccgaggatgtggatgttatgatgggaacgttcacaaagagttttggtgcttctggaggatatattggaggcaagaaggagctgatagactacctgcgaacacattctcatagtgcagtgtatgccacgtcattgtcacctcctgtagtggagcagatcatcacctccatgaagtgcatcatggggcaggatggcaccagccttggtaaagagtgtgtacaacagttagctgaaaacaccaggtatttcaggagacgcctgaaagagatgggcttcatcatctatggaaatgaagactctccagtagtgcctttgatgctctacatgcctgccaaaattggcgcctttggacgggagatgctgaagcggaacatcggtgtcgttgtggttggatttcctgccaccccaattattgagtccagagccaggttttgcctgtcagcagctcataccaaagaaatacttgatactgctttaaaggagatagatgaagttggggacctattgcagctgaagtattcccgtcatcggttggtacctctactggacaggccctttgacgagacgacgtatgaagaaacagaagactgagcctttttggtgctccctcagaggaactctccctcacccaggacagcctgtggcctttgtgagccagttccaggaaccacacttctgtggccatctcacgtgaaagacattgcctcagctactgaaggtggccacctccactctaaatgacattttgtaaatagtaaaaaactgcttctaatccttcctttgctaaatctcacctttaaaaacgaaggtgactcactttgctttttcagtccattaaaaaaacattttattttgcaaccattctacttgtgaaatcacgctgaccctagcctgtctctggctaaccacacaggccattcccctctcccagcaccttgcagacttgggcccatcaagagctactgctggccctggctccgcagcctggatacttacctggccctcctccctagggagcaagtgccttccacttacttcccatccaggtctcagaggtctcaaggccaaccttggaatccttatttaaccattcaagtaatcaacggaagttttcaccctttaatcttaagtttagccttttaagaaaaacagtaagcgatgactgctgaaaggctcattgtgtaatctcccaagggtttggtcttattccattttcttctggtcaccagatgatttcttcctttaccatcaaatacttcttcataatggtcacagtctgaggatgtgcgcaaattctggttcttcccaagctctaaccgtaacacgtcccaccccctttttaaagcacttactgttttcagagcacccatatcccaccctggtgagaaggccactctcacatctgagtgttgggtacaaagctgctccgtagagtgatgtgcactcctggtgggtgaggggcaggggcagtggcagtgtgcaaagaattgattactccttgcagagcctgtggcttgcatttcctactgctttctacgtttgaaaattatgacagtctctggctaggtctgggtccagattaggatttaaactgataaaggaaactgttggtaaatcctctgctcagaaagcatttatcatgttcctatttaaggattaggtttattaatttaggcctcttagaagctaacccacttaaatattactcttctgaatgctagttctcttttattcttgatgtcctaagtcaattgaatctggcatctggggctagggtctgcctgtctacatattttttatttttttctgagaaattctgaacacatagatctctttcctaaactgacattttctattttgactgttttcatactataaccaggtaaagggacttctttcagagagctttatactgcctgaccaaagaacaaatctgaaaatcaccattttaaagttattttttcagttgaaccaaagtttaagtgaagaggacttttggcatattatacccaggatcagtttgtctttttgtatccatcaagtattacaggagaaggattgggaacagaatggaaaaacagtgtatgaaagtcatgttacaggccgagtgcggtggctcacacctgtaatcctagcactttgggaggctgaggcaggtggctcacttgaggtcaggaattcaagaccagcctggccaacatggtgaaaccccgtctctactaaaaagacaaaaaattagctgggcgtggtggcgggcacctataatcccacctacttggtaggctgaggcaggagaatcgcttgaacccaggaggcggaggttgcagtgagacgagattgtgccactgcactctagcctgggtgacagagcaaaactgtgtctcaaaaaaaaaagtcatgttacacatttaagtttttgaaattgctccttttatcggtaaagattctcaatccaaattctcctgggtgtgttgtcatcagctgtgatatgtttgtgcacattacgtatagcagaggatgtaagcaatattattgtttgtgaagttttgtttttaatgtcttgagtatgagttatgtttagtcactgtcagcatctgagaactttaataagcccttgagatattccaaagttttattttacttttttaaagaacagaaaaagatgaatgaaagaaccaaggagagatgcagagactatatttagcatgtataggttaaagtaagaaggaggttgtggtaactaaataggagtcctataaaatcaaatacattgtcaaccttttctgcacatctagtttcctaccatagaatcccactggaataccacatagcttttgcactgcagttactatttactaatgtaaacgtagggtttgtaaaagtcacaaacttataagcaatgaacttacctgctagtctttttattttggcttgcatgaagtcactgcaaattcaaatgtcagtaccggcatttaaaatatatctatatcactttgttggtacaaagttatttcaagataagtgtaattttgttacaagtttattttgaagagacaaatctcctgtgatctatgcaggacctctgtactttctaaagaacaaaatgttatgtagacattatacatggttggttgtctcttcttgaaactgtaatgtaaatctagggtccagtcatatcctaggtatcatcatttatccaagtacttggaggaatacaagtatatataaatacagtcattgagaataagtcgatttgaggcatacaagagtagtttcttacacagtttaacacggcctgattcaagactctgataggattcaaacagataccggttaaccatgactaccaaaactgatcatctgagtcgattgatagaggtgtgactagtccttagcactttttctcattcctctttttattcagcattgctgttacctatttcaggtttataagacctctttcagcagatcacatcagaagccaggaaatgcatagctaggagatgtcaaaagcccatatgaggagtggaccaagcagcagtggcggtttctcctcgcatctttttttttttaagctttaacttagcaggggcatggactttatagcactttttcaactttttgctttgctttggataagaaatccttacctttaaaaaaagcttctagtctccataacccccaaagtactgcttatttgtttgaagaatccagccatcgtagtgctttagtcactatcgtaaacattcatgatagggcaaggattttaaaacaggattcttgcttctgtagtcatcaaggtgaacagaagcatcctacacaaccactaagggctctatgtttgtgtcatgcctcttcaaacaccaaggagttgaacatgcttccagtgatttgtctccgtaatgccttcttcctttatttggcctttctttctttctgtaccttcaagttcttgatttttaaaattccaactctagagaaaaccaatatatggtggtgctgggctttgaagatagcatatcagacgccttggttctgtttgtacacttagccttacatttcaggaggaggcttttcattaggggcttaagctagctcctttggcttttaaaaaaaattttttttcaaatttcttcattacctaagggagcctgcatctaaatttctcaactagttcagcctagctgaattttctagtgtgtaatacactttgcttccttcttattggtgaaaaccagggggatgagtggcttccatggagagatttcctgatttctcagggaggaaaaaagtgatgacatttaccactacttttatgtttttcccctttttccaaattgataaggatttctggttcctagtgatccgggattgggcaacagtgcagaactgccagtcatgccgtaggccgtgaagaaagaatgtgagtaactgttgttttgcaaggatttgtagggttatgggcagttgttgtttgaagcattgctatgacctaattcccaaggtatctttcctctcttggtgttctaggtaagccaatgagctttaatctctacttgctataaccgtgtgcttagaaaaagaggtgagagtagtggttttccttcaaactgtccacattcatgaagattatgaattgttaggacagccagggcaagatagaccctgtctctacaaaaatttttttctaaattaaccgggcatggtggtgcctgcctgtagtcccacctgtgtgggagaatcacttgagcctgggaggtcaaggctgcagtgagccatgattgcacccctgcactccagcctgggtgacagagtgagaccctggctcaataagagggggaaaaaaaattgttaggagctgggtgcggatgcagcctgcaatcccagctacttgagaggctgaggccggaggattgcttaaacccaagaatttgagcgtagcctgggcaacacagcaagaccccatctaagaaaaaaatgttttttaaatcagcttagcccaaaggggttgtgaatggggaggtataaaaagcaaagattattttttggctactaagccaagaacttacagggattttttttttcagtcccagaacctacagataccctgctacttgcttcacgtggatgctcagtgcccagcagccatcttaatacattaaaccagtttaaaaaataccttccatgtggagaaaaacatgtctttttctcgcctcaactttatccacatgaaatgtgtgcccatggctgggcgcagtggctcacctgtaatcccaacactttgggaggctgaagcaggcagattgcttgaggccaggagttcgagaacagtctggccaacatggcgaaacctcatctctactaaaattacaaaaattagccgggcatggtggcacatgcctgtaatcccagctacgtcaggaggctgaggcacaggaattgcttgaacccaagaggcagaggatgcaatgagccaagatcacaccactgcactccagccttggcgacagagggagactctgtctcaaaaaaaaaaaaaaaaggtgtgcccaggcccctagccattgccatgtgcccagccagagagccaaattagagggctggcttccctatcacacagaataaatgctagtgctagccaatgatccctttgcttttaatgtatagaaaatactgttgttccttttgtcatttccagtgacatctgttttctaagcagctcttttctagggaggaaaccaaaggggctaggttaagaccctaatagaaatgttttttctaatctctggtgagtctggaagtgtcacattcacagtccacccttgggagtggcttggtggagctggggacaaggttttgtttactacatagtgcacatgataaatggccttaaactgtgattctttctggtaggataagttataataaactgaccctaaagaatgcaaaaaaaaaaaaaaaaaa

SEQ ID NO: 271 - DNA, 527 bp, HOMO SAPIENS
  misc_feature (137)..(137): n is a, c, g, or t
  misc_feature (147)..(147): n is a, c, g, or t
aaactgcaaggatgtctgtcaaatatcacaattaaacatgccaaaggagaagccatgttgtcaaaatgcccacttaacccacccaaacatctcaaacccaccctttgctgaccttctataaccccatttttttaagntttttttttntttttttaaacaagagaaagtagacagatacatgttggtaaatgctaactgtccatattcacatagagacacagtgtactctctgagcccaatatacagagaaaggaggaaaaaagctagaattctatgcactactacacaggggcctagcaccctccagcttccagcagagcgaagggagcaggtttttcttttttcccacagagctcggtggtgttgattccatacagtttttgttcagacaggaagggataaaaatgaacttcgaacagaaaggggtagagactcttttcccattgtattctgctcaaggtatttccccccaaataaattgagaaccatggagtagagaaaagagacctcaagaacagggcgactga

SEQ ID NO: 272 - DNA, 9917 bp, HOMO SAPIENS
gtgctgaagtagaggtagtacagcatggctagactgttgtgagaggctcagagaaagcagagggtgagatggatgagtccagcattctaagacgaagagggctccagaaggagctgagtctccccagaagaggaagtttgatagattcccagaagtggaattgcttggtcaaacgttgccgaacaagcaaccggaaaagcttaataggcaatgggcagtcaccagcattgcctcgaccacactcacctctctctgctcatgcaggaaatagccctcaagatagtccaagaaatttctcccccagtgcctcagcccatttttcatttgcacggaggactgatggacgccgctggtcgttggcttctctcccttcctctggctatgggacaaacacacccagctctacggtctcttcatcctgttcctcccaggagaagttgcatcagttaccataccaaccaacaccagacgagttacacttcttatcaaaacatttctgtaccaccgaaagcatcgccactgagaacagatgcaggaacacgccgatgcgcccccgttcccgaagtctgagccctggacgttctcccgcctgctgtgaccatgaaataattatgatgaaccatgtctacaaagaaaggttcccaaaggctacagctcagatggaagaacgtctaaaggaaattatcaccagctactctcctgacaacgttctacccttagcagatggagtgcttagtttcactcaccaccagattattgaactggctcgagattgcttggataaatcccaccagggcctcatcacctcacgatacttccttgaattacagcacaaattagataagttgctacaggaggctcatgatcgttcagaaagtggagaattggcatttattaaacaactagttcgaaagatcctaattgttattgcccgccctgctcggttattagagtgcctggaatttgatccggaagaattttactacctattggaagcagcagaaggccatgccaaagaaggacagggtattaaaaccgacattcccaggtacatcattagccaactgggactcaataaggatcccttggaagaaatggctcatttgggaaactacgatagtgggacagcagaaacaccagaaacagatgaatcagtgagtagctctaatgcctccctgaaacttcgaaggaaacctcgggaaagtgattttgaaacgattaaattgattagcaatggagcctatggggcagtctactttgttcggcataaagaatcccggcagaggtttgccatgaagaagattaataaacagaacctcatccttcgaaaccagatccagcaggcctttgtggagcgggatatcctgacttttgcagaaaacccctttgttgtcagcatgtattgctcctttgaaacaaggcgccacttgtgcatggtcatggaatatgtggaagggggagactgtgctactttaatgaaaaacatgggtcctctccctgttgatatggccagaatgtactttgctgagacggtcttggccttggaatatttacataattatggaattgtacacagggatttgaaaccagacaacttgttggttacctccatggggcacataaagctgacagattttggattatctaaggtgggactaatgagcatgactaccaacctttacgagggtcatattgagaaggatgctagagagttcctggataaacaggtctgtggcacacctgaatacattgcaccagaagtgattctgaggcagggttatggaaagccggtggactggtgggccatggggattatcctctatgaatttctggttggatgcgtgccattctttggggatactccagaggagctatttggacaagtcatcagtgatgagatcaactggcctgagaaggatgaggcacccccacctgatgcccaggatctgattaccttactcctcaggcagaatcccctggagaggctgggaacaggtggtgcatatgaagtcaaacagcatcgattcttccgttctttagactggaacagtttgctgagacagaaggcagaatttattccccaactggaatctgaggatgacacaagttattttgatactcggtctgagaagtatcatcatatggaaacggaggaagaagatgacacaaatgatgaagactttaatgtggaaataaggcagttttcttcatgttcacacaggttttcaaaagttttcagcagtatagatcgaatcactcagaattcagcagaagagaaggaagactctgtggacaaaaccaaaagcaccaccttgccatccacagaaacactgagctggagttcagaatattctgaaatgcaacagctatcaacatccaactcttcagatactgaaagcaacagacataaactcagttctggcctacttcccaaactggctatttcaacagagggagagcaagatgaagctgcctcctgccctggagacccccatgaggagccaggaaagccagcccttcctcctgaagagtgtgcccaggaggagcctgaggtcaccaccccagccagcaccatcagcagctccaccctgtcagttggcagtttttcagagcacttggatcagataaatggacgaagcgagtgtgtggacagtacagataattcctcaaagccatccagtgaacccgcttctcacatggctcggcagcgattagaaagcacagaaaaaaagaaaatctcggggaaagtcacaaagtccctctctgccagtgctctttccctcatgatcccaggagatatgtttgctgtttcccctctgggaagtccaatgtctccccattccctgtcctcggacccttcttcttcacgagattcctctcccagccgagattcctcagcagcttctgccagtccacatcagccgattgtgatccacagttcggggaagaactacggctttaccatccgagccatccgggtgtatgtgggagacagtgacatctatacagtgcaccatatcgtctggaatgtagaagaaggaagtccggcatgccaggcaggactgaaggctggagatcttatcactcacatcaatggagaaccagtgcatggacttgtccacacagaagttatagaactcctactgaagagtgggaataaggtgtcaatcactactaccccatttgaaaacacatcaatcaaaactggaccagccaggagaaacagctataagagccggatggtgaggcggagcaagaaatccaagaagaaagaaagtctcgaaaggaggagatctcttttcaaaaagctagccaagcagccttctcctttactccacaccagccgaagtttctcctgcttgaacagatccctgtcatcgggtgagagcctcccaggttcccccactcatagcttgtctccccggtctccaacaccaagctaccgctccacccctgacttcccatctggtactaattcctcccagagcagctcccctagttctagtgcccccaattccccagcagggtccgggcacatccggcccagcactctccacggtcttgcacccaaactcggcgggcagcggtaccggtccggaaggcgaaagtccgccggcaacatcccactgtccccgctggcccggacgccctctccaaccccgcaacccacctccccgcagcggtcaccatcccctcttctgggacactcactgggcaattccaagatcgcgcaagcctttcccagcaagatgcactccccgcccaccatcgtcagacacatcgtgaggcccaagagtgcggagccccccaggtccccgctgctcaagcgcgtgcagtccgaggagaagctgtcgccctcttacggcagtgacaagaagcacctgtgctcccgcaagcacagcctggaggtgacccaagaggaggtgcagcgggagcagtcccagcgggaggcgccgctgcagagcctggatgagaacgtgtgcgacgtgccgccgctcagccgcgcccggccagtggagcaaggctgcctgaaacgcccagtctcccggaaggtgggccgccaggagtctgtggacgacctggaccgcgacaagctgaaggccaaggtggtggtgaagaaagcagacggcttcccagagaaacaggaatcccaccagaaatcccatggacccgggagtgatttggaaaactttgctctgtttaagctggaagagagagagaagaaagtctatccgaaggctgtggaaaggtcaagtacttttgaaaacaaagcgtctatgcaggaggcgccaccgctgggcagcctgctgaaggatgctcttcacaagcaggccagcgtgcgcgccagcgagggtgcgatgtcggatggccgggtgcctgcggagcaccgccagggtggcggggacttcagacgggcccccgctcctggcaccctccaggatggtctctgccactccctcgacaggggcatctctgggaagggggaaggcacggagaagtcctcccaggccaaggagcttctccgatgtgaaaagttagacagcaagctggccaacatcgattacctccgaaagaaaatgtcacttgaggacaaagaggacaacctctgccctgtgctgaagcccaagatgacagctggctcccacgaatgcctgccagggaacccagtccgacccacgggtgggcagcaggagcccccgccggcttctgagagccgagcttttgtcagcagcacccatgcagctcagatgagtgccgtctcttttgttcccctcaaggccttaacaggccgggtggacagtggaacggagaagcctggcttggttgctcctgagtcccctgttaggaagagcccctccgagtataagctggaaggtaggtctgtctcatgcctgaagccgatcgagggcactctggacattgctctcctgtccggacctcaggcctccaagacagaactgccttccccagagtctgcacagagccccagcccaagtggtgacgtgagggcctctgtgccaccagttctccccagcagcagtgggaaaaagaacgataccaccagtgcaagagagctttctccttccagcttaaagatgaataaatcctacctgctggagccttggttcctgccccccagccgaggtctccagaattcaccagcagtttccctgcctgacccagagttcaagagggacaggaaaggtccccatcctactgccaggagccctggaacagtcatggaaagcaatccccaacagagagagggcagctcccctaaacaccaagaccacaccactgaccccaagcttctgacctgcctggggcagaacctccacagccctgacctggccaggccacgctgcccgctcccacctgaagcttccccctcaagggagaagccaggcctgagggaatcgtctgaaagaggccctcccacagccagaagcgagcgctctgctgcgagggctgacacatgcagagagccctccatggaactgtgctttccagaaactgcgaaaaccagtgacaactccaaaaatctcctctctgtgggaaggacccacccagatttctatacacagacccaggccatggagaaagcatgggcgccgggtgggaaaacgaaccacaaagatggcccaggtgaggcgaggcccccgcccagagacaactcctctctgcactcagctggaattccctgtgagaaggagctgggcaaggtgaggcgtggcgtggaacccaagcccgaagcgcttcttgccaggcggtctctgcagccacctggaattgagagtgagaagagtgaaaagctctccagtttcccatctttgcagaaagatggtgccaaggaacctgaaaggaaggagcagcctctacaaaggcatcccagcagcatccctccgccccctctgacggccaaagacctgtccagcccggctgccaggcagcattgcagttccccaagccacgcttctggcagagagccgggggccaagcccagcactgcagagcccagctcgagcccccaggaccctcccaagcctgttgctgcgcacagtgaaagcagcagccacaagccccggcctggccctgacccgggccctccaaagactaagcaccccgaccggtccctctcctctcagaaaccaagtgtcggggccacaaagggcaaagagcctgccactcagtccctcggtggctctagcagagaggggaagggccacagtaagagtgggccggatgtgtttcctgctaccccaggctcccagaacaaagccagcgatgggattggccagggagaaggtgggccctctgtcccactgcacactgacagggctcctctagacgccaagccacaacccaccagtggtgggcggcccctggaggtgctggagaagcctgtgcatttgccaaggccgggacacccagggcctagtgagccagcggaccagaaactgtccgctgttggtgaaaagcaaaccctgtctccaaagcaccccaaaccatccactgtgaaagattgccccaccctgtgcaaacagacagacaacagacagacagacaaaagcccgagtcagccggccgccaacaccgacagaagggcggaagggaagaaatgcactgaagcactttatgctccagcagagggcgacaagctcgaggccggcctttcctttgtgcatagcgagaaccggttgaaaggcgcggagcggccagccgcgggggtggggaagggcttccctgaggccagagggaaagggcccggtccccagaagccaccgacggaggcagacaagcccaatggcatgaaacggtccccctcagccactgggcagagttctttccgatccacggccctcccggaaaagtctctgagctgctcctccagcttccctgaaaccagggccggagttagagaggcctctgcagccagcagcgacacctcttctgccaaggccgccgggggcatgctggagcttccagcccccagcaacagggaccataggaaggctcagcctgccggggagggccgaacccacatgacaaagagtgactccctgccctccttccgggtctccaccctgcctctggagtcacaccaccccgacccaaacaccatgggcggggccagccaccgggacagggctctctcggtgactgccaccgtaggggaaaccaaagggaaggaccctgccccagcccagcctcccccagctaggaaacagaacgtgggcagagacgtgaccaagccatccccagccccaaacactgaccgccccatctctctttctaatgagaaggactttgtggtacggcagaggcgggggaaagagagtttgcgtagcagccctcacaaaaaggccttgtaacggggagggcccaggggcaggactgtggagacccgtcctgaacgggcgactgtgtcttgactacctttcaaaaccagcactgtgtgggaatgtccgccaggcagagctcggagcctcattgagacaggggagagagaaagacaaagaggggaccttcttccagatgccttcccagttgtaaccggtaaaactgttaccagatagtgtttgtacaaaaaaaaaaaaaaaaaaaaaaaaaaaaattacctttacagttgagggttgttgaggaaaatgattttctttgtaaatatatagcatcgtgtttggtttgggatgtagagtctatacctggctgctgattgcgtcgtttactacagctttttttaaataagatttttgctttaccatttatcataatgtagtaatgaagcaaaatggtcaaaactgggtgtgtgtgaacagagatacacccatattcgtgtatatacacatccacctacatgttttggtctgtggtttaagagactatttcaaggttccatttttataagctaaaacattctaagttaagatggaagaaagccctaaacacagtagattctgagtttttatgtgtattttaaccagagtttctgatagtactgtatctggctacctatatttccagatctaaagcaagaactactctaagtactgcatttggaatcctcctccattaggaatggccaggacaagtggagctagccattttcattacacggccatcccaatggacactggatccctggtccaactgtctaaaaggccagttgttcctttctgtggatgtggatgtctggccttcacctgaggtagagcggggactataaacacacatcaactttctttctgtttgctttcttttccttcttttcaaactcttaaactcaggcctttatgctgtgagtgactagtccaagaagcacacattttgtagtagtcctgcaccagccctgctcttgaataaaaaggaaaattactggctgcacccaaatcttctagtacttgagtaataagcatcaggcattggaagaggttttaaatttgcttttttgaggaaaagaactgggggtggattttggcatcgtagcatatcgattaaagaataatcaggacatcagatacattttaatacatagctggggccttatgttgtagatgaagcttgctgtttttagcaagttcctgggtttcacattcatttctgctgcatctagtagctccacacatttcataacctgatctctttatttgtatgcaaaaaatactgtcttaatacagagcagcatttttgtaacaaagagactcgctggagctatttggtgcttgaatgtgaccatcctttttacttttgctaagccttatttaaattttgtataccgtggaatatgtagaatttgtcaaatcattttagtgctgaaggtttttgatttcttgtttttgtttctgttgttgcagtttctttggtggcttgttttgtattgtaagatggcacttgctgatataaatactaaggcactaagagaaaatacagataagtatttataagttgcttgggaaccatagcagaattttttgtttggttttgtaagagaaaaaaaattaccaataaataactgatctagcacccaaactctcttgggggatgtcttagtatcttcacgctataaaattgttcatctaagcacagcatcatcttatggccttatggattgtaaatcttctagtgaggctataaactccactctgaaaacaaaggcataacttaaccgactgctcagttgtccttcgttgtaaaatgaattggctttgggaaaaaggaaaaaaacaaacaaaaaaagaaaaagaaaaaagcctcctccttgcccctaatttttttttcccatatggttttagccattccccatcactatattgtgaagctgtaaaaatatatatatatactttacaagagtttactaatggatttcaaaactggtctcaacgtttataatacatatctgtgtttggcagttgtcataacccaatcctacattcagccatcgggacaagtctgtcggggaggtagttcatggtttacaagcctttgctttttaactgtccaatttcctttaaagcacaactagctatttgtttacaaatgatatttttatgtatattttgtatagtgtatcatcatttttgccaaatatgtttttcattataaatgagtaaagagtacttaaggttgcattcatgtattacatgtttgttgttgtaaacctctccaatcagctggtagaaattctcctcattgtgttctatttggtcagtctctgtgtgattgtaggatgtgctccttggtagtactcccagctgtagatttaccagcttaaaagtttgttaggatctgtgcaataaagtgtttgcagtcttattttctctaagaaattccttatggacgtcataattgttgtatattgaacaaaatatttatacttatgcagttgcataacattgaaataaaaatttagcatgaaaaga

SEQ ID NO: 273 - DNA, 3875 bp, HOMO SAPIENS
agtgtgtggaagctgtcgtggaggtgaccgtggggggatgagaaaaggggaaggaaggaacagacagcaccagagggacttgaacaaagggagaagggggattaaagtcaaatcactgtcagcagcccaggagcagacaaaaccaccagagtaagccctgaaatggaaatgagagggaaaagaagcaagccgctaacagctaccaagaagaggaggaagtgggagatgcgctgcttcctgtagaaagaacgttgattgaagacaaagctgggtggggactagtccctgggctgcagccgctgctacacatactcacaacgctgccgccgcgctccgtgggcaactcctactactgctgggctgggctgggctgggctgggctgcgccggagctcgcctgcacagatcagctccggagaggggaaaaccacgctcctcggaccaagcctcgggagctaagccagatctgccagtgagcctcaggctttaggaactgaagagtgtttctgaaagatctatccagcactccgatggccagcaacaacaccgccagcatagcacaagccaggaagctggtagagcagcttaagatggaagccaatatcgacaggataaaggtgtccaaggcagctgcagatttgatggcctactgtgaagcacatgccaaggaagaccccctcctgacccctgttccggcttcagaaaacccgtttagggagaagaagtttttctgtgccatcctttaagtctttgagaggggcctgaagagcctccgggctcctgggacattgatgtagagtttttagtgaagtgggcacctttctagtccacggcatttgaagagagcgaggagaaccattctggaaactctaggctatgcatgtttaaagatctggtcccctttatgagaatgcaagccgatccacatcctgacttaagagatctgattctgacgaactgcctggaggaggggaatatataaaaataaaattggtgtcacttcttttctgctatcccccagccccccccccaaaatcctcatgtttctgcttcatattttgaaaaataacaattaaaacagacagctgtactgaggtaagatatgtgtgaccttcttggaatgaatattgtctttagaataccctttgataagctgagctgtcccgtgtagatgcaattcggtttaatggcattgatgtatagtcactgtgcctttctttttctttcttccttctcctctacccctccttccacccctccccattagagtagtgtggagataaggctggactggtctatcagattgaactccaagaatgatcacacaaaatgtttagggagatgttccccgtggtgtatcctcatggtaacaacgacaaaaaatgccggttgtctgtgttctcttttcactattcctaacatgtgtacatgatagctttgattctgcaagtaaaagtaaatcctgtgttgtgactggtgctttcatatatttgtgacaatttttgagtaatattgcatgaaaatgtccctatgttacatccattcagaagttttgttgttttactctaaagctgggaaaggaaatgagagggaaaagaccccggagagggaagaaaatctcagtattttgaaaattgagattacttcagagccttagccacacctaaaatacctcctagttaatagtggtataaatgcctcttcaatacgttttccagaatccaaagcattttggtttatccaggacccagggcagcacagctgtcaccaagcaggagagttaaggattcaccatgagctgggaaatgcttttgccatgagtatgagcaaattccctctttccctgaatcatggacattctagattaaaagaacatttttttgtgctcttaacaagaaaaccatggccctcctttgttcaagtatcagaagaaataaacccacagctccagagaaggtgaccattctcagaactccagctattcactctccagggagaaggacctcaaatcgccactctttgggcggcaggtgcggtccccacggccggctctacgaggaagagttctggctcttttgtccactgagatggtcttggtttttcacttaacaaattttttaatggaatctttgtttttgttctccatcttgtttgttagagtctctcggcctttatttacaaattccttgcaactagagcgctccttccccaagatatggtagtgagagtaatttttcattgtagctgtagtctccatcagtaacagcaggccctggaagacttgatcacctttttctgtgtcattttcagtcaaagagggcctctcttacatcttgtttgctttcaaatccccaaatatcatctccatctcccaattaattttattgtctctttcctctctattcgctttctcctgttttttttttaaaaaaaaagcatgaaaaaggaagagaaaaagtttgatatgccaaggacagattttgaaacagacttggtaaatgttttccttagctccttcatgggcatgctggtgaaagaataaatacatccaattaaagctcatgctggggtcggggagaagaggatactgaaacatttgtgaaatgtatgaatgcacttctgtaaccagatacttctgttcttctgttcaaattgtggggtttttgttacagttaggacgcccatgaagatttaggggtgaaaaaaacagcagagtatttattaaactacagcattgtacaattagcttagtaacactatggaataagctaaaacatatcacagtttttacatgggccaaaacatgaattgagtatgtggtcacatgaaaacacggatgaatgaataaaacactctttggtggtgactgaggcatcattagaaggcccagacgatttccactattcacagcatttccttttctcagaaggactctttatatttccatgtaaatctagatctttggagcaattaagatggaattacaatttctagggagcattttaaggaaaatgttttggctttttcataattttatgtcttacagtatggaattataatacgaaaatctttatatgagttttggcttcttggtatttgtacttattcaggggaaaaagtctttcgattacttatgcctctatagagcttaatttcttgagaaattcaacagtcattttcaccagcataattttatcttaaggaataactaataggaaaagtcagcttaattatttaaggccctagtttctacatataatatattcgatagaaatgaaaatctgccgtggaattaactaataagtagtaacaataaacttcatatttagaatgcaaagtctataaagaataattttacatgatcctcaatatcaactccagtttaaaaagtgttatttttaaaacatttgaaaccaagtactgtttaatttcaatcagaagatgcaaatacatactttgatctatgtttgattttgctaataatatttgaaggagattgcctaccaaggacaaaacaataaatttaaaaatcaaacgatttctccatacgctcatagtcacatatggaattttgagaaaataaagcatgctgtctttaggaatttttatacttctttgtctttcttccttaatatttgcttctagctgctcttggcaatgatgaattgttatgtatgcattaatgttttgcagcccaaaagttgttcacatttttcctatataagatctgtggagtgtgtgtttcaaagagagaactacagaaatgttaaagcaggaaaacctgaatgtgatgtgcacattttcatcccacatggacaatgtatgtgttttaataaatggaattttcagattcatttcaaaaaaaaaaaaaaaaaa

SEQ ID NO: 274 - DNA, 2262 bp, HOMO SAPIENS
tgagccggccgcacgcggaggatcctaaggagcagctctgttgcgacataggccgagcagcgaggcccagctccctgaaacaacagtaacctacccctgtgggtcatcatcatgccctccgacctggccaagaagaaggcagccaaaaagaaggaggctgccaaagctcgacagcggcccagaaaaggacatgaagaaaatggagatgttgtcacagaaccacaggtggcagagaagaatgaggccaatggcagagagaccacagaagtagatttgctgaccaaggagctagaggactttgagatgaagaaagctgctgctcgagctgtcactggcgtcctggcctctcaccccaacagtactgatgttcacatcatcaacctctcacttacctttcatggtcaagagctgctcagtgacaccaaactggaattaaactcaggccgtcgttatggcctcattggtttaaatggaattggaaagtccatgctgctctctgctattgggaagcgtgaagtgcccatccctgagcacatcgacatctaccatctgactcgagagatgccccctagtgacaagacacccttgcattgtgtgatggaagtcgacacagagcgggccatgctggagaaagaggcagagcggctggctcatgaggatgcggagtgtgagaagctcatggagctctacgagcgcctggaggagctggatgccgacaaggcagagatgagggcctcgcggatcttgcatggactgggtttcacacctgccatgcagcgcaagaagctaaaagacttcagtgggggctggaggatgagggttgcccttgccagagccctctttattcggcccttcatgctgctcctggatgagcctaccaaccacctggacctagatgcttgcgtgtggttggaagaagaactaaaaacttttaagcgcatcttggtcctcgtctcccattcccaggattttctgaatggtgtctgtaccaatatcattcacatgcacaacaagaaactgaagtattatacgggtaattatgatcagtacgtgaagacgcggctagagctggaggagaaccagatgaagaggtttcactgggagcaagatcagattgcacacatgaagaactacattgcgaggtttggtcatggcagtgccaagctggcccggcaggcccagagcaaggagaagacgctacagaaaatgatggcatcaggactgacagagagggtcgtgagcgataagacactgtcattttatttcccaccatgtggcaagatccctccacctgtcattatggtgcaaaatgtgagcttcaagtatacaaaagatgggccttgcatctacaataatctagaatttggaattgaccttgacacacgagtggctctggtagggcccaatggagcagggaagtcaactcttctgaagctgctaactggagagctactacccacagatggcatgatccgaaaacactctcatgtcaagatagggcgttaccatcagcatttacaagagcagctggacttagatctctcacctttggagtacatgatgaagtgctacccagagatcaaggagaaggaagaaatgaggaagatcattgggcgatacggtctcactgggaaacaacaggtgagcccaatccggaacttgtcagacgggcagaagtgccgagtgtgtctggcctggctggcctggcagaacccccacatgctcttcctggatgaacccaccaatcacctggatatcgagaccatcgacgccctggcagatgccatcaatgagtttgagggtggtatgatgctggtcagccatgacttcagactcattcagcaggttgcacaggaaatttgggtctgtgagaagcagacaatcaccaagtggcctggagacatcctggcttacaaggagcacctcaagtccaagctggtggatgaggagccccagctcaccaagaggacccacaacgtgtgcaccctgacattggcatctctgccaaggccatgagcatcatgaactcgtttgtaaacgacgtgtttgagcagctggcgtgtgaggctgcccggctggcccagtactcgggccggaccaccctgacatcccgagaagtccagacggctgtgcgtctgctgctgcctggggagctggccaagcacgctgtgtctgagggcaccaaggctgtcaccaagtacaccagctccaagtgacccagggcctgacaaaaataaagggtgaactgttaaaaaaaaaaaa

SEQ ID NO: 275 - DNA, 12630 bp, HOMO SAPIENS
gcgtcatcaacctgcgcggcggccgctcctgcagccgcggccgccgccactgccgggagagctcgatgggcttctcctgcgcgccgcccggtgtctggccgagtccagagagccgcggcgcctcgttccgaggagccatcgccgaagcccgaggccgggtcccgggttggggactgcaggggaaggcagcggcggcggcggcgggagccccaccggggtctgggactggggaactgcctccggcttcacgatgccagtatggacagaatagcttatgatgcttatccccacccaccacttccgaaacattgagcggaaaccagaatacctccagccagagaagtgtgtcccacccccctaccctggtcctgtgggaaccatgtggtttatccgtgacggctgtggcatcgcctgtgccatcgttacctggtttctggtcctctatgcggagttcgtggtcctctttgtcatgctgattccatctcgagactacgtgtatagcatcatcaacggaattgtgttcaacctgctggccttcttggccctggcctcccactgccgggccatgctgacggaccccggggcagtgcccaaaggaaatgccactaaagaattcatcgagagtttacagttgaagcctgggcaggtggtgtacaagtgccccaaatgctgcagcatcaagcccgaccgagcccaccactgcagtgtttgtaagcggtgcattcggaagatggaccaccactgtccctgggtcaacaactgtgtaggcgagaacaaccagaagtacttcgtcctgtttacaatgtacatagctctcatttccttgcacgccctcatcatggtgggattccacttcctgcattgctttgaagaagattggacaaagtgcagctccttctctccacccaccacagtgattctccttatcctgctgtgctttgagggcctgctcttcctcattttcacatcagtgatgtttgggacccaggtgcactccatctgcacagatgagacgggaatagaacaattgaaaaaggaagagagaagatgggctaaaaaaacaaaatggatgaacatgaaagccgtttttggccaccccttctctctaggctgggccagcccctttgccacgccagaccaagggaaggcagacccgtaccagtatgtggtctgaaggaccccgaccggcatggccactcagacacaagtccacaccacagcactaccgtcccatccgttctcatgaatgtttaaatcgaaaaagcaaaacaactactcttaaaactttttttatgtctcaagtaaaatggctgagcattgcagagaaaaaaaaaagtccccacattttattttttaaaaaccatcctttcgatttcttttggtgaccgaagctgctctcttttccttttaaaatcacttctctggcctctggtttctctctgctgtctgtctggcatgactaatgtagagggcgctgtctcgcgctgtgcccattctactaactgagtgagacatgacgctgtgcgtggatggaatagtctggacacctggtgggggatgcatgggaaagccaggagggccctgacctcccactgcccaggaggcagtggcgggctccccgatgggacataaaacctcaccgaagatggatgcttaccccttgaggcctgagaagggcaggatcagaagggaccttggcacagcgacctcatcccccaagtggacacggtttgcctgctaactcgcaaagcaattgcctgccttgtactttatgggcttggggtgtgtagaatgattttgcgggggagtggggagaaagatgaaagaggtcttatttgtattctgaatcagcaattatattccctgtgattatttggaagagtgtgtaggaaagacgtttttccagttcaaaatgccttatacaatcaagaggaaaaaaaattacacaatttcaggcaagctacgttttcctttgtttcatctgcttcctctctcaccaccccatctccctctcttccccagcaagatgtcaattaagcagtgtgaattctgactgcaataggcaccagtgcccaacacatacagccccaccatcatccccttctcattttataaacctcaaagtggattcactttctgatagttaacccccataaatgtgcacgtacctgtgtcttatctatattttaacctgggagactgttgtcctggcatggagatgaccatgatgctggggttacctcacagtccccaccctttcaaagttgacatatggccatcccattggccagaatccacagacacacctaagcctgtggcactgggacagaatagattttccatttgagaggcacttcctgtgtcagtcttgtttgaaggaggtggtgatggtggatagaggtgaaggaggtagggagtgccctccaagtgcaaaaataacaaatatgattattgaccatcggggaattctcacacattgatttgttttttaagcaattgccagaaacccccttttttagcttttgcttggggtgggggtaggagttaaggtttattcaatcctgtcctgggtagggcgaaagttaatctagccatgtgatttttcagaaaagtaagtggaacatgctgccacttttcaattctgtcagtgcttccacatggaaacaaaatgcaataaaatttttccaaaacctgttctgatttagctctctcttgaggtgttacccttagtgggaggccgactatccacaatctacttgagttttctctggttgggtgtttgtttcattgctctgtctcttgaatgaggatactttattttttttgttttaaaatgcatttatggtccctctcttgaaccagcttgccccaccaggcctctttcctttgctttctgcagcctgaatcaattcctttgtgctgatgggctctcctaagagctttcctgagtcagttaactttacctcgtgtctacggtgctattcatgcgatacgggcgaggctgagatgctaagattaaaaagaaaagaatgctgttttagatcaagttgatagcatttgttttccatatgcttttttaaaattttttcataacatacagctcagttaggtgtatgaaagaagtgttattgtattaaataactagagcagggctacagctctggccctcccctagggggaagagattggtaatactccatcttccagggcattttttaaagtgagccaggttagctcttttcccctggcatttctcaggaatgcagtagatagtgctgaagatgcactgacttttttttagtcctaaaaatagaaactcctcctttaaagctgtgcatactatgcttatctttccaatagagtggggttccttcagatatcctataggattctgcctctggttttgtataggccttggctagaaagagtcaatgtttctgagctctcaaaccagttgctctcagaagataggaataccccaaggttcctggcatttttcctatttcatttttgttcagactgatattttgccaagagcacaatgactgaggaatgtagccatcatttgcagggtagtgattggttcccagcctggcttccacacaggacaggaagggaaagcatccctgagctctcctcagtatttccggatgtaatgaaagaggacatctttctacacaaagtcagccccaacttttggcttggtcacaggagttctgatagtactgtttggtgcactcatgggaaattgaaccagtcgtagccacagtctttcagagcctgggctctggggagtggaagtgaaaaataaagatgtggcttgttggattgtgatccccagcttgctttccttctgtcaactctgtcaggtttgtgttcatagcaactagactgaatatgcaaaaggcttagatccaagcaaatctataatctatgcatatttgcatgggcttggtaatatcatgtacacaaaacacatttgggtagaagtgcatgtgctaaatctccttttagtcccaccattttgtcttcttcatactgtacttcctcttttttgtttgagacaaggtcttgctctgtcacccaggctggaatgcagtggcacaattagagctcactgcagccttgaactcctgggctcaagtgattcttgtgccttggcctcctgaatatccagggctacaggcacgtactaccatgcctggctaatttttttgttttttaatagagtcagggtctcactgtgttgccctagctagtctcaaatgcccggcctccagcaattttcctgccttagcctcccaaagtcctgggattacaggcgtgagccactgggcccagccctgtacttcttgaaaaagccccaagtattagcttttgctcatctggctaggccacttaaatagttagaatccaccgtcccctaatgcagaaaccgtttaggtgaggtaaattaacaaacattttaagccgggcgcggacacttctcactgtggacatccctcacgcctgtaatcccagcactttgggaggccgaggcgggcagatcacgaggtcaagagatcgagatcatcctggctaacacggtgaaaccctgtctctactaaaaatataaaaaaattagctgggcgtggtggcaggcgtctgtagtcccagctacttgggaggctgaggcaggagaatggcgtgaacccgggaagtggagcttgcagtgagccaagatcgcaccactgcactccagcctgggcgacagagtgagactccgtctcaaaaaaaaaaaacaaacattttaaacatgtatgtgaggttggcattacacagaaactcctctccgggtgggctgggatgggctttctcagccaggctaatgggttttaaatttctctcttttcaagacttgcagtgcatcagcttaaagggtgagccagccagtagaggggaaggcgccccacctagaaggtgcccttagatatcaaagaaatgtgaaaagagaaagattttgctagaatcctcctcaaaggtgttcttgaggttgccagaccagcaacgtcaacatcagcatcacctgagaacttgttagaaatgcacattctcggtccccaccccaggctaccgaaccagaaaccgagcggggcccagcagcccgtgtcttaacagccctccaggtgattctgactatcaagtttgagaatccagttggggctagcaggagtcccccctcaggtggtccctgatgcctgctggtgatatgggtcttgtgtgctgctgggctcagcatagtgcagttggggtgtgctgattgtgagacaggcacgtgttccctccgcggagaagccactgagactgccttccctcataagctgcggcctccccaacaaacaactgccaagacatcaaagaaagtctgtatgaagcagatccaaattattagcctgcccaccactccttgtgcatctcatcagtggaacccatctctagaccaagggccctttgggtgaagaagcagcccggaagggaaagagaaaagagtagaaccaagggacctccagatgggagcggcggccggtgagtagtctagagccaggggcattgtagcagcctggatacatgacctgaacacgtcttgacctttgctttctacgtgtgggtttcaacacccatgtggctttttcttgtattctttaaatatgtatctggcttaggatcacctcatagaagagaaagaattcacagtgaagcagaaacaagccactgaccagcgtactcccaacctgaaccttctttttctcaccctctccctcaagtaaacatcttgctgacttgagcagtgtgattgccgtagcaaagcagagtggcccccagggatcccgctctgttgggcccacaggaggagccgatgaagctgatccaaggagtgaggacaagcgctgcagagggacgttcgctaaaagccttctaggggccgcacatgctctaacacggacataaggatgccctgaatttctgcagctgaggccatatagtctggtgaccaagtatttgggtcctggcttcagtctttggttgaaatgtctgcttggctacttattaccgcacctactaccaaaatatgaccttgagcagtaacttctttaagcctcagttttttcatctgaaaacgggaatgataatctaaatcacaaagttaatggaaggattaaatgagggtgatgaataggaatgtatagcgtctggccctggtatggctttataaatgttagctgtgttggagctgtgcttttcaaaccattggtcacagccattcatggtttgcaaccagcatgtttttcaagaaaaatgtttaatgcattacatattgcaggataagtattgttttatgaagcttagggagttgtgtgtatatgtgttctggaatgcaacagaaaaatgtttcctcttgtgggttacaatatagaggtatgaaatctctgatgaggagagacagtgttatctggcccgctatgaagagacacatttgcataggctgctccctgaggctctggctttctacatctgatgatacagggagcagggaacagcctgttctcgttctgtggggctcagctgagtctgttctgcacagactcttccttcctcgggagccttagtcctaatacattcattttggagtgttggtgagtttgttcacagatcacagctcatgtgtcacccagactgacctgggccaaaaggcccatcacacaccctgcaagagcttctggtgtcgactatgacccccttaccaggcatcaaccatttttgttcgttctcttgagcctgaagctactattactgctcctctgcaaacctcaagcttaagaactttgcctgcaggatccctttaaatccacacaaaactcaaaattgagtcctaccaggaaaaagcagccctcagcccatttttatacatcggatttgtttgcaatattttctttctagactcaaaagtcaacactccctgaaagtttgtcgactttactgctgaagacctctggtagacaggccaggctctgtctggaatactttatgaggttggtgaggaggttgagtataatccaagagtgcctatctgggagcatgccacatgaatggcaaataatcatcctgtgggctcttggcttcattccccttctctctgactgagctcagcctgggcacagtggtgatttgcagtagaactggaaacctgttgggcagaaaaaaagacactagttctggttccagttctgatacataacaagctagatgagccttggccaccgtcatggcctcttggaacttctgtttcttccccatctgccaatcatcaatactcatacccacctcctcacaaggaggccataaaaacctatggtcatggctttgagtccaagtcagtgtggatgcagccagtctgtcatttttgggtgtttcctctgtagccgggtctgccatatggtgatgtcccagctctcgtgctatgaagttaaagcctctttctcaacaggctgcagatgatcacccaggaagagaatgcagaatgcccaaagcaaaccatctcagctggtcactgcttctgtgccaagaagggaggcctggcgaggggccagtcaggaagcagcatggcatcacatgctcatgacccacatgaaggtccctttagacttgtgtcaacaagatccattttctgaaacaactatttttgttctgattataaaagtaacattggctcattggtaaaacttggattgtgtgagaagtctacagaaataaatacaaatcctctagaattccatccccaaaagtaaccactcagacaaatgttctaatgtcatgtaaaaccatattaaaccatcttttctagctgcatagtgttatagaatcatttgcttaaccatcattattgggcatttctcatttccagctttgcattattataattcagtgttcaagtttgtattgcataaatctttgtctcagattattgattatttttaaactttttgtgaaatcagacttacaaaaatgtgacaaaaacagtacaaagagttcccatgtacctttcagtcagtctcaccaaaggtaaacattttatacaaccataatacaaatataaaaccctggacattggcaacaccatacccttaactaatgtatgtaccttattcacatttctccagttgtcccattaacacccttttctgttccaggatcccacactgcatcatttgcgatgtctccttagtctcctccagtttgtgacagttcctcagtcttcctttgtctttcatgaccttgaccctttttaaaaatcgaggtgaaattcctgtaacacaaaattagccattttaaagtgtacatttaatgcattcacaatgttttgtaaccaccaggtctgtctggttccaaaatcttttcatcaatctttgacccttttgaagattgtagggcaggtattctgtaggctgtccttcagattgtgtttttgatgtttttctcatgattagattgaggttaggcatttggggcaggagcactgctgaagcaatgtgtcctcgttgcaccgtatcaggaggcatatggtgttgatacgtttcattattgtgatgttaactttgatcattgggtgaaggtggtacgtgcaatgtttcttccctgctattaaggtactgtttttccctttgtaattgataagtatcttatgaggatatacttttgagatccaatttttttaacttagaatttattcaaaagtcaagaatcttaaatctctgaaatggcgtgggaagaaaaagtgctagatacacagagatctttcttgagtcatgtgaaggagcagtgcccaagcccagcaaacccacagcaaattcccttggcttccagaagagatggagaaagcagtgcccccagtggagggtcaaaggcctctgtgcagggtgttgtgggcctggagagctggcctggccatgtctttacctcctctgggcatctccccaccccaacaccctttctgtggcctggtggctgagttgcagccgacacccagaggcaggtgagttgacagcttggaagaggctgcagggtggatctgctgcatgagcaggcctgagcccagccttacctccccacagtggtcctgtgtgccctccggctgcctaatgcatgttggcacttgctgtacgagcacccgcttcttcacctcgcatgctgtttgtgtcctgcactccttccttaaccccatcgtccttctgctgtgtttgcagcccctatctaccctggtgggagtggccaaaaatatttaggaggggatcaccagtttgtagtggcctcagaggatgtgtggtcccccttatgcctcagccactcatcagcctagcccctgcccatcatctggcattgcacttgtggaaggaaagaaggggagggctgggtggtgggtggagaacacgtcagtccaccaggcgggccctgcttgctgtgttcctccacgctgctgtccacccacaccccagcagtcctctgagggacctcccgggggtgacctgggccacaacagactgcccactcagaccccatcttacccatgccgtggacaccccgcccccccccccgccactgctatgctatagctgggggtgtctatgtgagctgtacagcccagcaccacgctgacgatgttcttcatccccttctccctgcagggcatcgagcgcctcaaacgaaagaaccagcccagggagcacatggggagctggcagtcagtaaaggagacctttggtggggacttctccctgaactggttcaaccccttctccagaccgtgtcagccagagatccccagtgacaaagacatggtgcggcaggtgacatcgctgtcagacaccgaaacaatggaggatccatcagaggagacaaaggacgaggactctgtggaggtgacagatgaatagatgctgctgtggggagagaagcaaacactaaaaagtgctgtcaaccttcatcctggggttttggctaaaggggcttatgggcatggtgcgctcccagcacccccagtgcttcccttagccactcgcttggccttgccatttcccctccttcttctctccatgttgggccaggtctgggggtcgggagtaggctggggacatcagaggaggatgggggctttctcagagttcatctaagaagagtctgcactgagacggctcatcaagaaccgttctccaagactgggtggctttcacattctccgcccagcaaagggagcttttgaacagggcatcccaggggcagaaaagagcttgcctttggctttccccaggatttctgtcttctcttgggaaggctgggcccctggctcctggctttgagaagtaaggttgtgacagaaggaccgggcagggcttgccttggggacctgggttgggacactgacatcaggggagactagcctggaaagactgcagagctgccagctactccctggaaagggcttccccatgctgcctgccgaaattaggaggtagaggtggctgccacatctacctgcaagggccaggcatggttcaaagaggaccctgcattaagctctacacacacatgtgcaggacatgtccagcatggacagagccagagttaagacagtagcaccgaaaatgagcccccattccacagacactggagtcttcactgagcgagacagctgggagctgtcctgcctgtggctacatatctagccattcacagatgtggatatgggaaggacctctttggagctactggggactccctaaccactcgcatgagaacttaattgaatgttacctcttggagggagtctaataacacatgtaggtagaactgaccataaaccctgcctgtgtgtttgaaaaggccagttctcccaaattggtgcccatcttgtctctgaaaagatgggtgatggccagggtctgctgattgatgaatcagatgaatcaggaagatagacaaacacacacacacacacacacaccccaccaggatgagtctgccctctattcaccccatttgaagcctgtggtgtctgtgaccactgctgaaggtctgagcagcgttctggtgctcctaaaccccattccagtggttgctgaagcagcatcttctgcacaaagcccaacagaagggttcttatccccgtttggtataagaagtggattcaccacccactccctccacgtgcctttgttcctctctttggcccatttccccagcgtctactggcgtcaggattggcaggagcacaggcactcagcagagcatgcccctgcaagacctcagtgttagggccccccttccagctccaggcaaaagggcatgagtcctggccccaaggggcctgtggctgcagttcagaggagaagaaggtcagtgtttggaggtgcagcctcaggatgctgagaaaggaaactggcgaccgtgagaaagaaaagagccaagcagcatcctggttcttggacagcatctttggacactctgtgaagggcaacgatcctgccagagaccgtctctctacaactgatgacccactagggcctggggttaattgctcaaagggcccagtgttcacaaagccacctctgccctaacccttgccagagctctccaactatgacccacgagaggggtgatggtgggattctaacatcaacagagcaaccagaaagacattgggcctcccacactcaggctgcaggcccactttcttggtccttatcagctttaatatttattaatgacgacataggagcccgagtcagctgtaaaggccattaacttgcaatctggacaggaagttgacgctcaccactttgggtaagagctgctctgactgtagggccccctatttgttgtcctaacccagaagcagctctgggctgccaggatggtggatggaataccagagagttcacactagggaggaagcaatgcctgccccctggagtctcctagggggcagcagttagaataagggaagaggatttgctggtcactgtttgctgacatgggtttccatggtgagttcaggcctgaggacagcagtgtctgcaaaaccacatggcccttgagaaatgtccttgcacattgggcttcaaactcctcttctagggaatccatcttggcctgaaagcagaggtacaacaccagccccaaaggcaattctgttttcagattggttgctctggaaaggaaggctggggtgagggggcattttacttgcacagaggctgaccctgcctcccctcttcactgaccccatctccaaggtagacctcagccatgtcagtccctgttctgggaggtgctgggctgggccacagccagggttatgtaggtaattaacctgtccaaccctgagcctcgcctccccacaccagcaacacagtggtctctctgtggtgaccattcacagcataacattctgcttagcctcagactgaaagcattgcaactgatgtcaaaaccagatgagatcttacagggagagagattgggtgcaatttgcctctttctttgaataaaaagctctttgctcaccctcaaaaaaaaaaaaaaaaaaaaaaaaaaaaa

SEQ ID NO: 276 - DNA, 264 bp, HOMO SAPIENS
ccaagagttaagttctcagccgctcttatcttgactcttaaccaggatctgttttgatatttaatctatgtatgtatgtatgtacctagtaattcatactctgtatccagcaaggtgttcagaggacctatgatgagaagggtctaaacactaactctgttatagaaagccagatggaggaaatagcagatagtctgaccaacaacattgtttgctgtcctggcgaagttgaattctgagagtcttagctgccaggaaagccag

SEQ ID NO: 277 - DNA, 3061 bp, HOMO SAPIENS
ggaattcccccctccggggggccgagaaggggctttcccggccctgagccctgctggcaggcgaggtgtcgcgaccggtcccaggtgggtcgggcgcggagagaagccgcaaccagagccgccgccacggcgggcgtctaaaattctgggaagcagaacctggccggagccactagacagagccgggcctagcccagagacatggagagttgctacaacccaggtctggatggtattattgaatatgatgatttcaaattgaactcctccattgtggaacccaaggagccagccccagaaacagctgatggcccctacctggtgatcgtggaacagcctaagcagagaggcttccgatttcgatatggctgtgaaggcccctcccatggaggactgcccggtgcctccagtgagaagggccgaaagacctatcccactgtcaagatctgtaactacgagggaccagccaagatcgaggtggacctggtaacacacagtgacccacctcgtgctcatgcccacagtctggtgggcaagcaatgctcggagctggggatctgcgccgtttctgtggggcccaaggacatgactgcccaatttaacaacctgggtgtcctgcatgtgactaagaagaacatgatggggactatgatacaaaaacttcagaggcagcggctccgctctaggccccagggccttacggaggccgagcagcgggagctggagcaagaggccaaagaactgaagaaggtgatggatctgagtatagtgcggctgcgcttctctgccttccttagagccagtgatggctccttctccctgcccctgaagccagtcatctcccagcccatccatgacagcaaatctccgggggcatcaaacctgaagatttctcgaatggacaagacagcaggctctgtgcggggtggagatgaagtttatctgctttgtgacaaggtgcagaaagatgacattgaggttcggttctatgaggatgatgagaatggatggcaggcctttggggacttctctcccacagatgtgcataaacagtatgccattgtgttccggacacccccctatcacaagatgaagattgagcggcctgtaacagtgtttctgcaactgaaacgcaagcgaggaggggacgtgtctgattccaaacagttcacctattaccctctggtggaagacaaggaagaggtgcagcggaagcggaggaaggccttgcccaccttctcccagcccttcgggggtggctcccacatgggtggaggctctgggggtgcagccgggggctacggaggagctggaggaggtggcagcctcggtttcttcccctcctccctggcctacagcccctaccagtccggcgcgggccccatgggctgctacccgggaggcgggggcggggcgcagatggccgccacggtgcccagcagggactccggggaggaagccgcggagccgagcgccccctccaggaccccccagtgcgagccgcaggccccggagatgctgcagcgagctcgagagtacaacgcgcgcctgttcggcctggcgcagcgcagcgcccgagccctactcgactacggcgtcaccgcggacgcgcgcgcgctgctggcgggacagcgccacctgctgacggcgcaggacgagaacggagacacaccactgcacctagccatcatccacgggcagaccagtgtcattgagcagatagtctatgtcatccaccacgcccaggacctcggcgttgtcaacctcaccaaccacctgcaccagacgcccctgcacctggcggtgatcacggggcagacgagtgtggtgagctttctgctgcgggtaggtgcagacccagctctgctggatcggcatggagactcagccatgcatctggcgctgcgggcaggcgctggtgctcctgagctgctgcgtgcactgcttcagagtggagctcctgctgtgccccagctgttgcatatgcctgactttgagggactgtatccagtacacctggcggtccgagcccgaagccctgagtgcctggatctgctggtggacagtggggctgaagtggaggccacagagcggcaggggggacgaacagccttgcatctagccacagagatggaggagctggggttggtcacccatctggtcaccaagctccgggccaacgtgaacgctcgcacctttgcgggaaacacacccctgcacctggcagctggactggggtacccgaccctcacccgcctccttctgaaggctggtgctgacatccatgctgaaaacgaggagcccctgtgcccactgccttcaccccctacctctgatagcgactcggactctgaagggcctgagaaggacacccgaagcagcttccggggccacacgcctcttgacctcacttgcagcaccaaggtgaagaccttgctgctaaatgctgctcagaacaccatggagccacccctgaccccgcccagcccagcagggccgggactgtcacttggtgatacagctctgcagaacctggagcagctgctagacgggccagaagcccagggcagctgggcagagctggcagagcgtctggggctgcgcagcctggtagacacgtaccgacagacaacctcacccagtggcagcctcctgcgcagctacgagctggctggcggggacctggcaggtctactggaggccctgtctgacatgggcctagaggagggagtgaggctgctgaggggtccagaaacccgagacaagctgcccagcacagaggtgaaggaagacagtgcgtacgggagccagtcagtggagcaggaggcagagaagctgggcccaccccctgagccaccaggagggctctgccacgggcacccccagcctcaggtgcactgacctgctgcctgcccccagcccccttcccggaccccctgtacagcgtccccacctatttcaaatcttatttaacaccccacacccacccctcagttgggacaaataaaggattctcatgggaaggggaggacccctccttcccaacttaaaaaaaaaaaaa

SEQ ID NO: 278 - DNA, 2100 bp, HOMO SAPIENS
ggtggctgaacctcgcaggtggcagagaggctcccctggggctgtggggctctacgtggatccgatggagccgctggtgacctgggtggtccccctcctcttcctcttcctgctgtccaggcagggcgctgcctgcagaaccagtgagtgctgttttcaggacccgccatatccggatgcagactcaggctcggcctcgggccctagggacctgagatgctatcggatatccagtgatcgttacgagtgctcctggcagtatgagggtcccacagctggggtcagccacttcctgcggtgttgccttagctccgggcgctgctgctacttcgccgccggctcagccaccaggctgcagttctccgaccaggctggggtgtctgtgctgtacactgtcacactctgggtggaatcctgggccaggaaccagacagagaagtctcctgaggtgaccctgcagctctacaactcagttaaatatgagcctcctctgggagacatcaaggtgtccaagttggccgggcagctgcgtatggagtgggagaccccggataaccaggttggtgctgaggtgcagttccggcaccggacacccagcagcccatggaagttgggcgactgcggacctcaggatgatgatactgagtcctgcctctgccccctggagatgaatgtggcccaggaattccagctccgacgacggcagctggggagccaaggaagttcctggagcaagtggagcagccccgtgtgcgttccccctgaaaaccccccacagcctcaggtgagattctcggtggagcagctgggccaggatgggaggaggcggctgaccctgaaagagcagccaacccagctggagcttccagaaggctgtcaagggctggcgcctggcacggaggtcacttaccgactacagctccacatgctgtcctgcccgtgtaaggccaaggccaccaggaccctgcacctggggaagatgccctatctctcgggtgctgcctacaacgtggctgtcatctcctcgaaccaatttggtcctggcctgaaccagacgtggcacattcctgccgacacccacacagaaccagtggctctgaatatcagcgtcggaaccaacgggaccaccatgtattggccagcccgggctcagagcatgacgtattgcattgaatggcagcctgtgggccaggacgggggccttgccacctgcagcctgactgcgccgcaagacccggatccggctggaatggcaacctacagctggagtcgagagtctggggcaatggggcaggaaaagtgttactacattaccatctttgcctctgcgcaccccgagaagctcaccttgtggtctacggtcctgtccacctaccactttgggggcaatgcctcagcagctgggacaccgcaccacgtctcggtgaagaatcatagcttggactctgtgtctgtggactgggcaccatccctgctgagcacctgtcccggcgtcctaaaggagtatgttgtccgctgccgagatgaagacagcaaacaggtgtcagagcatcccgtgcagcccacagagacccaagttaccctcagtggcctgcgggctggtgtagcctacacggtgcaggtgcgagcagacacagcgtggctgaggggtgtctggagccagccccagcgcttcagcatcgaagtgcaggtttctgattggctcatcttcttcgcctccctggggagcttcctgagcatccttctcgtgggcgtccttggctaccttggcctgaacagggccgcacggcacctgtgcccgccgctgcccacaccctgtgccagctccgccattgagttccctggagggaaggagacttggcagtggatcaacccagtggacttccaggaagaggcatccctgcaggaggccctggtggtagagatgtcctgggacaaaggcgagaggactgagcctctcgagaagacagagctacctgagggtgcccctgagctggccctggatacagagttgtccttggaggatggagacaggtgcaaggccaagatgtgatcgttgaggctcagagagggtgagtgactcgcccgaggctacgtagc

SEQ ID NO: 279 - DNA, 398 bp, HOMO SAPIENS
  misc_feature (47)..(47): n is a, c, g, or t
  misc_feature (53)..(54): n is a, c, g, or t
  misc_feature (69)..(69): n is a, c, g, or t
  misc_feature (80)..(80): n is a, c, g, or t
  misc_feature (82)..(82): n is a, c, g, or t
  misc_feature (88)..(88): n is a, c, g, or t
  misc_feature (97)..(97): n is a, c, g, or t
  misc_feature (111)..(111): n is a, c, g, or t
  misc_feature (146)..(153): n is a, c, g, or t
taggaggatcctatttgtgtatctaagattcaacattcatgaaggancagaannacttggatttgcctnttagctcttgnanctgganagtggatgncttcctgcaaggcncgatttttggattggcttctcaattattacaggannnnnnnncttttagaattgccagcctattcatctgatcttgaaagtgtacaaacttaccttcaaacagtgtagaatatatgcaattctggacctagacagaggcaataacctaaagacatttgcagctcatttcttgtcagaacccattgagaatagtggtattgatggaagactgtcaagcccatccagttctctagtctaaatagtctcagtttatccatgacttgagccatctaaaagttgcataacaa

SEQ ID NO: 280 - DNA, 4938 bp, HOMO SAPIENS
ggtgggggtgcgagcgaggagccgcacaggcagtcccggcgcggggcaaccacagcgctcaggaggccctgagtccggcacctggccatgtgcaaccctgaggaggcagctctgctgcggctggaggaggtcttctcagccaccctcgcccatgtcaacagccttgtcctccagcccctgctcccagccgccccagatccctcggatccctggggcagagagtgcctgcggctcttgcaacagctgcacaagagctcccagcaactctgggaggtgacggaggaaagcctgcactcactgcaggagaggctgcgttacccggactccaccggtctggagtccctgctgctgctgcgaggtgctgaccgtgtactgcaggcccacatagagtacattgagtcctacacaagctgcatggtggtgcaggccttccagaaggcagcaaagaggagaagcgagtactggcggggccagcggaaggcgctgcggcagctgctttcaggtgtgagctcagagggctcggtgggcgcatcgctgggccaggccctccaccagccactcgcccatcacgtgcaacagtacgtgctcctcctgctgagcctcggggacaccattggggagcatcacccaacccgggagctggtggtgaacgcagtcaccctctttgggaacctgcagtccttcatgaagcaggagttggaccaggctgtggccacacaggctctctggcacaccctgagaggccggctgagggatgtgctctgcacccctgctcacagactccttcaggacagccaggacgtacccgtgacggtcgcaccgttgcgggctgagcgtgtgctgctctttgatgatgccctcgtcctgctgcagggccacaatgtccacacctttgatctgaagctggtgtgggtggatcctgggcaggacgggtgcacgtttcacctcctcacgcccgaagaagagttctccttttgtgccaaggactcccagggccaggcagtctggcagtggaaggtgacctgggctgttcaccaggccctgcatgggaagaaggacttccccgtgctgggggctggcctggagccctcccagcctcccgactgccgctgcgcagaatataccttccaggcagagggccggctctgccaggccacctacgagggcgagtggtgcaggggccggccccacggcaagggaaccctgaaatggccggatgggcggaatcacgtggggaatttctgccagggcctggagcatggcttcggcatccgcctgctgccccaggcctctgaggacaagttcgactgttacaagtgtcactggcgagaaggcagcatgtgtggctacggcatctgtgagtacagcaccgacgaggtgtacaagggctacttccaggagggcctgcggcacggatttggggtccttgagagtggtccgcaggccccccagcccttcaggtacacgggccactgggagaggggccagaggagcggctatggcattgaggaggatggtgacagaggtgagcgctacattggcatgtggcaggctggtcagcgccacggcccaggggtcatggtcacccaggcaggtgtctgctaccagggcaccttccaggcggacaagacggtgggcccgggcatcctcctctctgaagacgactccctgtatgagggcaccttcaccagggacctgaccctcatggggaagggcaaggtcaccttccccaatggcttcaccctggagggctcgttcggcagtggggcagggagaggactgcacacacagggtgtgctggacacggctgccctcccaccagacccgagcagtacctgcaagaggcagctgggcgtgggtgccttccccgtggaaagccgctggcagggagtctacagccccttccgggactttgtgtgtgctggctgccccagggacctgcaggaggccctgctgggcttcgacgtgcagagctccagggagctgcgtaggtctcaggattacctgtcctgcgagaggacccaccctgaggacagtgtgggcagtatggaagacatcctggaggagctgctgcagcaccgggagcccaaggccctgcagctgtacctcaggaaggctctgagcaactcactgcaccccctgggaaagctgctccggacactgatgctgaccttccaggctacctacgcaggtgtcggggccaacaagcacctgcaggagctggcccaggaggaggtgaagcagcatgcccaggaactctgggctgcctacaggggtctgctgcgagttgccttagagcgcaagggccaggccctggaggaggatgaagacacagagacaagggacctccaggtgcatggattggtgctgcccctcatgctgcccagcttctactcagagctcttcacgctctacctgctgcttcatgagcgggaggacagcttctacagccagggcattgccaacttgagcctctttcctgatacccaactgctcgagttcctggatgtgcagaagcacttgtggcccctcaaggacctcacgctgacgagcaatcagaggtactccctggtcagggacaagtgtttcctgtcagccaccgagtgcctgcagaagatcatgaccacggtggacccacgggagaagctggaggtgctggagaggacatacggggaaattgagggcacggtgtcgagggtattgggccgggagtacaagctgcccatggacgacctgctgccacttctcatctacgtggtgtcgcgcgcccgaattcagcacctgggagccgagatccacctgatccgtgacatgatggaccccaaccacacaggaggcctgtatgacttcctgctcacagccctggagtcctgttacgagcacatccagaaagaagacatgaggctgcaccgcttacctggccactggcactccagggagctctggtagcctggcctttcctggacagactgaagagctgagcagggcactgccagcctgtccctcattacccaaggcaaggggcaggacaggccctcagaagcagctcttggaggagatgagcattttgttttgcacaggaagatgctgctgctgccctgactgggatgagggtgaggggtgacgggtgtggccctggatgtggtggttttcccttggccactagcccatcttcaatgaccccttaatctgcagcagctcacaggctgggggtgaggagtccctggcttctcttagcctgagcctttctcccaagttccagagcctctccgggcctcagtgctgccatctgtacaatggtggagtgagtacgctgtaaaggaccttccattcattttgctgaattccagagtccttttggaaaactgactttagtctgctgggctgtattgacctctggcaggctcgaagcctcactgggtatgcagtcaacaggatgggcctggagatccgtgaactgcaggccacgtacccatgacgtaaacggcggcactggagcaagctggggcggggggtgggtaaaccctcactgccagcaggccccaagtggcttgtaaatcattctcctgtgatgtctgtgggcctgcgtggggacaacaggggcacatgacatctgcctgggccctgaccaataaaccctcagacccaggacccaggaccctgctgtagttggggagcaggagtacctttgggaggggaggactttatttaaacagtggttctagtgtgggaccaagagaggcaggagctgggtcttggggcagctttattcctgttgggcctcagtttctcttccccacacagtttatcttccgtcacattgtgccgggtgacgtgcacggtctccctctgccctagccggagatgcatgatgacaggcagtgtgatgtgttctgaaagtgtccagggcaaagcgtagggagagggtggatttgtgcagggtgcagctctggagaagaagctggatcactcttggtcccattccctaggccctgagcaagtcaggctcctggctctgggtgtggctcccccaaacgaagtactgacttcagcctgtgaggggagggttgagggaggctctggaaagcccagccacacctgagtccctggcagtagccttggggcagagggcacccgcagagtcccagagatgatgtgggcagtgggcagagagagccttggcgcctctgtttgccaccacttccccaggaaggagggacagcatttctctggctggttccactaaatgtgccagcccaaatgcagggcatgggctctggttctgccaggagcctgtgacacccccaggaagggggtggaactgaggaagagcgaggatatgcaggcactcatgcttaccgggactggggcagctcactaggattctatcctttccaatcggcatcagccagctcttgtcccctgataagtgaggacagcctgaccctggcctcaaatgcagccatccctgagttcatgcgatgctgacgggaccccagcacacttccctgcctcctttgagatctgcgagcccttgctgcagttcagattcaacaaggccctctgcccaccctctcactaggcctcacccaacaccagtggaactggagcctctggctgggcacagtggctcactttgggaggctgaggcaggaaggctgctggaaactgagagttcaagaccagcctgggcaacatagtgagaccctgtctctacaaatacaaaataaaataattagctgggtgtgttggtgtgtgcctgtggtcccagctactcgggaggctgaggtgggaagatccctgagcctggagggtcgaggttgcagtgagcggagatcgcacctctgcactcaatcctgggtgacaaaatgaaaccctgcctcaaaaataaaaataaaaataaaaataaaataaataaaaaagagcatctggacagag

SEQ ID NO: 281 - DNA, 4616 bp, HOMO SAPIENS
gcgccgtacgtgcgcgcgcgcggcggcccagaaagcggcgctgggaccctgaggcggccgtggttaggcggctccccggcggctcctccgcggcggtgacggcgaccgcactccccgcttcccgctccccgcgctcctccgcccgggtccgccagccgaggccgctcccgagcgtcggaagatgccggccgtgtccaagggggacgggatgcggggcctggcggtcttcatctcggatatccgcaactgtaaaagtaaagaagcagaaataaaaaggataaacaaggaactggcaaatatcagatcaaaatttaaaggtgacaaggctcttgatggctatagtaaaaaaaagtacgtctgcaagttgctcttcatctttctccttggtcatgacattgactttggacacatggaggctgtgaacctgctgagttcaaacagatacacggaaaagcagatcggctaccttttcatctctgtgttggtgaactcaaacagtgagctgatccgcctgatcaacaacgccatcaagaatgacctggccagccgcaaccccaccttcatgggcctggccctgcactgcatcgccagcgtgggcagccgggagatggccgaggccttcgccggggagatccctaaggtcctcgtagccggagacactatggacagcgtgaagcagagcgcggccctgtgcttgctgcgcctgtacaggacgtcccccgatcttgtccccatgggcgactggacatcccgagtggtgcacctgctcaatgaccagcacttgggtgtggtaactgcagccacaagtctgatcaccactttagcacagaagaacccagaagagtttaaaacctccgtgtctctggctgtctctaggctaagcagaatcgtgacgtctgcatccacagatctccaggattacacttactattttgtcccggctccctggctgtctgtcaaactgctgagactgctgcagtgctacccacccccagaccctgcagtgcgaggccgcctgactgagtgcctggagaccatcctgaacaaagcccaagaaccgcccaagtcgaagaaggtccagcactccaacgcgaagaatgccgtgctcttcgaggccatcagcttaatcattcaccatgacagtgagccgaacctgctcgtccgtgcctgcaaccagttgggccagtttctgcagcaccgcgagaccaacctgcgctacctggccctggagagcatgtgcacgctggccagctctgagttctcccatgaggctgtcaagacgcacatcgagacggtcatcaacgccctgaagactgagcgggacgtgagcgtgcggcagcgggccgtggacctcctctacgccatgtgcgaccgcagcaacgccccacagatcgtggccgagatgctgagctatctggagacagctgactactccatccgagaagagattgtgctgaaggtcgccatcctggctgagaagtacgcggtggactacacctggtatgtggataccatcttgaacttgatccgaattgctggtgattacgtgagtgaagaggtgtggtaccgagtcattcagatcgtcatcaaccgggacgacgtgcagggctacgcggccaagactgtgttcgaggctcttcaggctcccgcgtgccacgagaacctggtcaaagtgggcggctacatcctgggggagtttggaaacttgatagctggagacccgagatccagcccgctgatccagttccacctgctgcactccaagttccacctgtgcagcgtccccacccgcgcgctgctcctgtccacctacatcaagttcgtgaacctcttcccggaggtgaagcccaccatccaggacgtgctgcgcagcgacagccagctcaggaacgcagacgtggagctgcagcagcgtgctgtggagtacctgcggctcagcaccgtggccagcaccgacattctggcgaccgtgctggaggagatgcccccattcccggagcgggagtcctccatcttggcaaagctcaagaagaagaagggccccagcacggtgacagacctggaggacaccaagcgggacaggagtgtggacgtgaacgggggtcctgagcctgccccagccagtaccagcgccgtgtctacgccttctccgtcggcagacctgctgggtctcggggctgccccccctgcccccgcgggccccccaccctcctccggcggcagcgggctgctcgtggacgtgttctcagactcggcctctgtggtcgcgcctctcgctcctggctccgaagacaactttgccaggtttgtttgtaaaaacaatggtgtgttgtttgaaaaccagctgcttcaaattggacttaagtctgaatttcggcagaatttaggtcggatgtttatcttttatggtaataagacctccacgcagttcctaaactttaccccaacactaatctgttcagacgaccttcagcctaacctgaacctgcagaccaagcccgtggacccgaccgtggaggggggcgcgcaggtgcagcaggtggtcaacatagagtgcgtgtccgacttcacggaggcgccagtcctcaacattcagttcaggtatgggggcaccttccagaacgtgtctgtgcagctgcccatcactctcaacaaattcttccagccgacagaaatggcttctcaggatttctttcaacgttggaagcagttgagcaatccacagcaggaagtgcagaacatcttcaaagcaaagcacccaatggacacagaagtcaccaaagccaagatcattggatttggttctgcacttcttgaagaagttgatcctaatcctgcgaatttcgtgggagctggaatcatccacacgaaaaccacccagattggatgcctgctgcgcttggagccgaacctgcaagcccagatgtaccggctcacgctgcgcacaagtaaggaagccgtttctcagagattatgtgaattgctctcagcgcagttttagtcctgaggatggaagaccaggctcgtgtgtcttgtgttgtcttcgtctgtgccgtttgtcttcgtggccatcctgcagatgagcaccgtgtccagtgccacagcacaaggcgcctccccgccccgccgccccacacctctcccctttgggctggacgggaacacacgtgtgtggctcaggaggaaaagctcagcctggactgtggcagccacggcagaaggtggatcttgggatcaatttttataaaaatcgagacagttctgtggttaaatctacaaattaaagggaaattagaagttggcgtgaacgtggcgtttgtgggagtgtcactgagatggcccgtgctgccgcccaccccgcctcggagcctctgggagcagcagtgccactgtgcatggcgtgggctgagccttggtgtgtggccgtcctggtggctgcacacctggcgtcgtcctgggcccttgggaggagcacagctgaccctggttttgctgcagtcccagctggactgttttcccaggcaggattttaatctagaatttagaaacatttgtatttgtaatgacttctggcaaaagcacgtgtcctggccggatgtaactgttctcctttcccagctcctgtttgtgaagggcgtctgttatgctcctgcagtcgccgaggccttggatgtgcagccaggggaggagcgtcctgccggccccgcagggcccccaggactccagggtaaagtgtgggccggtggcgcaagactcagaggtgtgctcgtctctttcctgtcagagtgggcgtccccaggccacggtgcaggcctgagtccttccaccggccccgtccagtcgtccctggaggggctgtggaggagggacgcctctgtgtggtcaggaagtgaaggggccattggccgcatgccatgtgccacctgcggcttgtgtctcacctgtcatctggactcagcacccaggctgcacgtctgacacctgagaggcgagagagtggggccggcctaggagccaaggctggggccttgcgctctgtccccaggatggtggccttgtttgtcctaaacacacccagcacaggttctggcttcctgacatgctgtggaggcagggagggtgggtggccacatgtgcttgagggttttcaccctggccctcagttgcctgctgtgcgggtccctggggcagctgcaggggctcatggacccatcagggtctccacagctcccctgcagtgtgtgcaccccacaatgtctgcggctcttcttccggcgtgtcgggctttgatcacagcatagccacgtcagtggcgtgcgcctctcgcacaggccattctgggtctggtggtgccaggtgccgtgacacgccgtgctgggcttgtgctgcagctgggtggtgtggccctcattctcatgttccagctgctgggcagtgctctgcctgtgtgctgcgcctgcaggctgcgtgtgctgccgtggatctcctgcatcccttgacccctcccgccatcagaggaaaggctgctccccgaggcaccgcttccctgtgcggcgctgcagaggggccctcagtgtggcactcctcgtcaaagaaaaataaaggctagaactgca

SEQ ID NO: 282 - DNA, 549 bp, HOMO SAPIENS
gggtgtagactttaacatctttttggggaagacacagttcaatccgtaacagatgttaagtcctttcctctcctaaatagtgtctcgtaagtaggaaagtttgacatagcacattgtagtgccactaaaatggtagttttaaaagaacatgacaatatatttataataccacatttaaaattcattttctaatactggcttatgtctggggagattttattttaaattaactaagtttctaaaatattaatagaattttgggttgtaatggtttcaaactttttcttcaaataataagtaagtgatgacaccaactgtgtaaagttattcaaaacccagtgcttagatctggctttatgtctgaacttccattaataaaatgtagacttgtaaaatgtggactcctctataagatcttgaaatgtccatcagaatactgtttaaattgttgcaagagcaatctgacagtggaatatctgtacatttcatatttatgtaaaaattgtggttttaccagtgttaatacacatcttgtgactagggatttct

SEQ ID NO: 283 - DNA, 2010 bp, HOMO SAPIENS
gtgctgccgcgggtcacgtgctgcggaggcttggggaggggcggcgaggcggggtttatagcccgggcgcccgcgggccccacgctttgaccgggtcgtggcagccggagtcgtcttcgggacgcgcctgctcttcgcctttcgctgcagtccgtcgatttctttctccaggaagaaaaatggcatccgttgcagttgatccacaaccgagtgtggtgactcgggtggtcaacctgcccttggtgagctccacgtatgacctcatgtcctcagcctatctcagtacaaaggaccagtatccctacctgaagtctgtgtgtgagatggcagagaacggtgtgaagaccatcacctccgtggccatgaccagtgctctgcccatcatccagaagctagagccgcaaattgcagttgccaatacctatgcctgtaaggggctagacaggattgaggagagactgcctattctgaatcagccatcaactcagattgttgccaatgccaaaggcgctgtgactggggcaaaagatgctgtgacgactactgtgactggggccaaggattctgtggccagcacgatcacaggggtgatggacaagaccaaaggggcagtgactggcagtgtggagaagaccaagtctgtggtcagtggcagcattaacacagtcttggggagtcggatgatgcagctcgtgagcagtggcgtagaaaatgcactcaccaaatcagagctgttggtagaacagtacctccctctcactgaggaagaactagaaaaagaagcaaaaaaagttgaaggatttgatctggttcagaagccaagttattatgttagactgggatccctgtctaccaagcttcactcccgtgcctaccagcaggctctcagcagggttaaagaagctaagcaaaaaagccaacagaccatttctcagctccattctactgttcacctgattgaatttgccaggaagaatgtgtatagtgccaatcagaaaattcaggatgctcaggataagctctacctctcatgggtagagtggaaaaggagcattggatatgatgatactgatgagtcccactgtgctgagcacattgagtcacgtactcttgcaattgcccgcaacctgactcagcagctccagaccacgtgccacaccctcctgtccaacatccaaggtgtaccacagaacatccaagatcaagccaagcacatgggggtgatggcaggcgacatctactcagtgttccgcaatgctgcctcctttaaagaagtgtctgacagcctcctcacttctagcaaggggcagctgcagaaaatgaaggaatctttagatgacgtgatggattatcttgttaacaacacgcccctcaactggctggtaggtcccttttatcctcagctgactgagtctcagaatgctcaggaccaaggtgcagagatggacaagagcagccaggagacccagcgatctgagcataaaactcattaaacctgcccctatcactagtgcatgctgtggccagacagatgacaccttttgttatgttgaaattaacttgctaggcaaccctaaattgggaagcaagtagctagtataaaggccctcaattgtagttgtttccagctgaattaagagctttaaagtttctggcattagcagatgatttctgttcacctggtaagaaaagaatgataggcttgtcagagcctatagccagaactcagaaaaaattcaaatgcacttatgttctcattctatggccattgtgttgcctctgttactgtttgtattgaataaaaacatcttcatgtgggctggggtagaaactggtgtctgctctggtgtgatctgaaaaggcgtcttcactgctttatctcatgatgcttgcttgtaaaacttgattttagtttttcatttctcaaataggaatactacctttgaattcaataaaattcactgcaggatagaccagttaaaaaaaaaaaaaaaaaaaaaaaaaaaaaaa

SEQ ID NO: 284 - DNA, 2554 bp, HOMO SAPIENS
ggattggctgttcggagcggcgaggggcttggcgggagcttccagtcgctcgagagcggagagcggcaccatggccccgcgggggcggcggcggccgcggcctcacaggtctgagggcgcaagacgttcaaagaacactttagaaagaacacattccatgaaagataaagctggtcaaaagtgcaagcctattgacgtgttcgactttcctgataattctgatgtctcaagcattggcaggctgggtgaaaatgagaaagatgaagaaacttatgagacctttgatcctcctttacatagcacagctatatatgctgatgaagaagaattctccaaacattgtggactgtctctctcttcaactcctccaggaaaagaagcaaaaagaagttcagacacttctggaaatgaagcaagtgaaatcgaatctgtaaaaattagtgcaaaaaagccaggaagaaagctcaggcccattagtgatgactctgaaagcattgaagaaagtgatacaaggagaaaagttaaatcagcagagaaaataagtacacaacgtcatgaggttattcgaaccacagcgtcttcagaactttcagagaaaccagctgagtctgtcacttctaaaaagacaggaccccttagtgcccagccctctgttgaaaaagagaacttggcaatagaaagtcaatcgaaaactcagaaaaaagggaagatatctcatgacaaaaggaagaaatcaagaagtaaagccataggctcagatacttctgacattgtgcacatttggtgtccagaaggaatgaaaaccagtgacatcaaggagttgaatattgttttgcctgaatttgagaaaacccacctagagcatcaacaaagaatagaatctaaagtttgtaaggcagccatcgccacattttatgttaatgttaaagaacaattcatcaaaatgcttaaagaaagccagatgttgacaaatctgaaaaggaagaatgctaagatgatttcagatatcgaaaagaaaaggcagcgtatgattgaagtccaggatgaactgcttcggttagagccacagctgaaacaactacaaacaaaatatgatgaacttaaagagagaaagtcttcccttaggaatgcagcatatttcttatctaatttaaaacagctttatcaagattattcagatgttcaagctcaagaaccaaacgtaaaggaaacgtatgattcatccagccttccagctctgttatttaaagcaagaacacttctgggagccgaaagccatctgcgaaatatcaaccatcagttagagaagctccttgaccagggatgagaagagcagtctactaaaatgtgcctataggaagactagtctcatgctgttaccttctgaaactgtacctttataaatcaattgttttgcaaagaagttatggcctacttagaatctaaaatttgttattcaaattaaatggctgtgaacaatgttaaatagcatcagtttgtccaatagttttaaaggccataatcatcttttctggttaatatcttgagtaattttaaaatgttgacaccttaatcggtcccaggtatgagctataataaacttgtaaaattaagttgatgtgaacataattttgattaattaataaggcgatttctcctgaatttacaccaaagctaatttttaatgaaattggtttacagaagtaaaaaacaaaaattggaaagcaaagtaataaaacttagtttatataaacaggttgaatgatatatttatcaaatctcacagacatcaggcaaattatagcctggtgacaaaagtgttcatagtgaattagttactcttgtaatacttctataattagttcatcaggaatttcatccacttcactgttataactgagaagactgttctctgcagcttcagctaattcagcatcttcagtagcttctaaaaaataagcatcatcaatgccattatcccagacagcatcagcagatgcacctgttgacagcctgctaggtgatggtttatgaggattctgggtttcattgctcctagtttcatctgcttcatctgttgtaaactcttcttcctttatttcagtggtgaagggatagagagtgggataggaaaatatttactcaggatatgtgatttaaccttatactctatgttgaagtaaggtattaagtgacagatactaaagtgaatatgcaggaggaatgctgtctccgatatctcaccgtgggaatgagtgcactgattcaaacgttgctgcactgaagctcagacacacttgaaactccaaatttgaaattacctacagttctgtgcacatacttttcaatactccccgacggaagagcaagggtggatttaattttttaacaagtggacagtccagctgaagacaaatcagaagataaatttgctatcttgacaatggacttagtacccatgctttaaattttaaagtatttagcaaatcgtaaacatggattgaaaaaagattaaaaacagttgccaaaatatgactggattgtatattaaaaa

SEQ ID NO: 285 - DNA, 8210 bp, HOMO SAPIENS
gctagggacgggagcgcgcgcgggagctagagagcagtggtctcggcgctcgtccggcccgcagcttcgggtcctcaggcggctgttgctccggaacgggtggttggggaggggggggtggggggactctagacagctgaggcgcgaaagcgatgagtcctcggctcttcctcctccttctccgggacccgctctctgcctccctctccaacgcccggatgatctgagccgcgagggcgccgacagccgggggcccggacgcagcccggctcctcccctcctccgccccttccccagcctgacctggcccgccgctgcagcggtgacccctcccccggctgccgccgtcgccgccgcggtgaccccctccccggctgccgccgccgccgcctcggccgaccagggacctgcccgcctgcggctgctccggacctagaggatcaagacataatgggagcatttttagacaagccaaagatggaaaagcataatgcccaggggcagggtaatgggttgcgatatgggctaagcagcatgcaaggctggcgtgttgaaatggaggatgcacatacggctgtgatcggtttgccaagtggacttgaatcgtggtcattctttgctgtgtatgatgggcatgctggttctcaggttgccaaatactgctgtgagcatttgttagatcacatcaccaataaccaggattttaaagggtctgcaggagcaccttctgtggaaaatgtaaagaatggaatcagaacaggttttctggagattgatgaacacatgagagttatgtcagagaagaaacatggtgcagatagaagtgggtcaacagctgtaggtgtcttaatttctccccaacatacttatttcattaactgtggagactcaagaggtttactttgtaggaacaggaaagttcatttcttcacacaagatcacaaaccaagtaatccgctggagaaagaacgaattcagaatgcaggtggctctgtaatgattcagcgtgtgaatggctctctggctgtatcgagggcccttggggattttgattacaaatgtgtccatggaaaaggtcctactgagcagcttgtctcaccagagcctgaagtccatgatattgaaagatctgaagaagatgatcagttcattatccttgcatgtgatggtatctgggatgttatgggaaatgaagagctctgtgattttgtaagatccagacttgaagtcactgatgaccttgagaaagtttgcaatgaagtagtcgacacctgtttgtataagggaagtcgagacaacatgagtgtgattttgatctgttttccaaatgcacccaaagtatcgccagaagcagtgaagaaggaggcagagttggacaagtacctggaatgcagagtagaagaaatcataaagaagcagggggaaggcgtccccgacttagtccatgtgatgcgcacattagcgagtgagaacatccccagcctcccaccagggggtgaattggcaagcaagaggaatgttattgaagccgtttacaatagactgaatccttacaaaaatgacgacactgactctacatcaacagatgatatgtggtaaaactgctcatctagccatggagtttaccttcacctccaaaggagagtacagctcaactttgttgaaacttttaacatccatcctcaactttaaggaaggggatatgacatgggtgagaatgattacatcagagaacttcagcagtacaacagctagcccagaactgatttttttttttttttttgtaaatttgagacttatgtaagcgtgatttcaaaccataattcgtgttgtaaatcagactccagcaatttttgttgtatgattttgtttttttgtaaagtgtaattgtccttgtacaaaatgctcatatttaattatgaactgctttaaatcactatcaaagttacaagaaatgtttggcttattgtgtgatgcaacagatatatagccctttcaagtcatgttgtgtttggacttggggttggaacagggagagcagcagccatgtcagctacacgctcaaatgtgcagatgattatggaaaataacctcaaaatcttacaaagctgaacatccaaggagttattgaaaactatcttaaatgttcttggtaggggagttggcattgttgataaagccagtcccttcatttaactgtctttcaggatgttccttcgttgtttccatgagtattgcaggtaataatacagtgtattcataagaatctcaatcttggggctaaatgccttgtttctttgcacctcttttcaagtccttacatttaattactaattgataagcagcagcttcctacatatagtaggaaactgccacatttttgctatcatgattggctgggcctgctgctgttcctagtaagatattctgaattccattttatcaataaagcttgatttaacaaacaagaaacttaatcatgtatgtgtaattcctcttttaccctggccttttaaaacactgtgccgttgtaatgagacgtttctcatagggaaagatgttagtctcttttaattggacaacactgtcactcaaggcatagatgaaactttccttccattagaaagactaaaagatttaattcttggttgtaccttaatctattttttaaataggtttctttcaggctgcttatttttcattaagatgtgtatcagcttggatttgcctactgtttaattaaaatatttattgtcaaagtttgacaatctaacactctatggtaggggtgtgtgtgtgtgtgtttgtgagtgtgtgtttgcctgtgatttttaattggcccatgtctttagaatccaagtggttaagatgtatttgtgatttgaaatatagcatgttgataatatttagctgttggcctttacaaataactttcaaagcttaaggaattgtagatataaaaataacctaatttaatttaggcttaaattcctctgattaagcatgtgaaagtaagttttaaaatctgtcgcattgaaaagattactgttccgtgcccttctgtatttttgtctctttaggttgaatattgtatttatcaccatgtaatcattcagtaggcagattcccactagaaaactgttgaaatgtaagactaaaatacaacattgaatacaaaatcaaaattttgtgtataaaaaccagtatagtccattttgttatatttgttttttccctaacttggaaatatacatatttgtatatatagccttaaaattaatgtaaagttaggggagtagtggggaaagtaatgtgaaatgtctcagatttaagtagttaaataccagcaaaatcttttcattatccctcttattttgtgaggtgattaaatgtaacttaattgtatttaatttatatcttattccagcatgaatgaggaaaaactgaagtactatttatatttagaaattcatatcagttgaaattacagaaccaattccatacttacaataaatacttaatgtctaaatctgtggtagagtgcgaagtatgataatgttctaagttatggctttgcaagcatctaaatgtgcatttaatgaataccagtgcttctagtatagactaattaccagacatactggtactgaaagctaaatccctattataacaaaccagttccttaatattttaagtagactgacaactttagttccagaaattgcaaaactttgaactggactgtgtaatcttttgagatgcaaaacttaagtcacaagtagagtatgtgatggaaagctgtatttcaaaccataacagcatatttagagccttttttttttgagtctttaaacaagagaaaattaaaatattcctgtcaaaattattagtattgaaattaggcttggacacgagagagaaccgtatttgagtgatgtgagaagactaaatcttttccacatgagtcagcactgccatactaataatttttttactataaaaatacaggaaggaagtatacattataacagcagactgtgtgtgttcctgattcctggaggtaatagtggggggaaaccaaccatactttttaaaggcacttttgcacctctattgtgcacttcattcttgtaccacttaaattcttcacccccatcccctttttttgtgctaattagcatctcagggcaatgcctcaaaaatgtttgatgtgttctgttctttggagggaaaaagttcttatgtgatgataatatagtactcaaaatatacttttatcatttaaatgtcttatttgctgctatgaataggaaataacattttgtatagcaggctctgttttaccctaacattaaaaaatttcactgatctttctttcattaacagggtagaatctcctaatttccactttcttgggaatatacttttatagacaatagaagcagttctcaatattagcatatactttaaaaaatcaaagtgataacttaattcagctttggaagtatctcaaacatatttttactttatagtgcattaacttgcttctagagtacttaatgcaactgctctagccacttaattttttatactaatctcaacattaagaaatttggattaagtaataaattagttatgtaattcaagtaatctgaattacagcagtacttttagtgatcattcataggactatatattaacccagctaataactcagtttttttacaaaatgtttcgagtattattggtaaaacactgttctaggctaagcacattgggactgtaaagaaatgagtagatccttggcttcaagtttacatctggacaatttataatctagtgtatgttagtattataactggatcactcatcaaaaaatatatatatatatctattgcccacctgctatctaccaggtacttagctgatcaaggcaggcccctgccctaaagaccttgtttatacttcctttactcacctgaaaactgttctccagtttattttcttctctctaaagttaaagagtaattcagaagaaaattttgcttagcataagaataaaattggactgaagaggcttaagcccattcagtatccttgattgcatttatccaacggcctttattcttcctgctgacagcagtaactcagaggaataggtagtagatttctgaaaattatccagccatggaaatgtaggtggggtttgagtttaaggcatttaaaaatgtaaatatctctagctaaatttatcttaagtagaactctgtgtttttgtaacacactgccagtgttaatatcaaattttagccaaattattactatgtgttttaatattttaaaataatttcactgcccatctttactggacaaactcatttggagttcaacttgtgatttctgaaagaactgatgaaattgggtactgctttttttctccatttttcgttttgttttaattttgaatttcatggtatatacttttagttcaaactcagctgtttgtacagtattgtattaggatttggtattagaaaagatgtgtaaatatcttagtatataattgtttctcatttgaggtttttcttctaagggaccttaaagagttttatatacttttgctcacagaaactgctggtgagattaccattttttgagtatctagtcttctagtttttcttttaggcattaggaagccttctttagagttcaaaattttagaagcctaatttgctcttacttccttcaattatgtgccatgtgttttggtttgtatatgttttaaattgtatatttccttggaatatgcttgaaatatttaagaatacattttcaaaatgtataatactgtattgttttgttgatcagaataataagtctcagttaaatgtttgttattactgatagtcaaaatgctcaatagaaatgatgagaggcattggttccaattcattgtcaaatgaacgttttctaattttgttcacagattctttccctttcgattgttctgtatgttaagatagtggcttctgctctcactgttttcctatttatattactagcaggtaggagtgctaattagaaaaacttagatggtattgaaattacagttgacaacttatatttttatgagatggagaaaaaagattaagttgatataacaacaaagtggactttttttcttccttatcctgcacgaaatattgcccttgtttcctctactttcctcttggtgttttctctttttttcaaacagaaacaggccaattccattttcttgagcaagaaagcttagtgtgttacttcatcaaggccagctaatactgtgttaaaccgggctgaaaatgagaaaacttgggagatggaggaatggggaaatggcagtgggataggtagggaaggattactcttaattgttttaaaagccataggaaagtcttccttgtacgtggctgtaaatttataagaactattgtgtcacataaaccaacaagaatgaacctttgctgcttcagataatttgatttttccagcaaggaaattaataagttactgattcttcagcatagaaacaactgagaagaattaatgcaatgtttcttcactagaaaacccaacccttcatttcttttcattgctccaaaacccagttttcaactaatggttttctcattaaactaaatgtttagaaaagttgtttagagtttttctttttcttttacatagtcctcctgatccagtataagactatttagtaacgtgcatttgtatggtactatctaaagtaagttagattgatgtaagagatcgggtagctgcggaacaaaattagttatatcctaattaggtacagtgaatgacacaaaatcattttagcaatgcttcttaaccttttggggtcacaggcgttttgagactgatgaatcctagggacttatttacccaggaaaatgcgtatataacatacatatctccctaaagtttacaatattgtagtggttcatgggccccctggttaagagcccattctaaagtacaatagggcatcatcccttttcctgcaaagcccaaaagtatatttctagggcatgaaaataacttgagtctattttaaggaattgtttcactctagaggtagataggggacctggctagaatctgacattaaaatatactttttaaaaaatattatatttggggtggggaaagtgattaaaaggtgaaaaaaaaacatagtattcagaagttttggaggttaatgtctttctctaagatttgccactttagaaattcaacagaaaagaggtaaaacagaaatggaatgtatctggaacatttttggcctccatagtgcagatatactatattaacaagtaatacatttatttacctgtcagatctccaggttttaagattttgagctttctagtattaggattcattaaatgttcaattcatttcatattctaaggaattaggttatttacttactaattcaggatgttaaaataacatccaagtcggacaaccaccaccaatgcacacagttaatgagatttctaaaatataataagtacaatgtaacaaacgtatagaattttgcatttgttgccaaaattagatgtttaatgacagcttatttaattcccatttgtgggacttctggaacatagaaaccattatcttacctggttatcccttgactaaatagcatatctgcaggaaaatatcttgtttgtagtgatatgccccaatagtgattgatttcactcttgaaatgagttatatcacttaatttgtataaatgttatgagtggagagacatgtacatgttaaaagcatgttgcattatatattcattttttaaactctataaatgttaagaataatataattgcagaaatatttttcttaaatacaatgtgtaacaaaattctccgtagcaactcacccactttgcagtttatgtgatccacacttttaaagaaattccataaatgtatattttgtattatgtattatttcctggtccaaagaaaatatgtgaattcagttctaactttaagaatgtactgtttgttttcaagttcattgaaaaattgcattcagcctgcgaatggttgcagattgtatgttagatgaaaagtagaaataatttctagtttggaaaactggtgccactaaataaacaggcaattacataaaaaaaa

SEQ ID NO: 286 - DNA, 4093 bp, HOMO SAPIENS
aaaggagcagcgccgagaattcaccggagctcggggaggcgaggcgggagccctgagctgaggccgggcagcgcggacccgcgcaggaggaggcggcggggacaccggcgagtccccagcagggcccctgggctcccggaagggtctccagccacctgcccttcccgagaagagagagctctgggccttcttcctgccagtctggtcttcgagtgcgttcaggacagatagaccttggcacaggctgccccgagattcctgcgacgctgtctgttcctgccttctgtggagcatggcacccacaggcttccaggacggatcatagacccgagcctccaggagggcgccctgtgcggctcactgcgcggtccctctcagctcccctgccacccagcctctgaggccggctcctgtcccggaaatgccctcgggcacctggatgaggccatcccagagcgggacccaactgtgccacccaccaagcctccccctgcgccccccgtgccctcgcatgtccggctgccagggcagactgtagaatgtctgtgccccagatccacgtggaagaagtgggtgcagaagagggggcgggagcagccgcaccacccgatgaccacctccggagcctgaaggccctcaccgagaaactgaggctggagacccgcaggccctcctacctggaatggcaggccaggctggaggagcatacctggcccttcccgaggccggctgcggagccacaggcgagcttggaggagggggagcgtggggggcaggagcccttgctccccctgagagaggctgggcagcaccccccttctgccaggagtgccagccaaggtgccagacccctgtccactggcaagctggaaggctttcagagcatcgatgaagctatagcctggctcaggaaggaactgacggagatgcggctgcaggaccagcaactggccagacagctcatgcgcctgcgtggcgacatcaacaagctgaaaatcgaacacacctgccgcctccacaggaggatgctcaacgatgccacctacgagctggaggagcgggatgagctggccgacctcttctgtgactcccctcttgcctcctccttcagcctctccacaccactcaagcttattggcgtgaccaagatgaacatcaactctcggaggttctctctctgctgaggagccctcagactgggcggaggggctggagcggagggcttgggctggaggggtgtcagaggaagctgaggccaagttactccagtgggtctcccggaggcaggggtccctgggactggcgactcaagggccccaggacctattcagtggtgctctcccacccaggggccctgggtgtggatgccagtgtctctgtgactggctcttgcttactacccaaagagctctgcagaagggccgctccaaccaagatgttaaaggagacctgggttcccaccataatccatccctccacggtcacgttcctgtttcctggaatcactggtgctatgaactgggattcccaaagggaggccccccaacaaagctgtcatttttgcagaaggctgtcccgcaagggccttgggggaaattaggcatgtcagatgtgcctgtctcacgtgctgttgctgtcctctaagtattgtctcaaattcaccctaagtacatgactcagcaacattgacagggagctactaggaagggaaaatcgaaaggcatgacaaatgggcacttggggacgcagccccagtggctggcagccagtgtctctggtgagcctgacactataaggctgtgtaaattgtaaattctggcgtgtgctgggacatgtgatgggggcactagcgtagcttgggtgcaacaagcacagatgtccccattgtctcccctggccacatgcatctccaaagagcctcttcactgccacccacaccccagggtgacagcctgggagaccactggtgactgaaccaggcaggtcctgaaagcattttccataactgaattctcctgcaggggcgtgaccggggcctcctggtggattctggtggtgtcaccttactgccctctctggaaagacaatctagggagcccagaggcccatcctgagcctcctctgagattttgtgcctgacctaaacaactagttttaataagactgttactgatgtgttgttcacttgttagtaactgatttttgtccaaatgcggaagccacttgtgtaggtcaactacagtgcgtaggatttgattttaagagtttctccctcccaacaggcttgaggatcagcaagttaagaccccagcaggttagggaggtcagtctggggtcatacggcatggcaggggtccctcggccagacccgtagaatcctgagataaggagtgtttctgacctttggtgtcatctagtcgagtcctctcattagtaaaggagcaaagtgaaacctgggggaggagaaggacttccctcaggttgcacagctgtttaggctatagaatattgatgtgtgaaaccattattgataatgcctagtagatcacatgtcaatgaacttgaaccccaaagatggtcgtgatgctttgccaaacccgcacactgccaacccctctactctccacctcagcccccacccacatctcccagagtattgcaattcagaacatttgggtcaaggtggagcaaggcactgacagtggccccacagggcatgtgtcactaatcactgtcccatggtctacgcacggcatctggctgctctgtctactgtgacttcttcctgtgtaatctcagtggggcccgtgtccacccacacatcgtgacccacataggggagaggttgcttttcttttgtgggctgagagtaggacaatgcaaatgaatgatctctagtagacagaaaagaacttggtctcttttttaaaatttcaaagagccagaagttctatgcctccttcaaagtaggcagaacaacgcagccaagatctactgtctgccatgctctgtgcaatgaagtctgcaggcctgaggaccatgtactgctgtccttcctcagagctctgcacaaacactgccaagtcctgaagacgcattcctttcctgccaacctctttccagataagcccttgaggtctcgggctgacctacacacacacacacacacacacacacacacacccccacacacacacacacgacagagaacatgccataaacatccttgaacccatgcaggaaagcccatcccatattctgaaaaaatgccaaattaggtttttctttctttttggaaatcagtcattacagtaaccgaaaccattgggttcagcgaaaatggaaagatttagctgaatgtagtcagtccaattaagttggatgcaactgagtgatttagttgcttgggtaacccagtgcttgcttgctttcttcattctctgggtggaaactaagatcaagacacatgtttggggataagttaaatgtctgagctattttgctcggtttatcctaagagaactttattatgggatgaggaggtgacccaagatgagaagtggagggggacagcgatgttttctaaacatcgtccagtgttgactggcttccttactttgcacagtgaacacaactaaccacattaattcagctttgtgaagtccctgctctctgtgggtctatgagtcagcagcaacattggcctaacctccgtcccagcctcctggctcaccacatgtgtacagtgctgtttgcagttgtactcattatccatccatctctctgccatccccaagcatcgctgggtgtaaaacgcaaactctccaccgacactgccatgcgtggtcatgtcttgatgccttcaggggctcagtagctatcaaagaggcctggagggcctgggcaggcttgacgatgcctgaccgagttcaagacccacaccctgtagcaataccaagtgctattacataatcaatggacgatttatacttttattttttatgattatttgtttctatattgctgttagaaaaagtgaaataaaaatacttcaaaagaagatatccatataaaaataaaaggagagaaaaat

SEQ ID NO: 287 - DNA, 2636 bp, HOMO SAPIENS
gcaaagccatcccggcggctaaggagagcgggcaggcaaggagattccgggccagggtcgcggcggcagtcggcaagcgttcgattctctggcgttggatcgcgagcggtgtctgcttgtcccgccgagggctcccaggacagggcagggatctagggggtttgcgcacctgctttttaatgccccgcccccccttttttttttaaagtggagggggtgaaagtgagggaggagaatggacagaatactgactggaacgttaattcgagcatttcatatgcgaagagcggaataacagttccgtattcttctttcagtttctccattagattagcttcattttcgaatgctccgttttgcatgcttaattttgaaactagcccgtggtttggcagaatttgactgaattcaggggtgagagtttgatccagtccaagtgtatttgaatttgagcacgcagttcaaccagtgtttacaatggaatttctgaagacttgtgtacttagaagaaatgcatgcactgcggtttgcttctggagaagcaaagttgtccaaaagccttcagttagaaggattagtactacctctcctaggagcactgtcatgcctgcttgggtgatagataaatatgggaagaatgaagtgcttcgattcactcagaacatgatgatgcctatcatacactatccaaatgaagtcattgtcaaagttcacgctgccagtgtaaatcctatagacgttaatatgagaagtggttatggagctacagctttaaatatgaagcgtgatcctttacacgtgaaaatcaaaggagaagaatttcctctgactctgggtcgggatgtctctggcgtggtgatggaatgtgggcttgatgtgaaatacttcaagcctggagatgaggtctgggctgcagttcctccttggaaacaaggcactctttcagagtttgttgtagtcagtgggaatgaggtctctcacaaacccaaatcactcactcatactcaagctgcctctttgccatatgtggctctcacagcctggtctgctataaacaaagttggtggcctgaatgacaagaattgcacaggaaaacgtgttctaatcttaggcgcttcaggcggagttggtacttttgctatacaggtaatgaaagcatgggatgctcatgtgacagcagtttgctcccaagatgccagtgaacttgtaaggaagcttggtgcagacgatgtaattgattacaaatctggaagtgtggaagagcagttgaaatccttaaaaccatttgattttatccttgataatgttggcggatccactgaaacatgggctccagattttctcaagaaatggtcaggagccacctatgtgactttggtgactcctttcctcctgaacatggaccgattgggcatagcagatggcatgttgcagacaggagtcactgtaggttcaaaggcattaaagcatttctggaaaggagtccattatcgctgggcatttttcatggccagtggcccatgtttagatgacattgcagaactggtggatgcgggaaagatccggccagttattgaacaaacctttcctttttctaaagttccagaagccttcctgaaggtggaaagaggacacgcacgaggaaagactgtaattaatgttgtttaaataaaaatgcagtttagtgattgttgacgttcttatttggtgagtgcctgtgagcccaaatttttttctagccatccctttcaaacatttttccagattagattatacattccatgatacaagctttaaaaaataaacacaccattttggccagtaattgatataaaaatatcagcacttggatttgtctgtagtcagtagaaattcgaagttttttcaagctgttccttcacactggctttgcaggttgttgtggcaccttctgttttactagcttaaactactttattgtcttttttgttttagagacagggtctcgctgtgtcacccaggctggagtgcagtggcacaatcacagctcactgcagccttgaccttaagcgattctcctgcttcagcctctcaagtaggtaggactacaggtatgcatcaccacacccagctagtttttttgtatttttagtagagacagttttgccatgttgcccaggctggtctcaaactcctgggcttaagtgatccaccatgtcagtctcccaaagttctgggattacaggcgtgaaccaccctgctgggcctgatcgtcttaatgtacaatactaaaactttcagtgtatagatggatgttggcatgaagagataatttaaagctggttccttcttgaattcatcactgagcagctttctaactgccaaggtttccttttttgttcctccaccataatgtggtcaccacagctcttaaagttctaaatctcttagtgtcatatataaaaatctgcctggtgattcatttgtttatgctcttaatattgaaaggtgagagcagagtttctaactttttaaaacccttacatcttgcataaggattaggcctgtttcggcaattgaaacatgcttctctgagggcttttccatggaaattgcagccttccaatggagcccaaagcttgccactttgatgtcaa

SEQ ID NO: 288 - DNA, 5999 bp, HOMO SAPIENS
agaggcagagggaggagcctcggggggaaggagagggaggggaccgtcaggaagccgcgaacgccgccgagtgtctgcacacctcgctctgcctgccatggctggttaaagaaccatccggatcgcagcgcggggggagggccgggtggggggagcagcggccgcgcgtgaggccgagggaggggcggcggcgcgagcggcggcggcggcggttccagcatgaagaggagagctggcctggggggcagcatgaggtcagtggtgggcttcttgtcccagcggggcttgcatggggaccccctgctcactcaggactttcagaggagacgcctgcggggctgcagaaacctctacaagaaggacctcctcggccacttcggctgtgtcaatgccattgaattctccaacaatggaggccagtggctggtctcaggaggagatgaccgccgggttctgctatggcacatggaacaagccatccactccagggtcaagcccatacagctgaaaggagagcaccattccaacattttttgcctggctttcaacagtgggaacactaaagtgttctctggaggcaatgatgagcaagttatcctccatgatgttgaaagcagtgagacattggacgtgtttgctcatgaagatgcagtatatggcttgtctgtgagcccagtgaatgacaacatttttgccagttcctcagatgatggccgggttctcatttgggacattcgggaatccccccatggagagcccttctgcctggcaaactatccatcagcctttcatagtgtcatgtttaaccctgtggagcccaggttgttggccacagccaattcaaaggaaggagtgggactctgggacattcgaaaacctcagagttctctcctgcgctatggtggaaacctgtccctccaaagtgccatgagtgtacgattcaacagcaacgggacccagctcctggccctgaggcgacgcctgccccctgtgctctatgacatccattcccgcctgcctgtgtttcagtttgacaatcagggttacttcaactcatgcaccatgaaaagctgctgttttgcaggagatcgtgaccagtatatcctttcgggctctgatgacttcaacctgtacatgtggagaattcctgcagatccagaagcaggtggcattggtagggtggtcaacggagccttcatggtgctgaaagggcatcgatctattgttaaccaagtccgatttaatccccacacctacatgatctgctcttctggtgtagaaaagattatcaagatctggagcccatacaagcagccaggatgtactggagacctcgacggtcggattgaggacgattcccgctgcctctatacccatgaagagtacatcagccttgtgctgaacagtgggagtggcctgtcgcatgactacgccaaccagtcggtccaggaagacccccggatgatggccttctttgactcactggtacgccgagagatcgagggctggagctctgactcagacagtgacctcagtgagagtactatcctccaactgcacgctggggtcagcgagcgctcaggctacactgactcagagtcttcggcctcattgcctcgctccccgcctcccacagtagatgagtctgccgacaacgccttccacctggggcccctgcgggtcaccaccacaaacacagtagcctcaactccaccaacacccacgtgtgaggatgcagcctctcgccagcagcgtctgtctgctctgcggcgctaccaagacaaacgcctcctggccctttccaatgagtccgattctgaggagaatgtctgtgaggtggaactagacacagatctctttccccggccacggtcacccagccccgaagatgaatccagcagttccagcagctctagcagctctgaggatgaggaggagctgaatgaacgccgagcctctacctggcagcggaatgccatgcggcgccgacagaagacaacccgagaagacaagcccagtgccccaatcaagcccaccaacacttacattggagaagacaactatgattacccccagatcaaagtggatgacctctcctcctccccaacctcgtcccctgagcggagcacttccacgctagagattcaaccaagccgggcatcaccaacttctgacatagaatcagttgagcgaaaaatttataaagcttacaagtggctccgctactcttatatctcctactcaaataacaaagatggagagacctccttggtgaccggggaggcagatgaagggagagcaggaaccagccacaaagacaacccagccccttcttccagtaaggaagcctgtctaaacatagcaatggcccagaggaaccaggacctgccacctgaaggctgcagcaaggacacttttaaagaagagactcctagaactcccagcaatggcccaggccatgagcacagcagccatgcttgggcagaggtgccagagggtacctctcaggacactggcaatagcggctctgtagagcacccttttgaaaccaagaagctcaatggaaaggccctgagcagtcgggctgaggagccgccttctcctcctgtccccaaggcatctggctccactctcaacagcgggtctggcaactgtcccaggacccagtctgatgacagtgaggagaggagcctcgaaaccatctgtgccaaccacaacaatggacgcttacaccctcgtccccctcaccctcacaataacgggcagaacttgggggagctggaggtggtggcctactcttccccaggacactcagacactgaccgtgataactcgtccctgacagggacactcctacacaaagattgttgcgggtctgaaatggcctgtgagacccccaatgctggaacaagagaggaccccactgacaccccagccacagatagtagcagggctgttcatggccacagtggcctcaaaaggcaacgaattgaattggaagatacagattcagagaattcctcctcagagaagaaattaaaaacatgataaatacaaagggaaaacaaaaagctacaaaagtagccttacaaaaaaaaaaaaattgtttagtgaatacagaggaaaggaaaaacaagtattaaaggcacatgaaaccagggcctgaaattttgtgtctgatgctgctcccttctatccaacattcaacaacgggtctgaatgtctagctggccattggcttgtgctgtgttaagaaaggggaaaaaaaaataacccaagtgactcctttctagtgagacgtgagcgtagtgtgccgcgcaaggctctgtggaagtaaatctttgttgagacgttcgacttgttcttgtgtacgcacaatggcacgtgtgcgcttattgtctcataagaccttccttttagttctccatcagaaaggacctatgaatttgtactttttgccatctcaccctgtttacatgccataggtgttctggtctggatgatgggtgcctgttaaatcaggttgtgctgccagtgagttgtagatttatgctggaagaatggagaatggaaacaggccttcagcccattggctgcgctggagaggaaagcatggttcctttcttaaagaaatcttccatgttttctctaagtaacacttctttattgagcatttaatgtggacatactataaaaaagaatttttaatgctaatgagaggtttagcacttaagatcagattcaagagaatatagattcctgataaatttcactgtttgcaaattgagcagtgctgcaacatgtactgtatgaaggccataaaatagagctagtcatggataacagactttaaccagttaggtgctagatcctaagaggcactcacaaggccagcaggtgcttccttggctcccatgatcgatcgaggcatagtgaaagaagggcaaagacagctttccagagctttgtgctcaggctactaaagtagttgttataggtgtgttaacgaagaagcttagtgaggagcagaatgtggtactatattcatttaactcaacccagaaccattggtcagaattggtgggactggcatcttccctcagacttgcagttgatagaggctgtggtgttctcactagactttgcagagcagtaggcatctcaaggtaacagattcttattgagtaggtctattaggagtcagaaggtgttggggaggagtctctggcttatgactcctggttcccattagtcttaagtcttctggttcccataaaagactcagttttattgaggtagatacaggtttagaagagaaaagagcaacagattttcagcgttgcagtcactcggttatctatgaagggttgtgcaaaacaggaaggtctgggaatgaccagatatcttgttggcataaatgttatgaaaaggcagaatactggcaagaaatgaggaagagagagaaaaacaatataactttcttgagtgcaaaggtgctagacaactaggagcccagctgggattggtgtagggagggccgaacgctgactagtgtggcctcactgccccaggcttcctttcagaggaaggcctgtcctgctggaactggagccaaggggaggctgcctatgaaggcagaagatgtggatgaattcaggcactgggggtgggggggttatttataaacacaaggtggttggtttaagccaaaaggagataccatcctgataagctctgtgaaagagaagatgtgcctggtgtgtgtaatgcggctggggtatgaaaacactgagaaggagatgaaggagtgtgtgtagcatgggggtgtgtacaacttaacacctggacttttactgggggagtgggaaagtgattctgtaaccaacattagaattactttggatttgtaatcagattggttctatgatttgtctttgactattcacagataattgtaaatgctggttttataagcccaagtcattttacatttgcttttccaaaatgtattaaattggaattttttaatcctttatatacaaaaaaaatacgatcactcagtgtgtgtttctcttccccttcttagtcagcacacccagtcctttattttattctattctatttattttattttaataagtacttagcctcttctgacttctcaaaggacaatcggatacatatcttcctgaaaagaagtagttaaagttcccttgggaactagctacttggtagttacaattcccaaatgcagaacttggtcttttcatgttaaaagccttaatctcatttgggtactcaaaagagaaatcagagtttattctggttaacttgagaagccaagaaagatcatttttagcaagtatgccttccatccttggcagaggcttcccagcatcctaggctcagcttaccgggtgataggccccataagacacacacatgagcagggtgagaaatgcttgctttatagctgctccaccctcatctccagagattttgtgtctatggttgtgggtctggaaacctggcaggaaccacttctagagtacctttgcctaaactcttttagaattgaggccccaactttgatggcacatttaatacccaatttcttccataatagatatttttaatagcaggacagatggcactgattagatcaagaactatttggaagtgcctcttatgtttttttcctgcattctgtacataaagttttaagtggcaggtccagatatgtaaaatcatttctctctattttccagctggttttgttaatgattctctaggacagcaggtaaatgagttaagttgttggcttggggcaagtgaagtttgtgactatgcttgatttaataagctgagagtctcttgtttgtctgtcaaggtgccttcctctgctgaagccttacctccttctcacccagtaacggttaactcttctcttgtgtatatgcaaataaacctattattcacttctcaaaaaaaaaaaaaaa

SEQ ID NO: 289 - DNA, 910 bp, HOMO SAPIENS
ccagcgtcaggccagccccggcatgctctgcggccgcccgcggtccagctccgacaacaggaattttctccgagagcgggccgggctcagttcagctgctgtccagacccggatcggcaacagtgccgcctccagacgttctcctgccgctcgcccgcccgtcccagcgcccccagccctcccgcgagggcgccccgggacggaaggatccaccagtctgtcggcgcccgccgttctcgtggtcgccgtcgccgtcgtcgtggtggtagtctccgccgtcgcctgggccatggccaattacatccacgtccctcccggctccccggaggtgcccaagctgaacgtcaccgttcaggatcaggaggagcatcgctgccgggagggggccctgagcctcctgcaacacctgcggcctcactgggacccccaggaggtgaccctgcagctcttcacagatggaatcacaaataaacttattggctgttacgtgggaaacaccatggaggatgtagtcctggtgagaatttatggcaataagactgagttattagtcgatcgagatgaggaagtaaagagttttcgagtgttgcaggctcatgggtgtgcaccacaactctactgtaccttcaataatggactatgctatgaatttatacaaggagaagcactggatccaaagcatgtctgcaacccagccattttcagtttatcatcgttgactctttgcaaaggaaaaactacaagatgttttggattaaccggctgcagagggtcaaggcttctgcttagttttttctagttagtgtttgagttgaagtgttatacatttcttactgccgattgcttattacttaattgttcatgttttcagagttcttgcctattaaaattttattaatttggttaacaa

SEQ ID NO: 290 - DNA, 4256 bp, HOMO SAPIENS
gccgcggcggtggggttggcagggtgtgctggggcctggaggaggcgccgcgcggccagggagccagcgggaggccgcgcctggcaggtttctgaaacagatcgtgagcttcatcaagagaattcaactggaaaaccaagactggtagactctctttttcttcagacaataggcaggagccaggcagagtccagggattcttggaacacctatcttttcttcggaggacactaagttctatttgaagacaaagttcaatatggcaacaggactgatgggacacgaaggagtcgctaccgtgatttggtgacagttcttcaaaacgacagtgtctcaaggaaaggtggacctaggaactcctgaacttttgggttgccttaagtgagaaatcagcatggctcaggcaagtctcctggcttgtgaaggcctagcaggtgtgagtttggttcccactgcagccagcaagaagatgatgctgagccagattgccagcaagcaggccgagaatggcgagcgggcaggtagccctgatgtgctgaggtgctcgagtcagggtcaccgaaaagacagtgataagtcccggagccgcaaagatgatgacagcttgtctgaggcctctcattcaaaaaagactgttaaaaaggtggtggtagtggaacaaaatggttcttttcaagtaaagattcccaaaaattttgtttgtgaacactgctttggagcctttcggagcagttaccacctaaagaggcacatccttattcacactggtgagaagccatttgaatgcgatatatgtgatatgcgtttcatccagaagtaccacctggaacgccacaagcgtgtgcacagtggtgaaaagccttaccagtgtgaacggtgtcatcagtgtttttctcggacagatcgattactcagacacaaacggatgtgccaagggtgccagtccaagacttccgacgggcagttttctctataggcgcaaggggccccgggtggtgggagtgatcagaagaacctgccgaagagcacaccccctctggtctgatggtcccaccaccgccccatgtgaacctgtcccactcctggaggagtggacccaggagaccagaagagtgcatcaggggacagtggccccagaacctcagctctgtaaataatctgagactatgagtatctcggggaagttcttacagcattcctgggtaggggagctagtccctggacccttggctgaggtcataggtggggactcaaggtacaggaccaagactgaagtgtggctcccacaaccttggactccagctggcagctgaaatggaaaagattggggaaggggatttgtttgttctgttcttgtttttgtttatccaaaagcaacttcagcgggtaaactgtggatacaggtaatccagaggcataagagtcctggtccaaagtagggactatagctggtccagctctccccaaaaattgggtttttagttgcagtagctcctcagtgtttcacaatcctgcacttcgcctcctttttgaggaagaataaggtcaggaatggcagctgagcttactttggcttccttatacactgtagggacaaaaggaaaaacggggtggagcagacaagggctggatccaaaaagtggatggcacctcttccttcctcaagggaaaaggaagagttgtgccagtgggtgttgtcatggcccatgtcacattggcacctgatggcatcagctcaaatgcctttaggaggaaacttgggtgagagtggcccatgaagcccttttcttctttttttggggagtcggtcttggagatggtatgtggctacctcgctgccattgactcctaaagtgagacagatgtgttgagcaaggagtcatggaagtcaaagtgggttctctctccttgtgccctcttaggaacaacccaagactggtcccaagttggctaacagctgctcaagaaacaaaggaatctggggtcttctgacatgcctgttgagcagtaggagctgttctccctccccaagtcctatcactgtattcaggtagaggaggtagggaggggtctgtcctttggtcccaaaaaacaagatctcggcttgcttcctgatggccatccctacccaacagagtgtgggggatgggggtgggggtgctgcagagaaaagactaaagaagaaacctaatgtaggttccattcttaaccatattctttgctcctctctgctccaataccaccaccttgtccactcccaaaaaagtaatcgggtgtgtgtgtgtgtgtgagagagagtgtgtgtgagatatgaatgcatgtatttgtatgcttgcaggagatggcatattattgagccaaacccttctctggccctcaccttcagggaggatgagtggaaaatagcctcctcttgcccaaacatgaagggtgcttgaggtctcagcaggagctgaagaacacaatttggggaacagaagggcttttgttttggagggtttttttttttaagatgaattcaacagcctggtggttaggatgtttctaacccaagccagggcttgtgaacatgaattttctaaggtgaaataaaccttttctttctgctaaagaaagaatccttatgggaagttttggggtttggttgacccccactgtaacctgacctgacctgtggcgggtacgggaactgtcttagtaatcatggagactggctgaacctgagtgccaagctgtcagtagggtctgagatgggaaactcctgaaagtatgatttcatttcccagaaaatgtaaagaatggataccagcaatgattcctggctgttacctattctggaggggtggggttggggagggggttgtccatacctctgtggtatgagtatttcagggaaaaagaaagcaggcatggcacccattcgattttccctgacagcatctgagatccttttggggagacgctgaggagtgtttgctgccatgtactcttacagctctatgctgacactcccatttgatgtggtccagaacttagacctcagtccttggatcagccctgtggtccctgcaagcaggggcatctttctgcatgtgagccagcccccttcctgttcaagggttctgctggatctgggcttttcctgtccttcacttctgggatgattcaccccacatcttccagtaccctgtaaaccattttaaaatatttagaaaactatcctcccaaaaatgcttttgaaaatgagagccctctgtccctgccacttacagctagtctctttgggataggggtgtatgtggagagattcatgtaagtctcacatgagtgacctgtgcccctatgtgtactaatgtgtgtactgggtcagaaggtgccctgggttcccacagaccttggtttcctgcctgggtgggtgggagggagggaacttcagagagtatgtgcgaacagccatagcagagccacccctgccaaggacccagtgagggaaactcaggagcaggtggttggttcagttcccgcgctgatgtctggggcagtgcatgtgtgagaagagaggcgcaaagcagtgaaaggagtgatttggcatccagagggcccgggagccccacggataccccagggaagccactgactcacaccgctgcagaggctcctgggcccaatgcccgacccctgctggccagcatggggcctagcactggaagatgcctcaggtgtgtttggagtgggggaaacggaagtagggcacgctctcagagaccaggatagagagtcagggaacctgggaaagagtagtgccagttccgggtaggctgctgcaccaggccctaccagctcaggctataaacagtctgctttgccccaagtcttttccgtccacccccaacagccttgtcatcacttagctactgatcacgcccatggcttgacattggagggttacattagtggagtccgccacagcttcgaaccctctccccagatgccctttgcctctgctgtggccctggggttttatcaactgtccccttcctatcctcctctccaccctgttttttgttttttttttttttaaataatattttgctatgggggaggggaatatcaaatggacaagatcacttttaaatggtagtttttataagatgttataaacttgtatctttttaccattaaagtgcagtgtatgttccttcgtgatatatttaggatatttaaataaaaggaaaatggggcttttctacatacta

SEQ ID NO: 291 - DNA, 2857 bp, HOMO SAPIENS
ccacttccggttgttgtccggccctatatccggtgtccgcccgccctcggctcctccgccgtgatgctgtcccgatcccgctgtgtgtctcgggcgttcagccgctcgctctccgccttccagaaggggaactgccctctagggagacgttccctgcctggggtctccttatgccagggaccaggttaccctaacagcaggaaggttgtcattaacaacagtgtcttcagtgttcgctttttcagaactacagctgtatgcaaggatgacttggttacagtcaaaaccccagcgtttgcagaatctgtcacagagggagatgtcaggtgggagaaagctgttggagacacagttgcagaagatgaagtggtttgtgagattgaaactgacaagacatctgtgcaggttccatcaccagcaaatggcgtgattgaagctcttttggtacctgatgggggaaaagtcgaaggaggcactccacttttcacactcaggaaaactggtgctgctcctgctaaggccaagccggctgaagctcctgctgctgcagccccaaaagcagaacctacagcagcggcagttcctccccctgcagcacccatacccactcagatgccaccggtgccctcgccctcacagcctccttctggcaaacctgtgtctgcagtaaaacccactgttgccccaccactagctgagccaggagctggcaaaggtctgcgttcagaacatcgggagaaaatgaacaggatgcggcagcgcattgctcagcgtctgaaggaggcccagaatacatgtgcaatgctgacaacttttaatgagattgacatgagtaacatccaggagatgagggctcggcacaaagaggcttttttgaagaaacataacctcaaactaggcttcatgtcggcatttgtgaaggcctcagcctttgccttgcaggaacagcctgttgtaaatgcagtgattgacgacacaaccaaagaggtggtgtatagggattatattgacatcagtgttgcagtggccaccccacggggtctggtggttccagtcatcaggaatgtggaagctatgaattttgcagatattgaacggaccatcactgaactgggagagaaggcccgaaagaatgaacttgccattgaagatatggatggcggtaccttcaccattagcaatggaggcgtttttggctcgctctttggaacacccattatcaacccccctcagtctgccatcctggggatgcatggcatctttgacaggccagtggctataggaggcaaggtagaggtgcggcccatgatgtacgtggcactgacctatgatcaccggctgattgatggcagagaggctgtgactttcctccgcaaaatcaaggcagcggtagaggatcccagagtcctcctcctggatctttaggaggaacccacacaccctacaagttgatcatgcaggaactgaaaaccagtcttctccctgtcccctcatgggtcccgggttagcctggtgacaggcagacacatgctgttggcctcaagcaaggaagcagagcactgtgtaaccagcagtcacaggtcttttcttggcgttcctgccaggctctccctctctgcacctgtctcatagcctcgaatatcttaattccttaggcttaagagagagagccttaatggatgctcattcatattcctgcctttcttccatcagctctctgcaaagatgattttgcttttccctagtgctggtatactatagagaaacccctggggaccatgtgattaagttcctatcttttgaaagtttgttctgcagagacttctaggaggatgctgtgcctcccaagctcagagcagcctctgtcctggctgtgcacattctcccttgattccacttgtgtggagggattgaacacaggcaaagaggtgctgctttgcttcttcaatggcaccttcattctccgttgtcattgacttcaagatgcctcttctacctcttccaggaagcacaggccaggggatctgggtgtgtgagtgggaggagagggcagaggtcccctgaggtcatgcattgtaatcatcatagaaggagagcccaggcctgccctcacgctctccatcataggctgacaccaagaagactcgtcttggcacaatctcacacagctggggctgtagcaaccctttccaacccctttgctggttgctgggcctcattctagcaccttgttcttagagcagattctagcacatcatggcagtgggaccaagcgtggtcccgaggaagggccagagcctggtagagactagggaagggaggtctcctctagactgactcacattgccttgagcttttcagttaagttgctgtaagcacctgggctgaggaggcagtttttgttccttcctgcgttatagcggggccttgtctcttcctctgcaggacacagatctggaggacgtggactggggtaggaaaccaccctgagggtgttagtacctagtggtgaaacggatgaggtcatttctaaggtgtgttgcccgtggatctgggcacaatcattggaattccttggagccactgggattcatggctttgtatccaactgcatccaggcctgaggctgctgacgtttgacaccagggccagtagagagtgcccttttgtatcttaagccaagaagtgaggcctgggggtgggggaggggggaaggggtgggagccaatactgagtgcctgcagcatctactactctgtcttcactattcagaacttgtaactaaagtatttaaagaaactgattttaaatgcaaattaaagggcagatattctcaaacaggaaaaaaaaaaaaaaa

SEQ ID NO: 292 - DNA, 5313 bp, HOMO SAPIENS
ggggagcaggcgggggagcgggcgggaagcagtgggagcgcgcgtgcgcgcggccgtgcagcctgggcagtgggtcctgcctgtgacgcgcggcggcggtcggtcctgcctgtaacggcggcggcggctgctgctccagacacctgcggcggcggcggcgaccccgcggcgggcgcggagatgtggcccctggtagcggcgctgttgctgggctcggcgtgctgcggatcagctcagctactatttaataaaacaaaatctgtagaattcacgttttgtaatgacactgtcgtcattccatgctttgttactaatatggaggcacaaaacactactgaagtatacgtaaagtggaaatttaaaggaagagatatttacacctttgatggagctctaaacaagtccactgtccccactgactttagtagtgcaaaaattgaagtctcacaattactaaaaggagatgcctctttgaagatggataagagtgatgctgtctcacacacaggaaactacacttgtgaagtaacagaattaaccagagaaggtgaaacgatcatcgagctaaaatatcgtgttgtttcatggttttctccaaatgaaaatattcttattgttattttcccaatttttgctatactcctgttctggggacagtttggtattaaaacacttaaatatagatccggtggtatggatgagaaaacaattgctttacttgttgctggactagtgatcactgtcattgtcattgttggagccattcttttcgtcccaggtgaatattcattaaagaatgctactggccttggtttaattgtgacttctacagggatattaatattacttcactactatgtgtttagtacagcgattggattaacctccttcgtcattgccatattggttattcaggtgatagcctatatcctcgctgtggttggactgagtctctgtattgcggcgtgtataccaatgcatggccctcttctgatttcaggtttgagtatcttagctctagcacaattacttggactagtttatatgaaatttgtggcttccaatcagaagactatacaacctcctaggaaagctgtagaggaaccccttaatgaataactgaagtgaagtgatggactccgatttggagagtagtaagacgtgaaaggaatacacttgtgtttaagcaccatggccttgatgattcactgttggggagaagaaacaagaaaagtaactggttgtcacctatgagacccttacgtgattgttagttaagtttttattcaaagcagctgtaatttagttaataaaataattatgatctatgttgtttgcccaattgagatccagttttttgttgttatttttaatcaattaggggcaatagtagaatggacaatttccaagaatgatgcctttcaggtcctagggcctctggcctctaggtaaccagtttaaattggttcagggtgataactacttagcactgccctggtgattacccagagatatctatgaaaaccagtggcttccatcaaacctttgccaactcaggttcacagcagctttgggcagttatggcagtatggcattagctgagaggtgtctgccacttctgggtcaatggaataataaattaagtacaggcaggaatttggttgggagcatcttgtatgatctccgtatgatgtgatattgatggagatagtggtcctcattcttgggggttgccattcccacattcccccttcaacaaacagtgtaacaggtccttcccagatttagggtacttttattgatggatatgttttccttttattcacataaccccttgaaaccctgtcttgtcctcctgttacttgcttctgctgtacaagatgtagcaccttttctcctctttgaacatggtctagtgacacggtagcaccagttgcaggaaggagccagacttgttctcagagcactgtgttcacacttttcagcaaaaatagctatggttgtaacatatgtattcccttcctctgatttgaaggcaaaaatctacagtgtttcttcacttcttttctgatctggggcatgaaaaaagcaagattgaaatttgaactatgagtctcctgcatggcaacaaaatgtgtgtcaccatcaggccaacaggccagcccttgaatggggatttattactgttgtatctatgttgcatgataaacattcatcaccttcctcctgtagtcctgcctcgtactccccttcccctatgattgaaaagtaaacaaaacccacatttcctatcctggttagaagaaaattaatgttctgacagttgtgatcgcctggagtacttttagacttttagcattcgttttttacctgtttgtggatgtgtgtttgtatgtgcatacgtatgagataggcacatgcatcttctgtatggacaaaggtggggtacctacaggagagcaaaggttaattttgtgcttttagtaaaaacatttaaatacaaagttctttattgggtggaattatatttgatgcaaatatttgatcacttaaaacttttaaaacttctaggtaatttgccacgctttttgactgctcaccaataccctgtaaaaatacgtaattcttcctgtttgtgtaataagatattcatatttgtagttgcattaataatagttatttcttagtccatcagatgttcccgtgtgcctcttttatgccaaattgattgtcatatttcatgttgggaccaagtagtttgcccatggcaaacctaaatttatgacctgctgaggcctctcagaaaactgagcatactagcaagacagctcttcttgaaaaaaaaaatatgtatacacaaatatatacgtatatctatatatacgtatgtatatacacacatgtatattcttccttgattgtgtagctgtccaaaataataacatatatagagggagctgtattcctttatacaaatctgatggctcctgcagcactttttccttctgaaaatatttacattttgctaacctagtttgttactttaaaaatcagttttgatgaaaggagggaaaagcagatggacttgaaaaagatccaagctcctattagaaaaggtatgaaaatctttatagtaaaattttttataaactaaagttgtaccttttaatatgtagtaaactctcatttatttggggttcgctcttggatctcatccatccattgtgttctctttaatgctgcctgccttttgaggcattcactgccctagacaatgccaccagagatagtgggggaaatgccagatgaaaccaactcttgctctcactagttgtcagcttctctggataagtgaccacagaagcaggagtcctcctgcttgggcatcattgggccagttccttctctttaaatcagatttgtaatggctcccaaattccatcacatcacatttaaattgcagacagtgttttgcacatcatgtatctgttttgtcccataatatgctttttactccctgatcccagtttctgctgttgactcttccattcagttttatttattgtgtgttctcacagtgacaccatttgtccttttctgcaacaacctttccagctacttttgccaaattctatttgtcttctccttcaaaacattctcctttgcagttcctcttcatctgtgtagctgctcttttgtctcttaacttaccattcctatagtactttatgcatctctgcttagttctattagttttttggccttgctcttctccttgattttaaaattccttctatagctagagcttttctttctttcattctctcttcctgcagtgttttgcatacatcagaagctaggtacataagttaaatgattgagagttggctgtatttagatttatcactttttaatagggtgagcttgagagttttctttctttctgttttttttttttgttttttttttttttttttttttttttttttttgactaatttcacatgctctaaaaaccttcaaaggtgattatttttctcctggaaactccaggtccattctgtttaaatccctaagaatgtcagaattaaaataacagggctatcccgtaattggaaatatttcttttttcaggatgctatagtcaatttagtaagtgaccaccaaattgttatttgcactaacaaagctcaaaacacgataagtttactcctccatctcagtaataaaaattaagctgtaatcaaccttctaggtttctcttgtcttaaaatgggtattcaaaaatggggatctgtggtgtatgtatggaaacacatactccttaatttacctgttgttggaaactggagaaatgattgtcgggcaaccgtttattttttattgtattttatttggttgagggatttttttataaacagttttacttgtgtcatattttaaaattactaactgccatcacctgctggggtcctttgttaggtcattttcagtgactaatagggataatccaggtaactttgaagagatgagcagtgagtgaccaggcagtttttctgcctttagctttgacagttcttaattaagatcattgaagaccagctttctcataaatttctctttttgaaaaaaagaaagcatttgtactaagctcctctgtaagacaacatcttaaatcttaaaagtgttgttatcatgactggtgagagaagaaaacattttgtttttattaaatggagcattatttacaaaaagccattgttgagaattagatcccacatcgtataaatatctattaaccattctaaataaagagaactccagtgttgctatgtgcaagatcctctcttggagcttttttgcatagcaattaaaggtgtgctatttgtcagtagccatttttttgcagtgatttgaagaccaaagttgttttacagctgtgttaccgttaaaggtttttttttttatatgtattaaatcaatttatcactgtttaaagctttgaatatctgcaatctttgccaaggtacttttttatttaaaaaaaaacataactttgtaaatattaccctgtaatattatatatacttaataaaacattttaagctattttgttgggctatttctattgctgctacagcagaccacaagcacatttctgaaaaatttaatttattaatgtatttttaagttgcttatattctaggtaacaatgtaaagaatgatttaaaatattaattatgaattttttgagtataatacccaataagcttttaattagagcagagttttaattaaaagttttaaatcagtc

SEQ ID NO: 293 - DNA, 1705 bp, HOMO SAPIENS
gtgctgacgtcggacgccgccgcggcgcgctctgcagactccgggtcgccgctccgccgggacgcgttggccggggcgcgcggtgcttggctgcggtgctcacactcatgaggagccggaagctcacaggtgcagtgcggtcttcagcgcgcttgaaagcacgaagttgttcggcagccaggttggcctctgcccaggaagttgctggttccacgtctgccaagacagcatgtctgacttcctcatcccacaaagccacagacacgcgaacgtccaagaagttcaaatgtgacaaaggacatcttgtgaagtcagaattacagaagcttgtccctaagaatgacagcgcttctttgccaaaagtgacacctgagaccccttgtgaaaatgagtttgctgaaggcagtgccttgcttccaggcagcgaggctggcgtttctgtgcagcagggggctgcaagtcttcctctcggtggctgcagagttgtgagtgactctcgcttagcaaagactagagatggcctgtccgtgccaaaacacagtgccgggtccggagcagaagaatccaacagcagctccactgtgcagaagcagaatgagccagggctacagacagaggatgtgcagaagccaccacttcagatggacaacagcgtctttctagatgacgacagcaatcagccaatgcccgtgagccggttctttggaaacgttgagctcatgcaggacctcccacctgcgtcttcatcttgtccttcaatgagcagacgagagttcagaaaaatgcatttcagagccaaagatgatgatgatgacgacgacgatgatgcagaaatgtaggggccatacaaaataatgtccttgagtatttagtaccattaacaatttgacaatttagcacattacaagatttatataaaatgtatctccaagagaatgtcttaatcaaacttcagaactgacccatctaagtcaatagtgcaaagcacccaatacctgtggaggatgtactcatgggaactaaaactcaaaccatctttgaggttgcaaagctgctgtactgtgccaatgtcctttctttttttttttttttttttttccttggagacagagtttctctcttgtcgcccaggctggagtgcaatggcgcaatctcggctcactgcaacctccacctcctgggttcaagtgattctcctgcctcagcctcctgagtagctgggattacaggcatacaccaccacacccagctagtttttgtattattagtagacacgggggtttctccacgttggccaggctggtctcaaactcctgacctcgtgatacgcccgcctcagcctcccaaagtgctgggattacaggcgcgagccaccatgcccggccagtgtcctttcttatacacgtacatacatgatgatggcttgagtcagctgcagggcagtgggcttaatgagagggatctttgtaaagacagctcttcacttcagctcagtagctttggtcataggcaagtttgttttccattatcataatttgatgattcttgtgatgaattcaatgctagttcttaaagaactcttttatttctgtatgtggagctaatgtttaccttggaaattttgcaaaatacatgtaagaaagaaataaaatatattttgaaaataaaaaaaaaaaaaaaaaaaaaaaaaaaaaaaaaaaaaaaa

SEQ ID NO: 294 - DNA, 4983 bp, HOMO SAPIENS
ctcggctgcgggagtaggaagcagctttgcgcgcccgggcggccgatgcgggcactttgaagaatcacgtgtgttgaggccctcttaaagagataggcacctacttttccctccaccctaaacaccgccctgagggcggcggcgaccgtggtaattgcaactgctcaggggcagggcttgccccagcgccgagtagtggcaacggcgtggttgcgtcgggggtgcctgggagcctggagtcccgggggcctgaaatcggcagcttcccgggcagacactctctccctcaggaagaggtgccgccgagtcagcgcggggcagtgtgagcgccccgaggtgctttctcagttgaggagaggtggggttacagggcacaggtgacagggccggagaaagatggagcagcccggggcggcggcgtcgggagcgggaggcggcagcgaggaacccggtgggggccggagcaacaagcggagcgcggggaaccgggccgccaatgaagaggaaacgaaaaacaaacccaaattgaacattcaaataaaaactttggcagatgatgtgcgtgaccgaattacaagttttagaaaatctactgtcaaaaaagaaaaacctcttattcaacatcctattgattctcaagtcgcgatgagtgagtttcctgcagctcagccattatatgatgaacgatctttgaatttgtcagaaaaggaagtattggatctctttgaaaaaatgatggaggacatgaaccttaacgaagagaaaaaagctcctttacgaaacaaagactttaccaccaaacgtgagatggttgtccagtatatttctgccactgccaaatctggtgggctgaaaaacagcaaacatgaatgcaccctgtcttcacaagaatatgttcatgaattacgatcgggtatatcagatgagaaacttcttaattgcctagaatccctcagggtttctttaaccagcaatccggtcagctgggttaacaactttggccatgaaggtcttggactcttattggatgagctggaaaagcttctggacaaaaaacagcaagaaaatattgacaagaagaatcagtataaacttattcaatgcctcaaagcatttatgaataataagtttggattacaaaggattctaggagatgaaagaagtcttttactattggcaagagcaattgaccccaaacaacccaacatgatgactgaaatagtaaaaatactttctgctatttgcattgttggagaagagaacattctagataaacttttaggggctataacaacagcagcagaaagaaataacagggaacgattttcaccaattgtggaaggtttagaaaatcaggaagccttgcaattacaggtggcctgcatgcagtttataaatgcccttgtcacttctccttatgagcttgattttcgaatacatttaaggaatgaattcctccgttcaggactaaaaacaatgttaccagatctaaaagaaaaagagaatgatgagcttgatattcagttgaaagtatttgatgaaaacaaagaagatgacctaactgaattatcacaccgtctcaatgacattcgagcagaaatggatgatatgaatgaagtctaccatcttctatataatatgctgaaggacactgctgctgaaaattacttcttatctattctacaacattttttgcttatcagaaatgattattatatcaggccacaatattataaaataattgaggaatgtgtttcacagatagtgctacactgcagtggtatggatccagacttcaaatacaggcaaagattagacatcgatttaactcatctgatagattcttgtgtgaacaaggcgaaagttgaagaaagtgaacaaaaagctgcagagttttcaaagaagttcgatgaagaattcacagctcgacaggaagctcaagcagagcttcaaaaaagagatgagaaaatcaaagaacttgaagcagaaatccagcaacttcgaacccaggcacaagtactctcaagttcatcaggaattccaggtcctcctgcagcacctccattgccaggtgtagggccgcctccaccaccacccgcgccacctctacccggaggagctcctcttcctcctccaccacctcctttacctggaatgatggggataccaccaccacccccaccaccacttttatttgggggacctcctccaccaccaccccttggaggagttcctcctcccccaggaatatcacttaatctaccttatggaatgaagcagaaaaaaatgtataaacctgaagtgtccatgaagagaatcaattggtcaaagattgaacccacagaattatctgagaactgtttctggttaagagtcaaagaagacaagtttgagaatccagatctctttgccaaattggcattgaattttgctactcagataaaagttcaaaagaacgcagaagcattagaagaaaagaagactgggcctacaaagaagaaagtgaaagaactgagaattttggatcccaaaacagctcagaatctgtccatctttctgggatcatatcgcatgccatatgaagacataagaaacgttattctggaggttaatgaagacatgctgagtgaggctttaattcagaaccttgtgaaacatcttcctgagcagaagatactcaacgaattagcagagcttaagaatgaatatgatgacctctgtgagcctgaacaatttggagttgtgatgagctctgtgaaaatgttacagcctcgtctcagtagtatcctgttcaagctcacatttgaagaacacataaacaacatcaaaccaagcatcatagcagtaactcttgcctgtgaagaactgaagaaaagtgaaagctttaacagacttttagagttagttcttcttgttggaaactacatgaactcaggctcaagaaatgcccagtctttgggatttaagatcaacttcctttgtaagatcagagatactaaatcagcggatcaaaaaacaacccttttgcattttattgccgacatttgtgaggaaaaatatcgagatatcctaaaatttcctgaagaactggaacacgtagaaagtgcaagcaaagtttcagctcaaattctcaagagcaaccttgcatcaatggaacaacaaattgttcatctggaacgtgacatcaagaaattcccccaagcagaaaatcaacacgataagtttgtggaaaagatgaccagctttacaaagactgcccgagaacagtatgaaaaactctccaccatgcacaacaacatgatgaagctctatgagaatcttggagaatacttcatttttgactcaaagacagtgagcatagaagagttctttggtgatctcaacaacttccgaactttgtttttggaagcagtgagagaaaacaataagagaagagaaatggaagagaagaccaggagggcaaaacttgcaaaagagaaagctgaacaagaaaagttagaacgccagaagaaaaagaaacaactcattgatataaacaaagagggtgatgagactggtgtgatggataatcttctagaagccctacaatcaggtgcagcattcagagaccgtcgaaagcggattccaaggaatccagataacagacgagtacctttggaaaggtcacgctctcgccacaatggagctatctcatctaagtgattcctgatgccaaagaatatgaaaatatttaagtaaaaacaaaatgatgcattttgagaagaacaaagtgtgcactcagcggctggaaaggaaataagtgcatttctgcaaagatcaagataagctggatgaagtagtgtgcatttgtaatactattgcaagactcctcccacaattattctaatctgaacacagttatcaggattacaaaatgtgttccattttagtgtaaagatgtgtatcatttgtaattgtgtgtgacctgactgtgatgatggaagtgtaagaaattgaagagttctaaggctttcaaaaacactcagtcaaaaatttaaaatcttaaatgtgtaagtcacccccaccaaaaacaaaagagaagaaaaagaatagaaagaattatccagtgtcagcttccaatccctagtacatatataatagaaaagggccaagaaaaatatgcatcttgatttggagagaggctaatattatgcacactgtaagagaagccattttggaaattcacgaaagtactgctccaccccagttgagttatttagaattttatctcaagtgaaagctgatggattcatctgctttggctgaaattaaacttatcattagtctagctagcatttcagcatgatattgcaagcacttctcattgctaaaaataaataaaccaaagtttaaccgaatcagttagggaaagtgatttaaactttatttaaagaggtattttctaattatgcacagatatctactttatacaaatactttatatggctatttttgagaaaaccctcacattttaatgtttatgctagggatgaacctgaaaattctattacgtttatttagatttcaaaggcaaatattgattcctatgctctgtggtttatttcttttttctattgcttctttctcccttgagtcccttgaaggcagggaatagacttctagaaaacctgagaggaaaaagaattctttttacaggaggcagcagaaaactgtctgaaaggtcaattgttttatctccctttccactctctttccaatttcactttggtggtctgaagaagaaaaagaaattttatgtatgtatgtgtaaatatgtgtatatatttctatctcttgctacaataattccaactaagtgaacttctcaattatcatcatacttacttaccttatattaacaaattaagatgatgctgccaaaacaagtctagcagggaaaacaggttctacatttttcttaaataaattagggagtaaaagtta

SEQ ID NO: 295 - DNA, 5246 bp, HOMO SAPIENS
atcccggctgacgttggacgacaaagatggcggcagggaccagcagttactgggaaggtgagggcgagaaggcctccggatctcaggaaacaggctcgacagctggaaaatgaacttgacctgaaactagtttccttcagcaaactatgtacaagttacagtcatagcagtacccgagatggaagacgcgacagttctgatacaacaccccttttaaatggatcaagccaagacagaatgtttgagacaatggcgattgagattgaacaacttttggcaaggcttacaggggtaaatgataaaatggcagaatataccaacagtgcaggtgtcccctccttgaatgcagccctgatgcatacattacagcggcatagagacatattgcaggattatacacatgaattccataaaaccaaagcaaactttatggcaatacgggaaagggagaatcttatgggatcagtacgaaaagatattgagtcatataaaagtgggtctggagtaaacaacagaagaactgagctatttttgaaagaacatgaccaccttcgaaactcagatcgtctgatagaagagacaataagcattgctatggcaacaaaagaaaatatgacttcacagagaggaatgttgaagtcaattcacagcaaaatgaacactttggccaatcgttttcctgctgtaaacagcctgatccagaggatcaacctgaggaagcggcgggactcgctcatcctagggggtgttattgggatctgtaccatcctgttgctgctgtatgcgttccattgatgggacatcttcagggactcttgacagccaccgctttcacaccctggtctggaataaggaaacatcggagggagaagttgactgtcttgataattagcctgaccagcaggatgaatgcaagactgacagtgatggactctgtgacatggtcaggttgagctgaagccacagtttctctgtgctgtgttttctaacacatttttctgtttttaattaaaaaaaaaaaaaaaaggttttcagttgcttttgtctccctaggaggcaggtaaaccaatcaaaaacagagttttctgtgtttccatgatagtgttgaagcctaatgacaagccaggtcttacagctgggctcttcagaaaaccaggtttctacatccaaagactgcttttcttttagctgccagattggattgtgaataaaaataattcttccctctccctctccctctccccacggtctccctctttccacggtctccctctgatgccgagccgaagctggactgtactgctgccatctcggctcactgcaacctccctgcctgattctcctgcctcagcctgccgagtgcctgcaattgcaggcgagcgccgccacgcctgactgcctcggcctcccgaggtgccgggattgcagacggagtctcgttcactcagtgctcaatggtgcccaggctggagtgcagtggcgtgatctcggctcactacaacctccacctcccagccacctgccttggcctcccaaagtgccgagattgcagcctctgcccggccgccaccccgtctggaaagtgaggagcgcctctgcccggccgccatcccatctaggaagtgaggagcgcctcttcccagccgccatcccatctaggaagtgaggagcgtctctgcccggccgcccatcgtctgagatgtggggagcgcctctgccccgccgccccgtctgggatgtgaggagctcctctgcccggccgcgaccccgtctgggaggtgaggagcgtctctgtctggccaccccgtctgagaagtgaggagacctccgcccggcagccgccctgtctgagaagtgaggagcccctccgcccggcagccaccccatctgggaagtgaggagcgtctacgcccgggcagctgccccgtccgggagggaggtgggggggtcagccccccgcccggccagccgccccgtccgggagggaggtgggggggatcagccccccgcccggccagccgccccgtccgggagggaggtggggggcgcctctgcccggccgcccctgcccggccgcccctactgggaagtgaggagcccctctgcctggccaccaccccatctgggaggtgtgcccagcagctcattgagaacgggccatgatgacaatggcggttttgtggaatagaaaaggcggaaaggtggggaaaagattgagaaattggatggttgccgtgtctgtgtagaaagaagtagacatgggagacttttcattttgttctgtactaagaaaaattcttctgccttgggatcctgttgatctatgaccttacccccaacctggtgctctctgaaacatgtgctgtgtccactcagggttaaatggattaagggtggtgcaagatgtgctttgttaaacagatgcttgaaggcagcatgctccttaagagtcatcaccactccctaatctcaagtacccagggacacaaacactgcggaaggcggcagggtcctctgcctaggaaaaccagagacctttgttcacttgttgatctgctgaccttccctccactattgtcctatgaccctgccaaatccccctctgcgagaaacacccaagaatgatcaattaaaaaaaaaataatataataataattcttgtcctcttattttacactcataatgagaaatcacaagttctttcttgatgatctgtgctatagatttctactctgtctcctcaactctgttgatatttggggaaaattctgtttttcatagattctttgagatgctgatggaccagcttcagcatgtttgaggttgtctgaaatggagatcactgtaaaactgtctttttcttttaaattacaagtacactggggttaactgtattgctggaaaaacatcaagaatgacagtcttatatttaaggcaccagtcattgtttccattttttttttaattcttcccttggattaatattttctactgaaaagaaatgaaatctcagttccactatgataaaagaaacgaatcaccagtgtctgtcagtgcccccactgctcctcctcataccagcattgacactggtagctgaggaaggggactgctcaatttctaatgtgatctattcaagaagccacatataaaaaggcattgagggctcactgtccagagaattgcttttgtaaatgctccacaacgtatgggcaaaagtttaaggactactgcctgatgtaccaggaatcctgagttctgtgaaaatctgttcattccaaatctgttaagcatttccaaacatccagagaatggtttcactgttgagggtgcatgtggcagaatctgtctctctctgcacctgtcttctgttaccatccctggacagtgacagattttaagccagccaccagaattcttttcgagttaaccatttcttagtttctgtaaattcatgacttgtcttactgaactacagcctggtttgtagacttccaacatctacactgctgctcttcaccattggaattcactgtggtatttatagtattggcttcagtccgagccacaggcaataaaaggatatcagctgtagttctcagctacatcatggtgtatagatgctgttattcaggcgaacttgctcatgggtggactaacacctggtttggtacagagactgagaagtttttcattctggtgtcaaagttttgttacattatgggtgtgaagggcatttgatatatttttcttaactatggggtttatttttctaaatgtgggttgattgactgttaattgattcagggtacccttaaaagaaaagaagttttcccattgtgaaccttaaatgatcagagaagtaagttcattgattaaattctctgttgggagaacaaaacttttctcccttgacactttattatctttgatttttcaaagggccttgattggtggttgtgtctcggttaaaatttatgggactttgctatgtagttggcatttataaaatctgaagtatcataaataaagttatttatttaattatactaccagtcttttttactggtctgattcttttgtgcattcattaaagctgattgtgtgagagtgaactgggacacaagctagtctagctcactgcagccaagcaaaccctgttgatggctgatgggcctttccattagggttttgcttatgtgaagtaatggaattatgttggttattttctttatgaaaataaaccagttcttccaaggaagttaaaaggcttggtatggatgttggtgtcagataggtctgactaacctctccgtgctgcagcctatactaaggtgacccagggccacatgtagacagctaggccagtgctttttcctcttagggtttctttgcagaaagaaacctccagcaagggaagagaggtgtgtgtccacaggaaggggctccgtggggatcccatgaagggatttgagctctttcagctccatgtcatttaacttttttgtttaaccaccttggctttctctccttttttgctgtcctccttacggaccagttaccagattcagaggctaacagttagttacttgttaatgctagtcacagccaggaggtcagaaggaattttctacttctggatccaaatgttacctcttaggggaagttatgccccctcaactattgtcttattataatgaatctttcctttttggtccttttaagtaaccactcaaaacttttcatttcactgaaaaaatatgaaaaaccatgacaatagggctgggtgcagtggctcacgcctgtaatcttagcactttgggagaccaaggcaggcggatcgtttgaggccaggagtttgagaccagcctgggcaatgtagcaagactctgtctctgcaaaaaaaattaaaagatacctgagagctcactttaatatcaaggtatttgcatccattcccaccctgttagctcttaagggaggagggaaatcaattccaaccatactttcctgtgatggaagatgtttcctcttgaaaaaatgccaatacagatttttaaaacctattgttttccaaatgcactttgtaagtttttgcttttaaaatagcttcttggaaccaattttattgtatttgtacttaatttttgttctcatctaaatgtgcattttctgactgtatagaagaagctttggtatgtaatttaataataaattagaaatctaaatgaaaaaaaaaaaaaaaa

SEQ ID NO: 296 - DNA, 556 bp, HOMO SAPIENS
tgacccacttccgttacttgctgcggaggaccgtgggcagccagggtcggtgaaggatcccaaaatggctgggcgaaaacttgctctaaaaaccattgactgggtagcttttgcagagatcataccccagaaccaaaaggccattgctagttccctgaaatcctggaatgagaccctcacctccaggttggctgctttacctgagaatccaccagctatcgactgggcttactacaaggccaatgtggccaaggctggcttggtggatgactttgagaagaaggtgaaatcttgtgctgagtgggtgtctctctcaaaggccaggattgtagaatatgagaaagagatggagaagatgaagaacttaattccatttgatcagatgaccattgaggacttgaatgaagctttcccagaaaccaaattagacaagaaaaagtatccctattggcctcaccaaccaattgagaatttataaaattgagtccaggaggaagctctggcccttgtattacacattctggacattaaaaataataattatacagttaaaaaa

SEQ ID NO: 297 - DNA, 82029 bp, HOMO SAPIENS
gagcagtcgtgcattcccagcctcgcctcgggtgtagggattgcatagaaaagcaaaactacacagtcttgactgtgtagttttgtttttaggattagaggctcaccgattcatgtcggagatggtcagaaaaaccaactctccataggacgtcgtttcagaagcaaccttgggcttagtcccaccctttttaggcactcttgagaaatcagagtgcctagaaagatgacaactcaagcaccgacgtttacgcagccgttacaaagcgttgtggtactggagggtagtaccgcaacctttgaggctcacattagtggttttccagttcctgaggtgagctggtttagggatggccaggtgatttccacttccactctgcccggcgtgcagatctcctttagcgatggccgcgctaaactgacgatccccgccgtgactaaagccaacagtggacgatattccctgaaagccaccaatggatctggacaagcgactagtactgctgagcttctcgtgaaagctgagacagcaccacccaacttcgttcaacgactgcagagcatgaccgtgagacaaggaagccaagtgagactccaagtgagagtgactggaatccctacacctgtggtgaagttctaccgggatggagccgaaatccagagctcccttgatttccaaatttcacaagaaggcgacctctacagcttactgattgcagaagcataccctgaggactcagggacctattcagtaaatgccaccaatagcgttggaagagctacttcgactgctgaattactggttcaaggtgaagaagaagtacctgctaaaaagacaaagacaattgtttcgactgctcagatctcagaatcaagacaaacccgaattgaaaagaagattgaagcccactttgatgccagatcaattgcaacagttgagatggtcatagatggtgccgctgggcaacagctgccacataaaacacctcccaggattcctccgaagccaaagtcaagatccccaacaccaccgtctattgctgccaaagcacagctggctcggcagcagtccccatcgcccataagacactccccttccccggtcagacacgtgcgggcaccgaccccatctccggtcaggtccgtgtctccagcagcaagaatctccacatcccccatcaggtctgttaggtctccattgctcatgcgtaagactcaggcatccaccgtggccacaggtcctgaagtgcctcccccttggaagcaagagggctacgtggcctcctcatctgaggctgagatgagagagacaacgctgacaacctctactcagatcaggacagaagagagatgggaagggagatacggtgtccaggagcaagtgaccatcagtggtgctgcgggtgctgccgccagtgtgtcggccagtgctagctacgcagcagaggctgttgccactggtgctaaagaggtgaaacaagatgctgacaaaagtgcagctgttgcgactgttgttgctgccgttgatatggccagagtgagagaaccagtgatcagcgctgtagagcagactgctcagaggacaaccacgactgctgtgcacatccaacctgctcaagaacaggtaagaaaggaagcggagaagactgctgtaactaaggtagtagtggccgccgataaagccaaggaacaagaattaaaatcaagaaccaaagaagtaattaccacaaagcaagagcagatgcacgtaactcatgagcagataagaaaagaaactgaaaaaacatttgtaccaaaggtagtaatttccgcagctaaagccaaagaacaagaaactagaatttctgaagaaattactaagaaacagaaacaagtaactcaagaagcaataatgaaggaaactaggaaaacagttgtacctaaagtcatagttgccacacccaaagtcaaagaacaagatttagtatcaagaggtagagaaggcattactaccaaaagagaacaagtgcaaataactcaggagaagatgagaaaggaagccgagaaaactgccttgtctacaatagcagttgctactgctaaagccaaagaacaagaaacaatactgagaactagagaaactatggctactagacaagaacaaatccaagttacccatggaaaggtggacgttggaaaaaaggctgaagctgtagcaacagttgttgctgcagtagaccaggcccgagtcagagagcccagagagcctgggcatcttgaagaatcctatgctcagcagaccactttggagtacggatataaggaacgcatttccgccgcaaaggtagctgagcctccccaacgtccagcctcagaaccccacgttgtccctaaagcagtcaagcctagagtaatccaggctccttctgagactcatatcaaaactactgatcaaaagggaatgcacatatcatcacagatcaagaaaactacagatctaacaacggaaagattagtccatgtggataaacgcccccgcacagctagccctcactttactgtttcaaaaatttctgttcctaagacagaacatggatatgaggcatcaatagccggtagtgctattgccacattacaaaaagagttgtcagccacatcttctgctcagaagatcaccaaatcggtgaaggctcctactgtgaagcccagtgagactagagtaagggcagagcccacacccttgccacagttccccttcgctgacacaccagatacttacaagagtgaagctggcgttgaggtgaaaaaggaagtaggggtgagcatcactggcaccaccgtccgtgaagagcgctttgaagtactgcacggacgcgaagccaaggtaacagaaacagcaagagtaccagcacctgttgaaattcctgttactccaccaactttggtctcgggcttaaaaaatgtgactgtcatagaaggtgaatctgtcaccttggagtgccacatctctggatacccatccccgacagtgacatggtacagggaagactaccaaatcgaaagttccattgacttccagataaccttccagagtggaattgctcgtcttatgattcgcgaagcatttgcggaagacagcgggcgatttacttgcagtgctgtaaatgaggctggaaccgtcagcacatcctgctatctggctgtgcaggtgtcagaagaatttgaaaaggaaaccacagccgtgactgagaaatttactacagaagagaaacgctttgttgagtcaagagatgtggttatgactgatactagcctcacagaggaacaagcagggcctggagaacctgccgcgccttactttattacaaaaccagtggtccagaaactggtggaaggtgggagcgtggtgtttggatgccaagttggcggcaacccaaagccccatgtatactggaaaaaatctggtgttcctctaaccactggatacagatacaaagtgagttacaacaaacaaaccggtgaatgcaagctggtgatttctatgacttttgctgatgatgctggagaatacactattgttgttcgcaataagcatggagaaacttctgcatctgcttccttgcttgaagaagctgattatgagttactgatgaagtcccagcaagaaatgctttatcagacacaagtgactgcatttgttcaagaacctaaagttggagaaacagcacctggatttgtatactctgagtatgaaaaagagtatgaaaaagaacaagccttaattaggaagaaaatggccaaagatactgtagtggtcagaacttatgtagaagatcaggaattccatatttcttcctttgaagagagacttattaaagaaattgaatatagaataataaagactacattagaagaacttcttgaagaagatggagaagaaaagatggcagttgacatttctgaatctgaagctgttgaatcaggatttgattcaagaatcaagaattatagaattcttgaggggatgggtgtcacttttcattgcaagatgtctggatatccattaccaaagattgcttggtacaaagatggcaagcgcatcaaacatggagaaagataccaaatggactttctacaagatggcagagctagtctgcgtatacctgttgttcttccagaagatgaaggaatctacactgcatttgccagcaatattaaaggaaatgcaatttgctcagggaaattgtatgtggagcctgctgcaccacttggagctccgacttacattcccacactagagccagtgagcagaatcagatctctctctccacgttcagtgagcaggtctcctatacgcatgtctcctgcacggatgtcacctgcaaggatgtctcctgcacggatgtcccctgcaagaatgtcccctggacgtaggctggaggagacagatgagtcacaacttgagagactatataaaccagtctttgtgttaaaacctgtttctttcaaatgtttagaagggcaaactgccagatttgacttaaaggttgttggtagacctatgccagagacgttctggtttcatgatggccagcaaattgtcaatgactatacccataaagtagtcattaaagaagatggtactcaatcactaattattgtccctgccacacccagtgattctggggaatggactgtggttgcccaaaacagggcaggcagatcttcaatttcagtgattttaactgtggaagctgtggaacatcaggtaaaaccgatgtttgtagaaaaactgaaaaatgtcaatataaaggaaggttcccgacttgaaatgaaagtcagagctacgggtaaccccaaccctgacattgtatggttgaaaaacagtgacatcattgtgcctcataaatatcccaaaatcagaattgaaggaaccaagggagaagctgcccttaaaatcgattccactgtcagccaagattctgcctggtatactgcgactgctattaataaagctggcagagacactacaagatgcaaagtaaatgttgaagttgagtttgcagagcctgagccagagagaaagttaatcatcccacgggggacatatagagcaaaggagattgcagccccagaactggagcccctccatttgcgatatggccaagagcaatgggaagaaggtgatctctatgacaaagagaaacaacagaaaccatttttcaagaaaaaactcacttccttaagacttaagcgctttgggcctgcccactttgaatgcaggctaacacccattggtgacccaacgatggtggtggagtggctccatgatggaaagccacttgaagcagccaacaggctccgtatgatcaatgaatttgggtactgcagccttgattatggcgttgcatattctagagacagtggtatcattacttgcagagccactaacaaatatggaacagatcacacatctgctacccttattgttaaagatgagaaaagtcttgtggaagaatcccaattgcctgaggggaggaaaggcttacagagaattgaagaattagagagaatggctcatgaaggtgcacttacaggtgtaacaacagatcagaaagaaaagcaaaagccagacattgtcttgtacccagagccagttagagtacttgaaggggagactgcaaggttccgctgcagggtaacaggctaccctcagcccaaagtcaactggtacctcaatggacagctcatccgcaaaagcaaaaggttcagagttcgctatgatggtatccattacctggacatcgtggactgcaaatcatatgacacaggtgaagtgaaggtcaccgcggaaaatcctgaaggtgtgatagagcataaagtgaagcttgagattcaacagagggaagattttaggtctgtccttaggagagctcctgaaccaaggcctgagtttcacgtacatgaaccaggaaagcttcagtttgaagtacaaaaagtggatagacctgttgacaccactgaaaccaaagaagttgtgaagttgaaaagggctgaaagaattacccatgaaaaagtgcctgaagagtcggaagagctgcgcagtaaattcaagcgcagaacagaagagggctattatgaagccattaccgctgtggagctcaagtctcgaaagaaggatgaatcctatgaggaactcctcaggaagacaaaagatgaacttctccactggaccaaagagttaactgaagaggaaaagaaagctcttgccgaagaaggcaaaatcacgattccaacttttaaacctgacaagattgaactaagtcctagtatggaggctccaaaaatcttcgaaagaatccagagccaaacagtgggccaaggatctgatgcacacttccgggtcagagtcgtggggaaaccagaccccgaatgtgaatggtacaaaaatggtgtcaaaattgaacggtctgaccggatctactggtactggcccgaagacaatgtttgtgaattggtcataagagatgtgactgctgaggactctgccagcatcatggtaaaagccatcaacatagctggagaaacctccagtcacgcattcttacttgtccaagccaagcaattgatcactttcacacaggaattacaagatgttgttgctaaggaaaaagacactatggcaacctttgaatgtgaaacttcagaaccatttgtcaaagtgaaatggtataaagatggtatggaggttcatgagggagataaatacaggatgcactctgacagaaaggttcacttcctctccatactgaccattgatacgtctgatgctgaagattacagctgtgtacttgtggaagatgaaaatgtcaaaacgactgctaaacttattgttgaaggtgcagttgttgagtttgtgaaagaacttcaggacatagaagttccagaatcatattcaggagaattagagtgcattgtatccccagaaaatatagaaggaaaatggtatcataatgatgtggagcttaaatccaatggcaaatatacaattacatctcgtcgtggacgtcagaacctcacggtcaaggatgtaaccaaggaggaccagggagaatacagctttgtcatcgacgggaaaaagacaacctgtaaattaaagatgaaaccccgccccattgctatcctacaaggacttagtgaccaaaaagtctgtgagggtgacattgttcagcttgaagttaaagtctccttggaaagtgtggaaggcgtctggatgaaagacggccaagaagtgcagcccagtgacagggttcacattgtgatagacaaacaatctcatatgctgctcattgaagacatgactaaggaagatgctggaaattactctttcaccattccagcccttggcctctccaccagtgggcgtgtctctgtctatagtgtggacgtgataacacctctaaaagatgttaatgtgattgaaggcaccaaggctgtgcttgaatgtaaggtgtcagtccctgatgtgacttctgttaagtggtacttaaatgatgaacaaatcaagcctgatgaccgtgtacaggccattgtgaaaggtactaaacagcgactagtcattaaccgaactcatgcttcagacgaaggaccttacaagctgatagttggcagagttgaaaccaactgtaatctctctgtagaaaaaattaaaattatcagaggtcttcgtgaccttacctgtacagaaactcaaaatgtggtgtttgaggttgagctgtcccactctggaattgatgtcctgtggaattttaaggacaaggaaatcaagcccagttctaaatataaaattgaagcacatggaaaaatatataaattgacagttctaaatatgatgaaagatgatgaaggaaaatacacattttacgcgggagaaaatatgacatctggaaaacttactgtggcaggtggggccatctccaagccactcacagatcagaccgtagctgaatcccaggaagctgtgtttgaatgtgaagttgccaacccagattccaaaggcgaatggttgagggatggcaaacacctaccactgactaacaacatcagaagtgagtctgatggccacaaaaggagacttatcattgctgccaccaaattagatgacattggagaatatacctacaaggtggccacctccaaaacatctgccaaactcaaagttgaagctgtcaaaattaagaagactctgaagaacctcacagtgacagaaacacaggatgctgttttcactgtcgagcttacacaccctaatgtcaaaggtgtccagtggatcaaaaatggagttgtgctggaatccaatgaaaagtatgctatctctgtcaaaggaacaatttactctctgaggattaaaaactgtgccatcgtggatgagtctgtttatggcttcaggcttggaaggcttggagccagtgccagactgcacgtggagactgtcaagatcattaaaaagccaaaggatgtgacagccttggaaaatgccactgttgcctttgaagttagtgtttcccatgacactgttccagtaaaatggttccataagagtgtggaaattaagccaagtgacaaacacagactggtctcagaaaggaaagtccacaagctgatgctgcagaacatctccccctcagatgctggggaatacacagctgtggtcgggcaattggaatgcaaagcaaaactgtttgtggagacattacatattacaaaaaccatgaaaaatatcgaggtgcctgagaccaaaactgcctcttttgagtgtgaggtgtcccacttcaatgtcccttccatgtggctgaagaatggtgtggaaattgagatgagtgaaaagttcaagatagttgtgcagggaaaactccatcagctgatcatcatgaacaccagcacagaggactcggcagaatacacatttgtctgtggcaatgaccaagtcagtgccaccctgacagtcaccccaatcatgattacttccatgctgaaagacatcaacgctgaagaaaaagacactattacttttgaggtgacagtgaactatgaaggcatctcttacaaatggttaaagaatggtgtggaaatcaaatcaactgacaagtgccagatgagaaccaaaaagctcacacactcactgaacatcaggaatgttcactttggggatgctgctgactacacctttgtggctggaaaagcaacatcaacagccacactttatgtggaagctcgtcatatagaatttaggaaacacattaaggacattaaggtactggagaagaagcgagccatgtttgaatgtgaagtttctgaacctgacatcactgtacagtggatgaaagatgaccaggaactgcagatcacagacagaataaagattcagaaggagaaatatgtccaccgccttctgatcccatccacccggatgtctgatgctgggaagtacacagtggtggcaggaggcaacgtgtcaactgcaaaactctttgtagaaggcagagatgttcgcatccgaagtattaaaaaggaggttcaggtcattgagaaacagcgtgctgttgttgaatttgaggtcaatgaagacgatgttgatgcccactggtataaagatggcattgaaatcaatttccaagttcaagaacgacacaaatatgtagtggaaagaagaatccaccgaatgtttatctctgagaccagacagagcgatgcaggagaatacacctttgtggcaggaaggaacaggagttctgtcactctctatgtcaatgctcctgaaccgccccaagttctgcaggagctccagcctgtcactgtgcagtctggcaagcctgcccgcttctgtgccgtgatatccggaagaccacagcccaaaatttcctggtacaaggaagagcagctgctttccactggcttcaagtgcaaatttcttcatgatgggcaagaatacacgcttttgctaattgaagccttcccagaggatgcggcagtctatacctgtgaagccaagaatgactatggtgttgccacaacatcagcttcactctcagtggaagttccagaagttgtgtctcctgatcaggaaatgcctgtttatccacctgccatcatcaccccgcttcaggacactgtcacttctgaagggcagccagcccgttttcaatgccgggtttctggaacagatctaaaagtgtcgtggtacagcaaagacaagaaaatcaagccatctcggttctttagaatgactcaatttgaagacacttatcaactggaaattgccgaagcttatccagaagatgaaggaacttacacgtttgttgctagtaatgctgtaggccaagtatcaagcacagccaacctgagtctggaagctcctgaatcaattttgcatgagaggattgaacaagagattgagatggaaatgaaagagttttctagttcttttctgtctgccgaggaagaaggacttcatagcgccgaacttcaattatctaaaataaatgaaacacttgaacttttgtctgaatctccagtttacccaactaaatttgattccgaaaaggaaggcactggcccaattttcatcaaagaagtgtcaaatgctgatataagcatgggggatgtggctacactgtctgtaactgtcattggcatccccaaacctaaaattcagtggttctttaatggagtgctattaaccccttctgctgactacaaatttgtttttgacggtgatgatcatagcctgatcattctgttcaccaaattggaggatgagggagagtatacatgtatggccagtaatgactatggaaagacaatatgtagtgcctatctaaaaattaattccaaaggagagggtcacaaagacactgaaacagaatcagcagtggcaaaatctctggaaaagctgggaggtccttgtcctcctcacttccttaaggagttaaaaccaattcgctgtgctcaagggcttcctgccatctttgagtacacagtggttggagagcctgcccctactgttacatggttcaaagaaaacaagcagctttgcaccagtgtttattacactatcattcataaccctaatggctctggaactttcattgtcaatgaccctcagagggaagacagtggcctctatatctgtaaagcagagaatatgttgggtgagtccacctgtgcagcagagctgcttgtgcttctggaagacacagacatgactgataccccctgcaaagcaaagtccacaccagaggctcctgaggattttccacagacacccttaaagggtcccgcagttgaagcacttgactcagagcaggaaattgcaacgtttgtaaaagacaccattttgaaagctgctttaattacagaagaaaaccagcaactatcttatgagcatattgctaaagccaatgaattgagcagtcagcttcctttgggagctcaggaattgcaatccattttggagcaagacaagctcactcctgaaagcaccagggaatttctttgcatcaatggcagtattcactttcagcctctcaaggaaccatctcccaacctacagctgcagattgtacagtcccagaaaaccttctccaaagaaggtattctaatgcctgaagagcctgagacacaggcagttctatcagataccgagaaaatcttcccaagtgccatgtccatagaacaaattaattcattaacagttgagcctctgaaaactttattagctgaacctgaagggaattatccacagtcttcaatagaacctccaatgcattcttatctaacctctgtggctgaggaagtactttcaccaaaagaaaagacagtatctgacaccaacagagagcaaagagtgactcttcaaaagcaagaggcacaaagtgcgctcatcttgagtcagagcttagctgagggacacgtggagagtctccagagtcctgatgtcatgatctctcaggtaaactatgagcccctagtcccttcagaacactcatgcacagaaggaggtaaaattttgatagaaagtgcaaatccactggaaaatgcagggcaagattctgcggtcagaattgaggaaggcaagtccttaagatttccactagcacttgaagaaaagcaggtactgctcaaagaagagcattctgacaacgtggtgatgcccccagaccaaatcattgagtctaaaagagagcccgtggcaataaagaaagtgcaggaggtacagggaagggaccttctttctaaggaaagcttgctttctggtattccagaagagcagagattaaacctgaaaattcaaatctgccgggctttgcaagcagccgtggccagcgagcagccaggtcttttctctgagtggctaagaaatattgaaaaggtggaggtcgaggctgtaaacatcacccaagagcccagacacatcatgtgcatgtaccttgttacttcggcaaagtctgtaacagaagaagtaaccatcattattgaagatgttgatcctcaaatggctaacctgaaaatggaacttagggatgctttgtgtgctattatatatgaggaaatagacatcctaacagctgagggtcctagaattcagcaaggagccaaaacaagtttgcaagaagaaatggattctttttcaggttcacagaaggttgaacccattactgaaccagaagttgaatctaaatatctgatctcaactgaagaggtcagttattttaacgtgcaaagtagggttaaatatttggatgccacacctgtcactaaaggggttgcttcagctgttgtctctgacgaaaaacaagatgagagtctgaaaccatcagaggaaaaagaggagtcttcctctgaaagtggtactgaggaggttgctacagtaaagatacaggaagctgagggtggcttaatcaaagaggatggccccatgatacatacacctttagtggacactgtttctgaggaaggtgatattgtacacctcacaacatccataacaaatgctaaagaggtgaattggtattttgagaataaactggtgccttcagatgaaaagttcaagtgtttacaagatcaaaatacatatacgctagtcatcgacaaagtaaataccgaagaccatcaaggagagtatgtctgtgaggccttgaatgacagcggaaaaacagcaacttcagccaaactcactgtagtaaaaagagctgccccagtgatcaagaggaaaatcgaacccctggaagtagcactgggccacctagccaaattcacctgtgagatccaaagtgctcccaatgtccggttccagtggtttaaagctggccgagaaatttatgagagtgacaagtgttctattcgatcttcaaagtatatctccagccttgaaatcctgagaacccaggtggttgactgcggcgagtatacatgcaaagcttccaatgagtatggcagtgtcagctgtacagccacactaactgtgacagtgcctggaggtgaaaagaaagttcgcaaattacttccggaacgtaaacctgaaccaaaggaagaagttgttctgaaaagcgttctaagaaaaagacctgaagaagaagaacctaaagtagaacctaaaaaactagaaaaagttaaaaaacctgcagtaccagaaccaccacctccaaaacctgttgaagaggttgaagtacctactgttacaaaaagggaaaggaagattcctgaaccaacaaaagtgcctgaaatcaagccagcaatacctctccctgcacctgaaccgaaaccaaagcccgaagcagaagtgaaaacaatcaaaccacctcctgtggaacctgaaccaacccccatcgctgccccagtaacagtgccagtggttggaaagaaagcagaagccaaagcacctaaggaagaggctgccaagccaaaaggtcctatcaaaggtgtacccaaaaagactccttcaccaatagaagccgaaaggagaaagttaaggccaggaagtggtggagagaaacctcctgatgaagccccgttcacctaccagctaaaggctgtgccactgaagtttgtgaaagaaatcaaagacatcatcttgacagaatcagagttcgttggctcttcagcaatctttgaatgtttggtctccccttccactgcaattacaacctggatgaaagacggtagcaatatccgtgagagtcccaagcacaggtttattgcagatggtaaagacagaaagctgcacatcattgatgttcaactttccgatgctggtgaatacacctgtgttttacgtttgggaaacaaagaaaagacctccacggctaaacttgttgtagaagaacttcctgtgcgttttgtaaaaacactggaagaggaagtcacagtggtcaaaggacagccattgtacttgagctgcgagttaaacaaagagcgtgacgtggtctggaggaaggatggcaagattgtggtggagaaacctggccgaattgtgccaggcgtcattggcttgatgcgggctctgaccatcaacgatgcagatgacacagatgctggaacatacacagttactgtggaaaacgccaacaacctggagtgttcatcttgcgtaaaagtagtagaagtcattagagattggctggtgaaacctatacgagaccagcatgtgaaacccaaggggacagctatttttgcctgtgatatagcaaaagatactccaaacattaagtggttcaaaggatatgatgaaatccctgcggaaccaaatgataagactgaaatactgagagatggaaatcatctgtacctcaaaattaagaatgctatgccagaagatattgctgagtatgcagtggaaattgaaggaaaaagataccctgcaaagctgacacttggagagcgtgaagttgaactgcttaaaccaatagaggacgttaccatttatgagaaagaaagtgcaagctttgatgcagaaatctcagaggcagacattcctggacaatggaaactgaaaggagaacttctaaggccctcacctacttgtgaaatcaaagcagaaggtggaaaacgcttcttaactttgcacaaagtcaaactggaccaagctggtgaagtcctctaccaggcccttaatgcaattacaactgccattttgacagtaaaagaaatcgaacttgactttgctgtgcccctgaaggatgtcactgttccagaaaggcgacaggctcgattcgaatgtgtcctcacccgagaggcaaatgttatatggtccaaaggacctgatataattaagtcatctgacaaatttgatatcatcgctgatggaaagaaacatattcttgttattaatgattctcaatttgatgatgaaggggtctatactgctgaggtggagggcaagaagacctcagctcggttgtttgtcacaggtataagactgaaattcatgtcacctcttgaagatcaaacagtaaaagaaggtgaaacagcaacttttgtttgtgaactttctcatgaaaaaatgcatgtagtctggttcaaaaatgatgccaaactccatacaagcagaacagtactcatctcttctgagggcaagactcacaaattggaaatgaaagaagtgacattggatgatatatctcagataaaagctcaagtcaaggagctgagctccacagcacagctgaaggtcttagaggccgatccctacttcactgtgaaattacatgacaaaactgcagtggagaaggatgagattactttgaagtgtgaagtgagcaaagatgtaccagtgaaatggttcaaagatggtgaagagattgtcccttcacccaaatattctatcaaggcagatggcctgcgccgcatcttaaaaatcaaaaaggcggaccttaaagataaaggcgaatatgtgtgtgactgtggcacagacaagaccaaggcaaatgttactgttgaggctcgactaataaaagtggaaaagcctctgtacggagtagaggtgtttgttggtgaaacagcccactttgaaattgaactttctgaacctgatgttcacggccagtggaagctgaaaggacagcctttgacagcttcccctgactgtgaaatcattgaggatggaaagaagcatattctgatccttcataactgtcagctgggtatgacaggagaggtttccttccaggctgctaatgccaaatctgcagccaatctgaaagtgaaagaattgcctcttatcttcatcacacctctcagtgatgttaaagtcttcgagaaagatgaggctaagtttgagtgtgaagtatccagggagcccaaaacattccgttggctaaaaggaacccaggaaatcacaggtgatgacagatttgagcttataaaggatggcactaagcattcaatggtgatcaagtcagctgcttttgaagatgaagcaaaatacatgtttgaagctgaagataagcacacaagtggcaaactgatcattgaaggaatccggctcaaattcctcacccctctcaaagatgtaactgccaaagagaaggaaagtgctgtatttactgtggagttatctcatgataacatccgagttaaatggttcaagaatgaccagcgcctacacaccaccaggtcggtctcaatgcaagacgaagggaaaactcattcgatcacattcaaagacctgtctattgatgacacctcccaaattagagtagaagctatggggatgagttcagaagctaaactcactgtgcttgagggagacccatattttacaggaaaacttcaagattatactggtgtagagaaagatgaagttattctacagtgtgaaattagcaaagcagatgcaccagtgaaatggtttaaggatgggaaggaaataaagccatccaaaaatgctgttattaaggcagatggcaagaaacgcatgctaatcctaaagaaagccttgaaatcagatattggacagtacacctgtgactgtgggacagataagacctcaggaaaacttgacattgaggatcgggaaattaaactggtgcgacccctgcacagtgtggaggtgatggagactgagacagcacgctttgaaaccgaaatctctgaagatgatatccacgccaactggaaactcaagggagaggccctactccaaacacctgattgtgaaattaaggaagaaggcaaaatacactcccttgttttgcacaactgtcgcctggaccagacgggtggggtggatttccaagctgccaatgttaaatctagtgcccacctccgagttaagccacgagtaattggtcttctgaggcctttaaaggatgtcaccgtgactgcaggggaaacagccaccttcgactgcgagctctcctacgaagatatcccagtggaatggtatctcaaagggaagaaactagagcccagcgataaggtggtcccacgttcagaaggaaaagttcatacacttactctgagggatgtaaagttagaagatgctggggaagtccaactaacagcaaaagatttcaaaactcacgccaacctctttgtgaaagaacccccagttgaattcactaagcctcttgaggaccagacggtcgaagagggagccactgcagtgctggagtgtgaagtctccagagaaaatgctaaggtgaaatggttcaaaaatgggacagaaatcctcaaaagcaagaagtatgaaattgttgctgatggcagggtcagaaaacttgttatacatgactgtaccccagaggatattaaaacatacacttgtgatgctaaggattttaagacttcctgtaacctgaatgtcgtgcctcctcatgtggaattcttaagaccactcaccgaccttcaagttagagaaaaagaaatggctcgatttgagtgtgaactttcccgagaaaatgctaaggttaagtggtttaaagatggtgctgaaattaaaaagggcaaaaaatatgacatcatatccaagggagcagtgcgcattcttgtcatcaacaaatgtctactggatgatgaagctgaatattcctgtgaagtaaggacagcgagaacttctggcatgctgacagttctggaagaagaagctgtctttaccaaaaatcttgccaacattgaagttagtgaaacagacactataaaactggtttgtgaagtctccaaacctggcgcagaagtgatttggtataaaggggatgaggagatcattgaaacaggaagatatgaaatactgactgaaggacggaagagaatcctggtcattcagaacgctcaccttgaggatgctggcaactacaactgtcgactcccaagctctcgaaccgatggcaaagtcaaagtacatgaactggctgctgaatttatctcaaagcctcaaaaccttgaaatacttgaaggagaaaaggctgaatttgtctgctctatatcaaaagaaagctttccagtccagtggaagagggatgataagacacttgaatctggagataaatatgacgttattgctgatggtaaaaagagggtcctagttgtgaaagatgccacattacaagatatgggcacttacgttgtcatggtaggggccgccagagcagcagctcacttgacagtcattgaaaaactcaggatcgtagttcctcttaaggacacccgggtgaaggaacaacaggaagttgtcttcaactgtgaagtcaatactgaaggtgccaaagccaaatggttcagaaatgaagaagctatatttgatagttcaaaatacatcattctccaaaaagacctagtctacaccctcagaattagagatgcacacttagatgaccaagccaactataatgtgtctttgaccaatcacagaggtgaaaatgttaaaagtgcagccaatctaatagtagaagaggaagaccttaggattgttgagcctcttaaagatattgaaacaatggagaagaaatctgtcacattctggtgcaaggtgaatcgtctcaatgtaacactgaagtggaccaaaaatggtgaagaagtgccttttgacaaccgtgtctcatacagagttgataagtacaagcacatgttaaccattaaagactgtggcttcccagatgaaggtgaatacattgtcactgctggacaagataaatctgttgctgagcttctcatcatagaagccccgacagaatttgtggaacacttggaagatcagacagtcactgagttcgatgacgctgtcttctcctgccagctctccagagagaaagccaatgtaaaatggtacagaaatgggagagaaatcaaagaaggcaaaaaatacaaatttgaaaaagatggaagtatacacagactcattataaaagattgcaggctggatgatgagtgtgaatatgcttgcggggtagaagacaggaagtctcgtgctagactttttgtggaagaaattcctgttgagatcatcaggcctccacaagatattcttgaagcccctggtgctgatgttgtctttttagcagaactcaataaagataaggtggaagtccaatggctaagaaataacatggttgttgtccagggtgataaacaccagatgatgagtgaaggaaagatacatcgactacagatttgtgatattaagccccgtgaccagggtgaatacagatttattgccaaagacaaagaagccagagctaagcttgaactggcagctgcaccaaaaatcaagacagctgaccaagaccttgtggttgatgttggcaagcctctgacaatggtggtgccatatgatgcctaccccaaagcagaagctgaatggtttaaagaaaatgaacctttatctacaaaaaccattgatactacggctgaacaaacttctttcagaattttagaagccaagaaaggagacaaagggaggtataaaattgtgcttcagaacaaacatggaaaagcagaaggattcatcaatttaaaagttattgatgttcctgggccagtacgtaacttagaagtgacagaaacatttgatggtgaagtgagccttgcttgggaagaacctttaactgatggtggaagcaaaatcataggttacgttgttgaaagacgtgacattaagagaaagacctgggttctggccacagaccgtgcagagagttgtgagtttactgtcactggtctacagaaaggaggagttgagtacctattccgtgtgagtgcaagaaacagagttggcactggtgagccagtagaaactgacaatcctgtagaagcaaggagtaaatatgatgttccaggccctcctttgaatgtaaccatcactgatgtgaatcgatttggtgtctcactgacatgggaaccaccagagtatgatggaggtgctgagatcacaaactacgtcattgaattaagagacaagacttctatcaggtgggatactgccatgactgtgagagctgaagacctgtctgcaactgttactgatgtggtagaaggacaggagtacagtttccgagtgagagcccaaaatcgaattggagttggaaaaccaagtgcagccacacccttcgtcaaagttgctgatccaattgagagaccaagtcctcctgtaaacctaacttcctcagatcagactcagtcatcagttcagctcaaatgggaacctcctctgaaagatggaggaagcccaatattaggctatataattgagcgatgcgaagaaggaaaagataattggattcgttgcaatatgaaacttgtccctgaactgacttacaaggttaccggattggaaaaaggaaataaatatttatatagagtatctgcagaaaataaagctggtgtttcagatccatctgaaattcttggtcctctcaccgctgacgatgcatttgttgaaccaacaatggatttaagtgcatttaaagatggtctggaagttattgtcccaaatcctatcacgatcctggttccaagtacaggctatccaaggccaactgcaacctggtgttttggagataaagtactagaaacaggggaccgggtgaaaatgaagaccttgtctgcctatgccgaacttgtcatttctccaagtgaacgttcagacaagggcatttatacactgaaattagaaaaccgtgtgaaaacaatttctggggaaattgatgtcaatgtaattgctcgcccaagtgcacccaaagaattgaaatttggtgatataaccaaggactcagtacatttgacttgggaaccacctgatgatgatggaggaagtccgttaactggatacgttgttgaaaaacgagaagtcagccggaaaacatggactaaagttatggactttgtgactgatctagaattcacagttcctgatcttgttcaaggaaaagagtacttatttaaagtttgtgctcgtaacaaatgtggccctggagaacctgcatatgttgatgaacctgtaaatatgtcaactcctgcaacggtacctgacccaccagagaatgttaaatggagagatcgaacagccaatagcatcttcttaacatgggatccacctaaaaatgatggtggttcacgcatcaaaggatatatagttgaaagatgtccacgtggttctgataaatgggttgcctgtggagaacctgttgcagaaacaaaaatggaagtgacaggtcttgaggaaggcaaatggtatgcctaccgcgtgaaggccttaaacaggcagggtgctagcaaaccaagcagacccacagaggaaatccaggctgtggacacacaagaggccccagaaatcttcctcgatgtgaagctccttgctggtctcactgtaaaagctgggaccaagattgaacttcctgccaccgtaaccggaaaacctgaacctaaaataacttggacaaaggctgatatgattctgaagcaggacaaaagaattaccattgaaaatgtccctaagaaatccacagtgactattgttgatagtaagagaagtgacactggcacatatatcattgaggctgtgaatgtgtgtggccgggccactgctgtggtggaagtgaacgtcttagataaacccggaccaccagctgcctttgacatcacagatgtaaccaatgagtcatgtcttctaacatggaacccaccacgcgatgatggtggatctaagatcacaaactatgttgtggagagacgagcaactgatagtgaagtgtggcacaagctctcatccaccgtcaaggatacaaacttcaaggccaccaaattaatccccaataaagagtacatcttcagagttgctgcagaaaacatgtatggtgttggtgaaccagttcaggcctctccaataacagccaaatatcagtttgatccacctggtcctccaactcgcctagaaccttctgatatcactaaagacgcagtgactctcacatggtgtgagccagatgatgatggtggcagcccaatcacaggatactgggttgaaagactggatcctgatacagataaatgggttagatgcaataagatgccagtaaaggacacaacatacagagtgaaaggtctcactaataagaaaaaatacagattccgtgtgttggctgaaaatcttgctggacctggaaaaccaagcaaatcaactgaaccaatcttaataaaggatcccatagatcctccatggccccctggaaaaccaactgtaaaagatgtaggcaaaacatcagtaaggttgaattggacaaaaccagaacatgatggaggtgcaaagattgagtcttatgtcattgaaatgctgaagactggaacagatgagtgggtcagagtggcggaaggggttcccaccactcagcacttgctcccagggctcatggaaggacaggaatactcattccgagttagagctgtgaataaggctggggaaagtgaacccagtgaacccagtgaccctgtgctttgccgggagaagctatatcctccatcaccaccacgctggcttgaagttattaatatcacaaaaaatacagcagacctaaaatggacagttcctgagaaagatggagggtcccccatcaccaactacattgtggaaaagagagacgtcaggcgaaaaggctggcaaacagtggataccactgtcaaggacaccaagtgcacagtcaccccactgactgagggctctttatatgtgttccgagttgctgcagaaaatgctataggacaaagcgactacaccgaaattgaggactctgtgctggccaaagacacctttaccactcctggaccaccctacgccctggcagtggttgatgtgacaaaacgacatgttgacctaaagtgggagccacctaaaaatgatggtggaagaccaatacagagatatgtcattgagaagaaagaaaggttaggtacccgttgggtgaaagctggaaagactgcaggacctgactgtaacttcagagtaactgatgtcatcgaaggaacagaggtccagtttcaggttcgggctgaaaatgaagctggagttggccacccaagtgaacccacagaaatcctatccattgaagatccaacaagtcctccctcaccaccccttgacctacatgtgactgatgctgggagaaaacacattgccattgcttggaagcctccagagaaaaatggtggaagtcctatcataggataccatgttgaaatgtgtccagtaggcactgagaaatggatgagagttaattctcgcccaataaaggacttgaaattcaaggttgaagaaggtgttgttcctgacaaagaatatgtcctgagagtgagagcagtcaatgctattggtgtcagcgagccatctgaaatctctgaaaatgtggttgccaaagacccagactgcaagccaacaattgacctggagactcatgacattattgttattgaaggtgaaaagttaagcattcctgttcccttcagagctgtcccagttccaactgttagttggcataaagatggcaaagaagttaaagcaagtgatagattaacaatgaagaatgatcacatctctgcacaccttgaagttcccaagagtgtccgtgcagatgccggaatttataccattacactggagaataagctcggctcagcaacagcctcaatcaatgtcaaagtcataggcctacctggaccatgcaaagatattaaagcaagtgacattaccaagagttcttgtaagttaacttgggaacctccagaatttgatggtggaaccccaattcttcattatgtcctggagcgcagagaagctgggaggagaacatatataccagtcatgtctggtgagaacaaactgtcatggactgtgaaggatctcataccaaatggtgaatacttcttccgtgttaaagcagtcaacaaggttggtggaggagaatatattgaactgaaaaatccagtcattgctcaagatccaaagcaaccccctgatccacctgtagatgtagaggttcataatcctacagcggaggcaatgactattacatggaagccacctttgtatgatggagggagcaagataatgggctacatcatagagaagattgctaagggtgaagaaaggtggaagagatgcaatgaacacctggtaccaatcctgacctatacagcaaaaggacttgaagaggggaaagagtaccaattccgtgtgcgagcagagaacgccgcgggtattagtgaaccttctcgggctactcctccaaccaaagctgtagatcccattgatgcccccaaagtcattctgagaacaagcctagaagtgaaacgaggtgatgaaatagcacttgatgcaagtatttctggatcaccttacccaactattacatggataaaggatgaaaatgttattgtaccagaggaaattaagaagcgtgcagcacccttggttaggagaaggaagggtgaagttcaagaagaagaaccatttgtcctgcctctgacacagcgtttgagtattgacaacagcaaaaagggagaatctcagctacgcgtccgagattctctccgacctgaccatggtctgtatatgatcaaagttgaaaatgaccacggtattgcaaaagctccttgtactgtcagtgtgttagatacaccgggaccaccaatcaactttgtatttgaagatatcagaaagacctcagtcctttgtaaatgggaaccaccccttgatgatggtggcagtgaaatcataaactacactttggaaaagaaagacaagacaaaacccgactcagaatggattgttgtcacttcaacacttagacattgcaaatattcagtaacaaaactgattgaaggaaaagagtacctcttccgtgtaagagctgaaaacagatttgggccaggtccaccatgtgtttcaaagccacttgtggctaaagatccatttggaccacctgatgcaccagataagcccattgtggaagatgttaccagcaacagtatgctagtgaaatggaatgaaccaaaagataatggaagccccattttgggttactggcttgaaaaacgtgaagttaacagtacacattggtctcgtgtcaacaaaagccttctgaatgccttgaaagccaatgtagatggcttattagaaggactcacctatgtcttcagagtatgtgctgaaaatgcagctggacctggaaagttcagtccaccttcagatcccaaaacagcacatgatccaatctctcctcctgggccacctatcccaagagtcactgacacaagctctacaactattgaactagaatgggaacccccagctttcaatggtggtggggaaattgttggctattttgttgataagcagttggttggcacaaatgaatggtcacgctgcacagagaagatgatcaaggtccgtcagtacaccgtcaaagaaatccgagagggtgctgattacaaacttcgggtgagtgctgtcaatgccgcaggggaaggaccgcctggagaaacacaacctgttactgtggctgaaccacaagagcctccagctgtggaactggatgtttctgtcaagggtggaatacaaataatggctgggaagactcttagaattccagctgtggtgactggtcgccctgtacctacaaaagtatggaccaaagaagaaggggagctggataaagaccgtgttgtaatagacaacgttggaaccaaatctgaactaattatcaaggatgcactgcgaaaagaccatggcagatatgtgattacagctacaaatagctgtggttccaaatttgcagcagccagggtagaagtttttgatgtccctggtccagttcttgacttaaaacctgttgtaacaaacagaaaaatgtgtctacttaactggtctgatccagaagatgatggaggaagtgaaataacaggctttatcattgaaagaaaagatgccaagatgcatacttggagacaaccaatagagactgagagatctaaatgtgacatcacaggtctgcttgagggacaagaatataagttccgtgttattgccaagaacaagtttggctgtggccctcctgttgaaataggaccaattcttgcagttgatccactaggtcctccaacatctccagagaggctcacatacactgaaaggacaaagtccactatcacacttgactggaaagagccccgcagtaatggtggcagtcccatccaaggatatatcattgaaaaacggcgtcatgacaaacctgactttgaaagagttaacaagcgactctgcccaaccacatcttttctggttgaaaatcttgatgaacaccaaatgtatgagttccgtgtcaaagctgtcaatgaaattggtgaaagtgaaccatccctacctcttaatgtagtcatacaagatgatgaagtgcctccaactattaagttgcgtctgagtgttcgaggagacactatcaaagttaaggcaggagagcctgtccacatccctgcagatgtgacaggccttccaatgcctaagattgaatggtccaaaaatgaaactgtaattgaaaaacccactgatgcacttcagataaccaaggaagaggtatcccgaagtgaggcaaaaactgagcttagcattcccaaagcggtccgggaggacaaaggcacttacacagttactgcttccaatcgccttggctcagtgttccgaaatgttcacgttgaagtatatgaccgcccatccccaccaagaaatcttgctgttactgacattaaagctgaatcttgctacttgacatgggatgcccctcttgataatggtggcagtgaaatcacccattatgttattgacaaacgtgatgcaagtaggaagaaagcagaatgggaggaagtcaccaacactgctgtagagaaaagatatgggatctggaaacttatccccaatggtcagtatgagttccgagtcagggcagtgaataaatatggaatcagtgatgagtgcaaatcagataaagtagtcattcaagatccttatcgccttcctggacctccaggaaaaccaaaagttttggcacgcaccaaaggatcaatgctagtgagctggactcctcctttggacaatggtggctctccaattactggctactggctggagaaaagagaagagggaagtccttattggtcacgtgttagccgagcaccaataaccaaagtgggattgaaaggcgtggaatttaatgttcctcgtttgcttgaaggcgttaaataccagttcagagccatggcaataaatgctgcaggaattggtcctcccagtgaaccatcagatccagaggttgcaggagatcccatatttccaccggggccaccttcttgcccagaagttaaagataaaacgaagtcaagcatctcactaggatggaaacctccagccaaagatggtggcagcccaatcaaaggatacattgtagaaatgcaagaagaaggtactactgactggaaaagagtaaatgaaccagacaaacttataactacctgtgaatgtgtggtgcctaatctgaaagagctcaggaagtacagattcagagtgaaagctgtcaatgaagctggtgaatctgaaccaagtgatacaactggggagatccctgccactgatattcaagaggaaccagaagttttcattgacattggagcacaggactgtctggtttgtaaagctggctcacagattaggattcctgctgtcatcaagggacgcccaacaccaaaatcatcttgggaatttgatggaaaggcaaagaaagcaatgaaggatggagttcatgacatacccgaagatgcacagctggagactgctgaaaactcctcagtaattattattccggagtgtaaacgatctcatacaggcaaatacagcatcacagccaagaataaagcaggacaaaagactgcaaattgcagagttaaagtcatggatgtaccaggcccacccaaagatctgaaagtcagtgatatcacaaggggtagttgcagactttcatggaagatgccagacgacgatggaggagacaggatcaaaggctatgttattgagaagaggactattgatggaaaagcctggaccaaagtcaatccagactgtggaagcaccacatttgtagtgcctgatctcctctctgaacagcaatatttcttccgtgtgcgagcagaaaaccgttttggtattggcccacctgtggaaaccattcagaggaccactgccagagatccgatatatcctcctgatcctcctattaaactcaagattggcctcatcacaaagaacacagtgcatctgtcatggaaacccccgaagaatgatgggggctcccctgttacccactatattgttgagtgccttgcatgggaccctactgggacaaagaaagaagcctggaggcagtgcaataagcgtgatgtggaagaactgcaatttactgttgaagacctagtagagggtggggaatatgaattccgagtcaaagctgtcaatgctgcaggagtcagcaagccttcagccactgttggccctgtgactgtcaaagaccagacatgcccaccatcaattgatctaaaagaattcatggaggttgaagaaggaaccaatgttaacattgtggccaaaattaaaggtgtgccattcccgacactaacctggtttaaagctcctccaaagaagcctgataacaaagaacctgttctctatgacacccatgtcaacaaactggtggtagatgatacttgcactttagttattccgcagtctcgcaggagtgacactggcttatataccatcacagctgtaaataatctgggaacagcatcaaaggagatgagactgaatgtcctgggtcgtcctggccctccagtgggacccataaaatttgaatctgtttcagcagatcaaatgacactatcttggtttccacctaaagatgatggtgggtctaagattacaaactatgtaattgagaaaagagaagctaacaggaagacatgggtccatgtctccagtgaacctaaggagtgcacgtacacgattcccaaattgctagaaggccatgaatatgtattccgaatcatggcccagaataaatatggcattggagaacctcttgacagtgaacctgaaacagcaagaaacctcttctctgtccctggagcaccagataaaccaacagttagcagcgtgactcgtaactccatgactgtcaactgggaagagccagaatatgatggaggctctcctgtgacagggtactggctggaaatgaaagacaccacttcaaagagatggaagagagttaaccgagatcctatcaaagccatgactttgggtgtttcttataaagtgactggtcttattgaaggttccgactatcaattccgggtatatgcaatcaatgctgctggcgtgggtccagcaagtctgccatcagacccagcgactgctagagatccaattgcccctcctggtcctccatttcccaaagtgacagattggactaaatcatctgcagatctggagtggtctcccccactaaaagatggtggatccaaagtaactggatacatcgttgaatataaagaagaaggaaaagaagaatgggaaaagggtaaagataaagaagtgagaggaacaaagcttgttgtgacaggattaaaggaaggagcattctacaaatttagagttagagcagtcaacattgctggcattggagaacctggagaggtcacagatgtcattgaaatgaaggacagacttgtttcacctgaccttcagctagatgccagtgtcagagatagaattgttgtccatgctggaggggtgatccgaatcattgcctatgtgtctggaaagcctcctccaaccgtcacctggaacatgaatgaaagaaccttacctcaagaagccaccattgagaccacagccattagctcatccatggtcatcaagaactgccagaggagccatcaaggcgtctattctcttcttgccaaaaatgaagccggagaaagaaagaagacaattattgttgatgtattagatgttccaggtcccgttggaacaccattcctagctcacaacctaaccaatgagtcctgcaaactgacatggttttctccagaagatgatggaggctctccaatcaccaattatgtcattgaaaagcgtgaatctgaccgcagagcatggaccccagtgacatatacagttacccgacaaaatgctactgtccagggtctcattcaaggaaaagcctactttttccgaattgcggctgaaaatagtattggcatgggtccatttgttgagacatcagaggcacttgttatcagagagccaataactgtaccagagcgtcctgaagacctggaagtcaaagaagttactaaaaatactgtaactttgacttggaatcctcctaagtatgatggtgggtcagaaattattaactatgtcctagaaagtcggctcattgggactgagaagttccacaaagttacaaatgacaacttgcttagcagaaaatacactgttaaaggcttaaaagaaggtgatacctatgagtaccgtgtcagtgctgtcaacattgttggacaaggcaaaccatcattttgcaccaaaccaattacttgcaaggatgagctggcacccccaacgcttcacctcgacttcagagataagctcacgattcgagttggtgaagcttttgccctcactggccgttactcaggcaaaccaaagcctaaggtttcctggttcaaagatgaagctgatgtgctggaagatgatcgcactcatataaagactacaccagcaacacttgctttagagaagatcaaggccaaacgttcagattccggcaaatactgtgtggttgtggagaacagtacaggctctaggaaaggtttctgtcaagttaatgttgttgaccgtcctggaccaccagtaggaccagttagttttgatgaggtgaccaaagattacatggttatctcttggaagcctcctttagatgatggaggcagtaaaatcaccaattatattattgagaagaaggaagtgggtaaagacgtctggatgccagtgacatctgcaagtgctaaaacaacatgcaaagtttctaaactacttgaaggaaaagattatattttccggatacatgctgaaaatctgtatggaataagtgatcctctggtgtctgattcaatgaaagccaaagatcgtttcagggttcctgatgcacctgatcagccaattgttacagaagttaccaaagactctgcattagtaacctggaataagccacatgatggaggaaaacccatcacaaactacatcctggaaaagagagaaactatgtctaaacgatgggctagagttaccaaagatcctattcatccatacactaaatttagggttcctgatcttctagaaggatgtcagtatgaattccgggtttctgcagaaaatgaaattggtattggagatccaagcccaccatccaaaccagtctttgctaaagatccaattgctaaaccaagtccacctgttaatcctgaagcaatagatacaacatgcaattcagtcgatctaacttggcagccaccacgtcatgatggtgggagcaagattctgggttatattgttgagtaccagaaagttggagatgaagagtggagaagagccaatcacacccctgagtcatgtcctgaaactaaatataaagtcaccggtcttcgggacggtcaaacctataagtttagagtgttagcagtcaatgcagctggtgaatcagatccagctcatgttccggagccagtcctagtaaaagacaggcttgaaccccctgagttgattcttgatgccaacatggcaagagaacaacacattaaagttggtgatactctaagacttagtgccatcatcaaaggagtgccattcccaaaagtaacttggaaaaaagaagacagagatgctccaactaaagcaagaattgatgtgactccagttggtagcaagcttgaaattcgtaatgctgcccatgaagatggtggaatttattctttaacagtggagaatccagctggttcaaaaactgtctcagtaaaagtacttgtattagataaacctgggccacctagagatctggaagtcagtgaaattaggaaagattcatgttaccttacttggaaagaaccactggatgatggtggttctgttattaccaattatgtggttgagaggagagatgttgccagcgcccagtggtcacctctctcagctacatcaaagaaaaagagtcacttcgctaagcatctgaatgaaggcaaccagtacctcttccgagtagctgcggagaaccagtatggacgtggtccttttgttgaaacaccaaaaccaatcaaggctttggatcctctccatcccccagggccacccaaggacctgcaccatgtagatgttgacaagactgaagtctccctagtctggaataagccggatcgtgatggtggttctccaatcactggatatttggtagaatatcaagaagaaggcacccaggactggattaaatttaagactgtgacaaacttagagtgtgtggttactggactacaacaaggaaagacctatagattccgtgtaaaagctgaaaacattgtgggtcttggtctccctgacacaactatcccgatagaatgtcaagaaaaactagtgcctccatccgtggagctagatgtgaaattaattgaaggtcttgtggtaaaggctggaaccacagtcagattccctgctattataagaggtgtgcctgttcctactgcaaagtggacaaccgatgggagtgagattaaaaccgatgagcactacacagttgaaacagacaacttctcatcagtacttaccattaagaactgcttaaggagagacactggggaatatcaaatcacagtttccaatgcagccggtagcaaaacagtagccgtacatcttactgttcttgatgttcctgggccaccaacaggtcctattaatattctggatgttactcctgaacacatgactatctcatggcagccacctaaggatgatggaggaagccctgtgataaattatattgttgagaaacaagatacaaggaaagacacgtggggtgttgtctcttccggaagcagtaagacaaagctgaaaatcccacatctgcagaagggctgtgaatatgttttccgagttagagcagagaataagataggtgttggtcctccccttgactccacacctactgttgctaagcataaatttagtcctccgtctcctcctggtaaaccagtggttactgacattactgaaaatgcagcaacagtgtcttggaccctgccaaaatctgatggtggcagtccaataactggctactatatggaacgtcgagaagtaactggcaaatgggtgagggtcaacaaaacacctatcgctgacctgaagttcagagtgactggactctatgaaggaaatacatatgagtttagagtttttgctgaaaatcttgcaggactaagcaaaccatccccaagttctgatccaataaaagcttgccggcccatcaaaccacctggaccacctattaatcctaaactgaaagacaagagcagagaaacagctgatttggtgtggacaaagcctctcagtgatggtggtagccccattctaggatatgtagtggaatgtcagaaacctggcacagcacaatggaacaggattaataaagatgaactcattaggcaatgtgcctttagggtacctggactaattgaaggaaatgagtacagattccgtataaaggcagctaatattgtaggagagggtgagccaagagaactagcagaatctgtgattgcaaaagatatccttcatcctccagaagtagaacttgatgttacttgtcgtgatgttattaccgtgagagtaggccaaactatccgcattctagctcgagtcaaaggcagacctgaaccagacataacttggactaaggaaggcaaagtattggtccgagaaaagagggtggaccttattcaggatctacctcgtgttgagttacaaattaaagaagctgttagagctgatcatggcaagtatatcatctcagctaagaacagcagtggacatgcccaaggttcagccatcgttaacgtccttgacagacctgggccttgccagaatttgaaggttaccaatgtaaccaaagagaactgtacaatttcttgggaaaacccactagataatggtggctcagaaataacaaacttcatagtagaatatcgcaaaccaaaccagaaaggctggtcaattgttgcatcagatgtcactaaacgattaatcaaggccaaccttttagccaacaatgaatactatttccgagtttgtgcagagaataaagtaggtgttgggccaaccatcgaaacaaaaactcccattctggctattaaccctattgacagaccaggtgagcctgaaaaccttcacattgcagataaaggaaagacatttgtctatctaaagtggcggaggcctgactatgatggtggcagtccaaatctgtcatatcatgttgagagaaggcttaagggctccgatgactgggaaagagtgcataaaggaagcattaaagaaactcactacatggttgacagatgtgttgaaaaccagatttatgagttcagagtgcaaacaaagaatgaaggtggggaaagtgactgggtgaagacagaggaagttgttgtgaaagaagacttacaaaaaccagtacttgatctgaaattaagtggggtcctaactgtcaaagcaggggacaccattaggcttgaggcaggggttagaggcaaaccattcccagaagttgcatggaccaaggacaaagacgctacagacttaacaagatcaccaagggtcaagattgatacccgtgctgattcatctaaattttctcttactaaagcaaagcgaagtgatgggggtaaatatgtagttacggcaactaacacggctggcagttttgtggcctatgccactgtcaatgttttagataagcctggtcctgtgagaaatctgaaaattgttgatgtgtccagtgataggtgtactgtttgctgggatccaccagaagatgatggtggctgtgaaatccaaaattatattctagaaaaatgtgagacaaagcgaatggtttggtctacctattctgctactgtcttgacacctggtactacagtaacacgtctcatagaaggaaatgaatatattttcagagtccgtgcagaaaataaaataggcacagggcctccaacagaaagtaaaccagtcatagccaaaaccaagtatgataaacctggtcgccctgatcccccagaagtcactaaagtaagcaaagaagagatgactgtggtttggaatccacctgaatatgatggtggaaagtctataactggatactttttggagaaaaaggaaaagcattcaacacgatgggtccctgtcaacaagagtgcaatccctgagagacgtatgaaagtacagaatctcctcccagaccatgaatatcagttccgtgtcaaggcagaaaatgaaattggaattggagaaccaagcttgccttcaagaccggtggtggcaaaagaccccatagagccacctggtccaccaaccaatttcagagtggttgatacaaccaaacattccataactcttgggtggggaaaaccagtctatgatggtggtgcaccgatcattggatatgttgtggaaatgagaccaaaaatagcagatgcgtctcctgatgaaggctggaaacggtgtaatgctgcagcacagcttgtacgcaaggaattcactgttaccagcttggatgaaaaccaggaatatgagttcagggtgtgtgcccaaaaccaagttggtattgggcgccctgcagagctaaaggaagctatcaaacctaaagaaatactagaacctccggagattgatttggatgccagcatgaggaaactggtcatagtgagagcaggatgccctattcgtctctttgctatagtgagaggacgaccagcccctaaagtcacttggcgaaaagttggcattgataatgtggtcagaaaaggacaagttgatctggttgacactatggccttccttgtcatccccaattctacccgtgatgactcaggaaaatattccttaacacttgtgaacccagcaggagaaaaggctgtattcgtaaatgtcagagtattagacactcctgggcctgtgtctgatttaaaagtttcagatgtcactaaaacatcatgccatgtgtcctgggcccctcctgaaaacgacggtgggagccaagtgacacattatatcgtggagaaacgtgaggcagacagaaagacatggtcgaccgttaccccagaagttaagaaaacaagcttccatgtaaccaatcttgtccctgggaatgagtattacttcagagtaactgctgtcaacgaatatggccctggcgtcccaacagatgtcccaaaaccagtgcttgcatcagatcctctaagtgagccggatcccccaaggaaattagaagtgactgaaatgaccaagaacagtgccaccttagcctggttacctcccctacgtgatggaggtgctaaaatcgatggctacatcactagttacagagaagaagagcagcctgcagatcgctggacagagtactcagtggtaaaagatctgagccttgttgtcactggcctaaaggaaggaaagaaatacaaatttagagtagcggccagaaatgctgttggagtcagtttgccaagagaagctgaaggagtgtatgaagccaaagaacaactgttgccaccaaagatccttatgccagagcaaataactatcaaagctgggaaaaaactccgaattgaagcccatgtgtatggaaagcctcatcccacctgtaaatggaaaaaaggagaagatgaagttgtcacatccagccacctggcagtgcataaagcagacagctcttcaattctgatcataaaagatgtgactaggaaagacagtggttactacagcctcacagcagagaacagttctgggacagacactcagaaaatcaaagttgtagtcatggatgcccccggcccccctcagcctccatttgacatttctgatatagacgctgatgcttgctccctgtcatggcacatccctctggaggacggaggcagtaacatcaccaattatatagtggagaagtgtgatgtaagccgaggtgactgggtcacggctctagcttcagtcacaaaaacttcctgcagggttggaaagctgatcccaggccaggagtacatcttccgggtccgtgctgaaaaccgatttggcatttcagagcctctcacatctccaaagatggttgcgcagttcccatttggtgttcctagtgaaccaaagaatgcacgagtcaccaaagtcaacaaggactgtatttttgttgcttgggacagaccagatagtgatggagggagccccattattggttatctgattgaacgcaaggaaagaaacagtttgctgtgggtgaaagccaatgatactcttgtccggtcaactgaatatccttgtgctggccttgtagaaggtcttgagtattcattcagaatctatgccctaaacaaagctggatccagcccacccagcaaacccacagaatatgtaactgcaagaatgccagttgatcctcctgggaaacctgaggttattgatgtcaccaagagtactgtatctctgatctgggctcgtccaaagcatgatggaggcagtaaaattattggctatttcgtagaagcttgcaaacttcctggtgataaatgggtacggtgcaatactgcacctcaccagattccccaggaagagtacacagctactggcctagaagagaaagctcagtatcaatttagagctattgccaggaccgcggtaaacattagcccaccttctgaaccttctgatccagtgactatcctcgcagaaaatgtccctcccaggatagacctgagtgtggctatgaaatctttgcttactgtgaaagctggaactaatgtctgcttggatgctactgtttttggtaaaccgatgccaacagtttcttggaaaaaagatggcacactgctaaaaccagcagaaggcataaagatggccatgcagcggaatctgtgcaccttggagctattcagcgtgaaccggaaggactcaggagactataccattactgctgaaaattcaagtggttctaaatcagccaccattaagcttaaagtgttagataaaccgggtcctccagcatctgttaaaatcaacaaaatgtattcagatcgtgctatgctttcttgggaaccgcctcttgaagatggaggctcagaaatcaccaactatattgttgacaaacgtgaaacaagcaggcccaactgggctcaagtctctgcaactgtgcctatcaccagctgcagcgtggagaaacttatagagggccatgagtatcagttccgtatttgtgctgaaaataaatatggagtaggcgatccagtcttcactgaaccagcaattgccaaaaacccatatgacccaccaggacgctgtgatcctcctgttattagcaacataaccaaagatcacatgacagtcagctggaagccaccagcagatgatgggggctcacccatcactggctatttgcttgaaaagcgggaaacccaggctgttaactggactaaggtcaacagaaaacctattatagaaagaacattaaaagcaacaggtcttcaagaaggtaccgaatatgagttccgtgttacagctataaataaagctggaccaggcaaacccagtgacgcatccaaggccgcttatgctcgggaccctcagtatcctcctggcccaccggctttccctaaagtatatgatacaactcgcagctctgtgagtctatcttggggcaagccagcctatgacggcggcagccctatcattggttatctcgttgaagtaaaacgggctgactccgataactgggtgaggtgcaacttaccacagaatctacagaaaacccgctttgaggttactggcctgatggaagacacacaatatcaattccgtgtgtatgccgttaataagattggatacagtgaccccagtgatgtgccagataaacactatcccaaggacatcttaattccacctgagggagaacttgatgcggacttaaggaagacactcatattacgtgctggagttactatgagactatatgtaccagtaaaaggacgcccacctccaaagattacttggtctaaaccaaatgtcaatctaagagacaggattggactggacataaagtcaactgactttgacactttcttgcgctgtgaaaatgtgaacaaatatgatgcaggaaaatatatcttaaccctggagaacagctgtggtaaaaaggaatataccattgttgtgaaagtgcttgatactcctgggccacctgtcaatgtgactgttaaggaaatatccaaagactctgcttatgttacctgggagcctcccattattgatggcggaagccccatcataaactatgtggtacaaaaacgtgatgcagagaggaaatcctggtctacagtgacaactgagtgctccaaaacaagcttcagagtagctaatttggaggagggaaaatcctacttcttccgagtgtttgctgaaaatgagtatggcattggtgatcccggtgaaactcgtgatgctgtcaaagcttcccaaactcctggaccagttgtggacctgaaagtgaggtctgtatctaagtcatcctgtagcattggctggaaaaagcctcacagtgatggtggaagtcggattattggatatgtagttgatttcctgactgaagaaaataagtggcaacgagttatgaaatccttaagcctacagtactctgcaaaagatttgactgaagggaaggaatataccttcagagtgagtgctgagaatgaaaatggagaaggaaccccaagcgaaatcactgttgtggcaagggatgatgttgtggctcctgatcttgacttaaagggtctacctgatttgtgctacttggctaaagaaaacagcaacttccggcttaagatccccataaaaggcaagccagctccatcagtctcctggaagaaaggggaagatcctctagcaactgacactagagtcagtgttgagtcatctgcggttaacacaactcttatagtgtacgattgccaaaaatctgatgctggaaaatacacaatcacacttaagaatgttgctggcaccaaggaaggaactatctccataaaggttgttggcaagcctggcatccccactggaccaatcaaatttgatgaagtcacagcagaagccatgaccttaaagtgggctcctccaaaggatgatggaggttctgaaatcaccaactatatcctagagaagagggattctgtgaacaacaagtgggtgacgtgcgcctcagctgtccagaaaaccacctttagagtaaccagacttcatgagggcatggaatataccttcagggtcagtgccgaaaataaatatggtgtaggggaaggcctgaaatcggagccaattgttgcgagacatccatttgatgtgcctgatgctcccccacctcccaatattgtggatgtcagacacgattcagtatctctaacttggactgaccccaagaaaactggtggttctccaattacagggtatcatctcgagttcaaggaaagaaacagccttttgtggaagagagctaacaagactccgataaggatgagagactttaaagtgacaggattaactgaaggtcttgaatatgaattccgagttatggcaatcaatttagcaggtgtgggcaagccaagcctaccatcagagcctgttgtggcactggacccaattgatcctcctggaaaacctgaggttattaacataacaaggaattcagtgactctcatttggactgaacctaaatatgacggtggtcataagttaactggatatatagtggagaagcgagatctaccttcgaagtcttggatgaaagccaaccatgttaatgtcccagaatgtgcctttactgtaactgaccttgttgagggtggaaaatatgaattcagaattagagcaaagaatacagcaggtgctatcagtgctccatcagaaagtacagaaaccattatttgcaaggatgaatacgaggcaccaacaattgtccttgatcccacaataaaagatgggctaacaattaaagcaggggataccattgttttgaatgccattagcattcttggcaaaccccttccaaaatcaagttggtccaaggcaggaaaagacattagaccatcagatatcactcagataacttcaaccccaacatcttccatgcttactatcaagtatgccactagaaaagatgcgggtgaatataccatcactgctaccaatccttttggcacgaaggtggaacatgtgaaggtaacagtccttgatgtacctggtcccccaggtcctgttgaaatcagtaatgtttctgctgaaaaagcaacacttacatggacacctcccttggaagatggcggctcaccaattaagtcctatatacttgaaaagagagaaaccagccgacttttgtggacagtggtttctgaagatattcagtcttgcaggcatgtggcaaccaaacttatccaaggaaatgagtacatcttccgggtctcagctgtaaaccactatggcaaaggagaacctgtacagtctgaacctgtcaaaatggtagacagatttggtccccctggccctcctgaaaaaccagaggtatcaaatgtcactaagaacactgccactgtcagctggaaaaggccagtggatgatggtggcagcgaaattacaggatatcatgtagaaaggagagaaaagaaaagcctgcgatgggtgagagcaataaaaacaccagtttccgatctcaggtgcaaagtaacaggactgcaagaaggaagcacctacgaattccgtgtcagtgcagaaaacagagcaggaattggtccacccagtgaggcttcagattctgttctgatgaaagatgcagcatatcctccaggaccaccttcaaatccgcatgtcactgatactaccaagaaatctgcttctttggcatggggcaagcctcattatgatggtggacttgaaatcactggctatgtcgtggagcatcaaaaagtaggagacgaggcctggataaaagataccacaggaaccgccctcagaatcactcagttcgttgttcctgatcttcagactaaagaaaaatacaacttcagaatcagtgccatcaacgatgcaggtgttggggagccagcggtgattccagatgttgaaatcgtagaacgggagatggctcctgattttgaactagatgccgagcttcgaagaacacttgttgttagagcaggactcagtattaggatatttgtgccaattaaaggtcgtcctgctcctgaagtgacatggaccaaagataacatcaacctgaaaaaccgagccaacattgaaaatacggaatcatttactcttctgattatcccagaatgtaacagatatgataccggtaaatttgtcatgaccattgaaaacccggctgggaagaaaagtggctttgtgaacgtcagagtcttggacacgccaggcccagtcctcaacctgcggcctacagacatcacaaaggacagtgtcaccctgcactgggacctccctctgatagatggaggctcacgtataacaaactacattgtagagaaacgtgaagcaacacggaaatcttattccacagccaccactaagtgccataaatgcacatataaagttaccggcttgtctgaagggtgtgaatatttcttcagagtgatggcagagaatgaatatggaattggtgagccaacagaaactacagagcccgtaaaagcctctgaagcaccatctccaccagacagccttaacatcatggacataactaagagcaccgtcagcctggcatggcctaagcccaaacacgatggtggcagcaagatcactggctatgtgattgaagcccaaagaaaaggctctgaccagtggacccacatcacaaccgtgaaagggttagaatgtgttgtgaggaatctaactgaaggagaggaatataccttccaagtgatggcagtgaacagcgcggggagaagtgcccctagagaaagcagacccgtcattgtcaaggagcagacaatgcttccagagctggatctccgtggcatctatcagaaactggtcattgccaaagctggtgacaacatcaaagttgaaattccagtgctcggtcgaccgaagcccacagtgacatggaaaaaaggagaccaaattcttaaacagacacagagagttaattttgaaaccacagcgacttcaaccattttaaatatcaatgagtgtgtcagaagtgatagtgggccctatccattaacagcaaggaacattgtaggagaggttggtgatgtcatcaccattcaagtccatgatatcccagggccacctactggaccaatcaaatttgatgaagtttcatctgattttgtaaccttctcttgggacccacctgagaacgatggtggtgtaccaataagcaactatgtagtggaaatgcggcagactgacagtactacctgggttgagttagcaaccaccgttatacgtactacctataaagccacccgccttactactggattagagtatcagttccgtgtaaaagctcagaatagatatggagttggaccaggcatcacatcagcatgcatagttgccaactatccatttaaggttcctggacctcctggtacccctcaggtaactgcagttaccaaggattcaatgacaattagctggcatgagccactttctgatggtggaagccccattttaggatatcatgttgaaagaaaagaacgaaatggtattctctggcagactgtgagcaaagctttagtaccaggcaacattttcaaatcaagtggacttacagatggtattgcttatgagttccgggtgattgcagaaaacatggcaggcaaaagtaagccaagcaagccatcagaacctatgttggctctggatcccattgacccacctggaaaaccagtacctctaaatattacaagacacacagtaacacttaaatgggctaagcctgaatatactgggggctttaaaattaccagttatatcgttgaaaagagagaccttcctaatggacggtggctgaaggccaacttcagcaacattttggagaatgaatttacagtcagtggcctaacagaagatgctgcatatgaattccgtgtgatcgccaaaaatgctgcaggtgccatcagtccaccatctgagccatctgatgctatcacttgcagggatgatgttgaggcaccaaagataaaggtggatgttaaatttaaggacacggttatattaaaagcaggtgaagcattcagactggaagctgatgtttcaggccgcccacctccaacaatggaatggagcaaagatggaaaagagctggaaggcacagcaaagttagaaataaaaattgcagatttctctactaatctggtaaacaaagattcaacaagaagggatagtggtgcctatacccttacagcgactaatcctggtggctttgctaaacacattttcaatgtcaaagttcttgacagaccaggcccacctgaaggacctttggctgtaactgaagtgacatcagaaaagtgtgtactatcatggttccctccactggatgatggaggtgccaaaattgatcattacatagtacagaaacgtgaaaccagcagattggcatggacaaatgtagcctcagaagtccaagtaacaaagctaaaggtcactaaactcttgaaaggcaatgaatacatattccgtgtcatggctgtaaataaatatggagtgggagagccactggaatcagagcctgtgcttgcagtgaatccttatggaccccctgatccgcccaaaaaccctgaagtgacaactattactaaagattcgatggttgtctgctggggacatcctgattctgatggtggaagtgaaatcatcaattatattgtggaacggcgtgataaagctggccaacgctggattaaatgcaacaaaaaaactcttactgatttaagatataaagtgtctggactgacagaaggacatgaatatgagttcaggattatggctgaaaatgctgctggaattagtgcaccaagtcctaccagtccattttacaaggcttgtgacactgtgtttaaacctggaccaccaggtaacccacgtgttctggatacaagcagatcatccatttcaatcgcttggaataaacctatctatgatggtggttcagaaatcactgggtatatggttgagattgccctgccagaggaagatgaatggcagattgtcactccaccagcaggactcaaggcaacttcgtatactatcactggcctcacagagaatcaggaatataagatccgcatctatgccatgaattccgaaggacttggggaacctgcccttgttcctggaactccaaaggctgaagacagaatgctgcctccagaaattgaactggatgctgacctgcgcaaagttgttactataagggcctgctgcaccctgagactttttgttcccatcaaaggaaggcctgcacctgaggtgaagtgggcccgggaccatggagaatctttagataaagctagcatcgaatccacaagctcttacaccctgcttattgttggaaatgtaaacagatttgacagtggcaaatatatactaactgtagaaaatagttcaggcagcaagtctgcatttgtcaatgttagagttctcgatacaccaggccccccacaggatctgaaggtaaaagaggtcactaagacatctgtcacactcacatgggacccacctctccttgatggaggttcaaaaatcaagaactatattgttgaaaagcgggaatcaacaagaaaagcatattcaactgttgcaacaaactgccacaagacttcctggaaggtagaccagcttcaagaaggctgtagctactatttcagggttctcgcagaaaatgaatatggcattgggctgcctgctgaaaccgcagaatctgtgaaagcatcagaacgacctcttcctccaggaaaaataactttgatggatgtcacaagaaatagtgtgtcactctcttgggagaaaccagagcatgatggaggcagccgaattctaggctacattgtggagatgcagaccaaaggcagtgacaaatgggccacgtgtgccacagtcaaggtcactgaagccactatcactggattaattcagggtgaagaatactctttccgtgtttcagctcagaatgaaaagggcatcagtgatcctagacaactgagtgtgccagtgatcgccaaagatcttgtcattccaccagccttcaaactcctgttcaatactttcactgtactggcaggtgaagacctaaaagttgatgttccattcattggccgccctaccccagctgtaacctggcataaagataatgtaccactgaagcagacaactagagtaaatgcagagagcacagaaaataattcactactgacaataaaggacgcctgccgagaagatgttggccattatgtggttaaactgactaactcagctggtgaagctattgaaacccttaatgttatcgttcttgacaaaccagggcctccaactggaccagttaaaatggatgaagtgacagctgatagtattactctttcctggggcccacccaagtatgatggtggaagttctatcaataattacattgttgagaaacgggacacttccacaaccacctggcaaattgtatcagctacagttgcaaggacaacaataaaggcttgcagactgaagactggatgtgaatatcagtttagaattgcagctgaaaacagatatgggaagagtacctacctcaattcagagcctactgtagcccaatatccattcaaagttcctggtcctcctggcactccagttgtcacactgtcctccagggacagcatggaagtacaatggaatgagccaatcagtgatggaggaagtagagtcattggctatcatctagaacgcaaggaaagaaatagcatcctctgggttaagttgaataaaacacctattcctcaaaccaagtttaagacaactggccttgaagaaggtgttgaatatgaatttagagtctctgcagagaacatcgtgggcattggcaagccgagtaaagtatcagaatgttatgtggctcgtgacccatgtgatccaccaggacggccagaggcaatcattgtcacaaggaattctgtgactcttcagtggaagaaacccacctatgacggtggaagcaagatcactggttatattgttgagaagaaagaattacctgagggccgttggatgaaagccagttttacaaatattattgacactcattttgaagtaactggcctagttgaagatcacagatatgagttccgggttatagcccgaaatgccgcaggagtgtttagtgagccttcagaaagcacaggagcaataacagctagagatgaggtagatccaccacgaataagtatggatccaaaatacaaagacacaatcgtggttcatgctggtgaatcattcaaggttgatgcagatatttatggcaaaccaataccaaccattcagtggataaaaggtgatcaggagctttcaaacacagctcgattagaaataaagagcaccgactttgccaccagtctcagtgtaaaagatgcagtacgtgtcgacagtggaaattacatactgaaggccaaaaatgttgcaggagaaagatcagttactgtgaatgtcaaggttcttgacagaccagggccacctgaaggacctgttgttatctcaggagttacagcagaaaaatgcacactagcttggaaacccccacttcaggatggtgggagtgacatcataaattatattgtggaaaggagagaaaccagccgcttagtttggactgtggttgatgccaatgtgcagactctcagctgcaaggttactaagcttcttgaaggcaatgaatatactttccgtataatggcagtaaacaaatatggtgttggtgaacctcttgaatctgagccagtagttgccaagaatccatttgtagtaccagatgcaccaaaagctccagaagtcacaacagtgaccaaggactcaatgattgttgtatgggaaagaccagcatctgatggtggtagtgaaattcttggatatgttcttgagaaacgggataaagaaggcattagatggacaagatgccataagcgtctgattggagagttgcgcctgagagtaactggactcatagaaaatcacgattatgagttcagagtttctgctgagaatgctgctggacttagtgaaccaagccctccttctgcttaccaaaaggcttgtgatcctatttataaaccaggacccccaaacaaccccaaagtcatagacataaccagatcttcagtattcctttcttggagcaaaccaatatatgatggtggctgtgaaattcaaggatacattgttgaaaaatgtgatgtgagtgttggtgaatggacaatgtgcactccaccaacaggaattaataaaacaaacatagaagtagagaagctgttggaaaagcatgaatacaacttccgtatctgtgctattaataaagctggagttggagaacatgctgacgtccctggacctattatagttgaagaaaaattagaagcaccagacattgatcttgacctagaactaaggaaaatcataaatataagggcaggtggctccttaaggttatttgttcctataaaaggtcgtcctacaccagaagttaaatggggaaaggtggatggtgaaatccgagatgcagctataattgatgtcactagcagtttcacctctcttgttcttgacaatgtcaaccgatatgatagtggaaaatatacgcttacattagaaaacagcagtggaacaaagtctgcctttgttactgtgagagttctggacacgccaagtccacctgttaacctgaaagtcacagaaatcaccaaagactcagtatcaattacatgggaacctcctttgttggatgggggatccaaaataaaaaattacattgttgagaaacgtgaagccacaagaaaatcatatgctgctgttgtaactaactgccataagaattcttggaaaatcgatcagctccaagaaggttgcagttattactttagagtcacagctgagaatgagtatggtattggccttcctgcccagactgctgatccaattaaggttgcagaagtgccacaacctcctggaaaaataactgtggatgatgtcaccagaaacagtgtctctctgagttggacaaaacctgaacatgatggtggcagtaaaatcattcagtatattgtggaaatgcaagctaaacacagtgagaaatggtcagagtgtgctcgagtaaagtctcttcaggcagtaattaccaacctaactcaaggggaagaatatctttttagagttgttgctgtaaatgaaaaggggagaagtgatcctcggtcccttgcagttccaatagttgccaaagatctggtaattgagccagatgtaaaacctgcattcagtagttacagtgtacaggttggccaagatttgaaaatagaagtgccaatttctggacgtcctaagccaaccattacctggactaaagatggtctcccactgaagcagaccacaagaatcaatgttaccgattcactggatctcaccacactcagtattaaagaaactcataaggatgatggtggacaatatggaatcacagttgccaatgttgttggtcagaagacagcatccatcgaaattgtaactctagataaacctgatcctccaaaaggacctgttaaatttgatgacgtcagtgctgaaagtattacattatcttggaaccctccattatatacagggggctgccaaatcaccaactacattgttcagaaaagagatacaaccaccacagtatgggatgttgtttctgctactgttgctagaactacactcaaagtgaccaaactgaaaactggtacagaataccaatttagaatatttgccgaaaacagatatggacaaagctttgccttagagtctgatccaattgtagctcaatatccctacaaagaaccaggccctccaggtacaccatttgccacagccatttccaaagactccatggtcatacagtggcatgaaccagtcaacaatggtggaagccccgtcataggttaccacctggagagaaaagaaagaaacagtattttgtggacaaaggtcaacaaaactattattcatgacacccaattcaaagcacagaatcttgaagaaggcattgaatatgaattcagagtgtatgctgaaaatattgttggtgtaggcaaagcaagcaagaattctgaatgctatgtagccagagatccctgtgacccaccaggaaccccagaaccaataatggttaaaagaaatgaaatcactttacagtggaccaaacctgtgtatgatggtggaagtatgattacaggctacattgtagagaaacgtgatttgcctgatggtcgttggatgaaagctagctttacaaatgtcattgaaactcaatttactgtgtcaggtcttactgaagatcaaagatatgaattcagagtcattgcaaagaatgcagctggtgcaataagtaaaccctctgacagtactggaccaataactgccaaggatgaggttgaactcccaagaatttcaatggatccaaaattcagagacacaattgtggtaaatgctggagaaacattcagacttgaggctgatgtccatggaaagcccctacctaccattgagtggttaagaggagataaggaaattgaagaatctgctagatgtgaaataaagaacacagatttcaaggctttacttattgtaaaagatgcaattagaattgatggtgggcagtatattttaagagcttccaatgttgcaggttctaagtcattcccagtaaatgtaaaagtattagatagaccaggacctccagaagggccagtccaggttactggagtcacttctgaaaaatgctctttaacatggtctccaccacttcaagatggtggcagtgacatttctcactatgttgttgaaaagcgagaaaccagtcgacttgcctggactgttgttgcttcagaagttgtgaccaattctctgaaagttaccaaactcttagaaggtaatgaatatgttttccgtataatggctgtcaacaaatatggtgttggagagcctttggaatctgcaccagtactaatgaaaaatccatttgtgcttcctggaccaccaaaaagcttggaagtcacaaatattgccaaagactccatgaccgtctgttggaaccgtccagatagtgatggtggaagtgagattattggttacattgtagagaaaagagacagaagtggcattcgatggataaaatgtaataaacgccgcattacagatttgcgtctaagagtgacaggattaacagaagatcatgagtatgaattcagggtctctgcagaaaatgctgctggagttggggaaccaagtccagctacagtttattataaagcctgtgatcctgtgttcaaacctggcccacctaccaatgcacacattgtagacaccactaaaaattcaatcacacttgcctggggtaaacccatctatgatggcggcagtgagatcttgggatatgtagtagaaatctgtaaagcagatgaagaagaatggcaaatagttactccacagactggcctgagagtcactcgatttgaaatttcaaaactcactgaacaccaagagtataaaatacgagtctgtgccctcaacaaagttggtttaggtgaggctacatcagttcctggtactgtgaaaccagaagataaacttgaagcacctgaacttgaccttgactccgaattaagaaaaggaattgttgtaagagctggtggatctgccagaattcacattccattcaaaggtcgtccaacgcctgagatcacttggtctcgagaggaaggtgaattcacagataaggtccaaattgaaaagggagtaaactatacccaactatcaatagataactgtgatagaaatgatgctggaaaatacattcttaagttggaaaacagcagtggatcaaagtctgcttttgtaactgtgaaagttcttgacactccaggaccaccacagaatttggcagtcaaagaagtgagaaaagattctgccttcctggtatgggagccacccatcattgatggaggggcaaaggtcaagaactatgtgattgacaaacgtgagtcaaccagaaaagcgtatgctaatgtgagtagtaaatgcagcaaaacaagttttaaagtggaaaaccttacagaaggagccatttattacttcagagtcatggctgaaaatgaatttggagttggtgttccagtggaaactgttgatgccgtgaaagctgctgaacctccttccccaccaggaaaggttacactcactgatgtgtcccagaccagtgcatcacttatgtgggagaaacctgaacatgatggcggtagcagagtcctggggtacgttgttgaaatgcagcccaaaggaactgaaaaatggagcattgtggctgaatccaaagtctgtaatgcagttgttactggtttgagttctggacaagaatatcagttccgtgtcaaggcttataatgagaaaggaaaaagcgatccaagagtgttgggtgttcctgtcatagccaaggacttgactatacagcctagtttaaagttaccatttaacacatatagtatccaagctggagaagatcttaaaatagaaattccagttataggccgaccaagacctaacatttcttgggtcaaagatggtgagcctcttaaacagacaacaagagtaaacgttgaagaaacagctacctcaactgttttgcacattaaagaaggtaacaaagatgactttggaaaatacaccgtaacggcaacaaatagtgcaggcacagcaacagaaaatctcagtgttatcgttttagaaaagcctggacctccagttggcccagttcggtttgatgaagttagtgcagactttgtagtcatatcttgggaacctccagcctatactggtggctgccaaataagcaactacattgtagagaagcgagatacaaccaccaccacttggcacatggtatcagcaacagttgcaagaacaacaattaaaataaccaaactgaaaacaggcacggagtaccagtttagaatttttgctgaaaacaggtatggaaaaagtgccccactggattctaaggcagttattgtacaatatccatttaaagaacctggaccacctggaactccttttgtgacatcaatctcaaaagatcagatgcttgtgcaatggcatgagccagtgaatgatggaggcaccaaaattattggctaccatcttgaacagaaagaaaagaacagtattttatgggtcaagttaaataagacccccattcaggacaccaaattcaaaacaactgggcttgatgagggccttgagtatgagttcaaagtttctgctgaaaatattgttggcattggcaagcctagcaaagtgtcagaatgctttgttgctcgtgatccatgtgacccacctggtcgccctgaagccattgttattacaagaaacaatgtcacactgaaatggaagaaacctgcctatgatggtggtagcaaaataacaggttatattgtagaaaagaaagatctacctgatggccgctggatgaaagccagctttaccaacgtattagaaactgaatttacagtgagtggacttgtagaagaccaaagatatgaatttagagtaattgcaagaaatgcagctggaaactttagtgaaccatctgatagtagtggtgccattactgcaagagatgaaattgatgcaccaaatgcctctctggatccaaaatataaagatgtcatcgttgttcatgcaggagagacttttgttcttgaagccgacatccgtggcaaacctatacctgatgttgtttggtcaaaagatggaaaagaacttgaagaaacagctgctagaatggaaattaaatctactattcagaaaacaactcttgttgtcaaagactgtatacggactgatggaggacaatatattctgaaactcagcaatgttggtggtacaaagtctatacccatcactgtaaaggtacttgacaggccagggcctcctgaagggcctctgaaagttactggagttactgcggaaaaatgttacctggcatggaacccacctttgcaagatggtggtgctaatatttcacattacatcattgaaaagagggagacaagccgactctcttggacccaggtttcaactgaggtacaggcccttaactacaaagttactaaacttcttcctggtaatgagtacattttccgtgtcatggctgtgaataaatatggaattggagagcccttggaatctgggcctgttacggcctgtaatccttataagccaccaggtcctccctcaacacctgaagtctcagcaatcaccaaagattctatggtagtaacatgggcacgcccagtagacgacggaggtaccgaaattgagggctacattcttgaaaaacgagataaggaaggcgttagatggaccaagtgcaacaagaaaacattaacggatctgcggctcagggtaactggtcttaccgaaggccattcctatgaattcagagttgctgctgaaaatgcagctggtgtgggagaacctagtgagccatctgttttctaccgtgcgtgtgatgccttgtatccaccaggtcccccaagcaatccaaaagtgacggacacttccagatcttctgtctccctggcatggagtaagccaatttatgatggtggcgcacctgttaaaggctatgttgtagaggtcaaagaagctgctgcggatgaatggacaacctgcactccaccaacaggattacaaggaaagcagttcacagtgaccaagcttaaagaaaacactgaatataacttccgtatttgtgccatcaattctgaaggtgtaggtgaacctgcaactctacctggctcagtggttgctcaggagaggatagagccaccagaaatagaactcgatgctgatctcagaaaggtggtcgttctgcgtgcaagtgctactttacgcttatttgtcactatcaaaggtcgaccagaacccgaagttaaatgggaaaaggcagaaggcattctcactgacagggctcagatagaggtgaccagctcatttacaatgttggtgattgataatgttaccagatttgacagtggtcggtataatctgacattagaaaataatagtggctccaaaacagcttttgttaacgtcagagttcttgactcaccaagtgcccctgtgaatttgaccataagagaagtgaagaaagactcagtgacgttgtcctgggaaccaccacttattgatggtggagctaagattacaaactacattgtcgaaaaacgagaaactacaagaaaagcctatgctaccattacaaataattgcactaaaactactttcagaattgaaaatctacaagaaggatgttcttactacttccgagtcttggcttccaatgaatatgggattggtttgccagctgaaacaacagaacccgttaaagtgtctgaaccacccctcccacctggaagagtaactcttgttgatgtgacccgtaatacagctacaattaagtgggagaaaccagaaagtgatggtggcagcaaaattactggttatgtggttgaaatgcagactaaagggagtgaaaagtggagcacctgcacacaagttaagactctagaagcaactatatctggcttaactgcaggagaagagtatgtcttcagggtagctgcagttaacgaaaagggaagaagtgatccaagacaacttggagtgccagtaattgcaagggatattgaaataaagccttcagttgagcttcctttccatactttcaatgtaaaggctagagaacaacttaagattgatgtgccattcaaaggaagacctcaagctactgtgaactggagaaaagatggtcagactcttaaagagacaactagagtcaatgtttcttcttcaaagactgtaacatcactatctattaaggaagcttcaaaggaagatgttggaacttatgaattatgtgtttcaaacagtgctggatccataacagttcctattactataattgtccttgacagaccaggacctccaggtcctatacgtattgatgaggttagttgtgacagcataaccatttcttggaatcctccagaatatgatggtggctgccaaattagcaattacattgttgaaaagaaagaaaccacctctacaacatggcacatagtttcacaagcagttgcaagaacatccattaaaatagttcgcctgacaacaggaagtgagtatcagttccgtgtttgtgcagaaaaccgctatggaaagagctcctacagtgaatcttcagctgttgttgcagagtatccattcagtcccccaggtcctcctggtactcctaaagttgtgcatgccacaaaatctaccatgcttgtaacctggcaagtgccagttaatgatggaggaagtcgagtaattggctatcatcttgagtataaagaaagaagcagcattctttggtcaaaagcaaataaaatcctcattgctgatactcaaatgaaagtctccggccttgatgaaggactgatgtatgagtatcgtgtatatgctgaaaatattgctggaattggtaaatgcagtaaatcttgtgaaccagtccctgcaagagatccttgtgaccctcctggacaacctgaagtcacaaatatcacaagaaaatcagtgtcacttaaatggtctaaaccacattatgatggtggagctaagatcacaggatacattgttgaacgcagagaactaccagatggccggtggctgaagtgcaattatactaatatacaagaaacatactttgaagtaactgaacttactgaagatcagcgttatgaattccgggtttttgcaaggaatgctgctgactcagttagtgagccatctgaatccactgggcctattatagttaaagatgatgttgagcctccaagagttatgatggatgtcaagttccgagacgttattgttgtcaaagctggagaggtccttaagataaatgcagacattgcagggcgacctctgccagtaatttcctgggccaaggatggtatagaaattgaagaaagagcaagaacagaaatcatctcaacagacaatcatactttgttaacagttaaagactgtataagacgagacactgggcaatatgtactaacactgaagaatgttgccggcactcggtctgtggccgttaattgcaaagtacttgataagcctggtccaccagcaggaccacttgaaataaatggcctcactgctgagaaatgctctctttcctggggacgtccccaagaagatggtggtgcagatatcgactattacatcgtagaaaaacgtgaaacaagccaccttgcatggacaatatgtgaaggagagttacagatgacatcctgtaaagtaaccaagttactcaaaggcaatgaatatatatttagagtaactggtgttaataaatatggtgttggtgagcccctagagagtgtagctataaaggcactagatccatttacagttccaagtccacccacgtctttggaaattacttctgtgaccaaagaatctatgacactttgctggtcaagacccgagagtgatggaggtagtgaaatatctggatatataattgaaaggcgagagaaaaatagcctaagatgggtgcgtgtaaacaaaaaaccagtttatgatctaagagtgaaatcaacaggacttcgggaaggatgtgaatatgaatatcgtgtttatgcagaaaatgctgctggcctaagtcttccaagtgaaacctctcccttaattagggcagaagatccagtgttcctaccatctcctccatccaaacccaaaattgtggactcaggcaagacaactataactattgcctgggttaagccgctgtttgatggtggggccccgataactggatatactgtagaatacaaaaaatctgatgacactgactggaaaacttccattcagagcttacgagggacagaatatacaataagcggactaacaacaggagctgaatatgttttcagagtaaaatctgtcaataaggttggtgctagtgaccccagtgatagctctgaccctcagatagcaaaggaaagagaagaagaacctttatttgatattgacagtgaaatgaggaagaccttgattgtcaaggctggtgcctcatttaccatgactgtgcctttccgaggaagaccagtacccaatgtcttgtggagtaagccagacactgacctccgtactagagcttatgttgataccacagactctcgtacatcactgaccattgaaaatgccaacagaaatgactctggaaagtacacattaacaattcagaatgttttgagtgctgcttcactgaccttagttgtcaaagttttagataccccaggtcctccaaccaacattactgtgcaagatgtaaccaaagagtctgcagtgttatcctgggatgttcctgaaaacgatggtggagcaccagtgaagaattaccacatagaaaaacgtgaggccagcaagaaagcatgggtctctgtgaccaacaactgtaaccgcctctcctacaaagttaccaatttacaagaaggagctatctattacttcagagtctctggagaaaatgagtttggtgttggtataccagctgaaacaaaggaaggagtaaaaataacagaaaaaccaagcccacctgaaaaacttggagtaacaagtatatccaaagacagtgtttccctgacctggctgaagcctgaacatgatggcggaagcagaattgtacactatgtcgttgaagcactagaaaaaggacagaaaaactgggttaaatgtgcagtggcaaagtcaacccatcacgttgtttccggtctgagagagaattctgaatactttttccgagtgtttgctgaaaatcaagctggcctgagtgacccgagagagcttctgcttcctgttcttattaaggagcaactagaaccacctgaaattgatatgaagaatttcccaagtcacactgtatatgttagagctggttcaaaccttaaagttgacattccaatctctggaaaaccacttcccaaagtgaccttatcaagagatggtgtcccccttaaggcaaccatgagatttaataccgaaattactgctgagaacctgaccatcaatctcaaagaaagtgttacagctgacgctgggagatatgaaatcactgctgccaactccagtggtacaaccaaagctttcattaacattgttgtgctagacaggcctggtcctccaactggccctgttgttattagtgatataactgaagaaagtgtgactctcaaatgggagccacctaagtatgacggtggaagtcaagttaccaactacattctactcaaaagagaaacaagtactgcagtgtggactgaagtgtctgcaacagttgcaagaaccatgatgaaagtcatgaaactgaccacaggagaagaataccaattccgcatcaaggcagaaaaccgctttggcatcagtgatcatatagattcagcttgtgtgactgtcaaactaccatacacaacacctggaccaccatctacaccatgggtcactaatgttactcgagaaagcatcactgtgggctggcatgaaccagtgtcaaatggaggcagtgcagtcgtaggctatcacctggaaatgaaagacagaaacagtattttatggcaaaaagccaacaaactggtcatccgcacaactcacttcaaagtcacaacaatcagtgctggacttatttatgaattcagggtgtatgcagaaaatgctgctggagttggaaaacctagccatccttctgaaccagtcttggcaattgatgcttgtgaacccccaagaaatgttcgtatcactgatatttcaaagaactctgtcagcctttcatggcaacaaccagctttcgatggaggtagcaagattacaggctacattgttgagagacgtgaccttccagatggcagatggaccaaggccagcttcaccaatgttactgaaactcaattcatcatctctggcttgactcagaattcccagtatgaattccgtgtctttgctaggaatgctgttggttccattagcaatccatctgaggttgtagggcccattacttgcatcgattcttatggtggtcctgtaattgatttgcctctagaatatacagaagttgtcaaatacagagcaggtacatctgtgaagctcagagctggcatttctggcaaacctgcgcctactattgagtggtataaagatgataaagaattacaaaccaatgcactggtgtgtgttgaaaataccacggacctcgcatctatactcatcaaagatgccgatcgccttaatagtggatgctatgaattaaaactaaggaatgccatgggctcagcctcagccaccatcagagtacagatccttgacaaaccaggcccacctggtggaccaattgaatttaagactgtaactgctgagaagatcacccttctctggcggcctccagctgatgatggtggtgcaaaaatcactcactacattgtggaaaagcgtgagacaagccgcgttgtgtggtctatggtgtctgaacatttggaagagtgcatcattacaaccaccaaaattatcaaaggaaatgaatacatcttccgggtccgagccgtgaacaaatatggaattggcgagccactggaatctgattccgttgtagccaagaacgcatttgttacacctgggccaccaggcataccagaagtgacaaagattaccaagaattcgatgactgttgtatggagcaggccaattgcagatggcggtagtgatataagtggctatttccttgaaaaacgagacaagaagagcctaggatggtttaaagtactaaaagagactatccgtgacaccagacaaaaagtaacaggactcacagaaaacagtgactatcaatacagagtttgtgctgtaaacgctgctggacagggtccattttctgaaccatctgaattctacaaagctgctgatcctattgatcctccaggtccacctgctaagataagaatcgcagattcaaccaagtcatccatcacccttggctggagtaagcctgtctatgatgggggcagtgctgttactgggtatgttgtcgagataagacaaggagaggaagaggaatggactactgtctctaccaaaggagaggtcagaactacagaatatgtggtatccaacctgaaacctggagtcaattactacttccgggtatctgctgtaaactgtgctggacaaggagaacctatagaaatgaatgaacctgtacaagctaaagatatacttgaggcaccagagattgacctggatgtggctctcagaacttctgttattgccaaagctggtgaagatgtacaagtgttgattccctttaaaggcagacctccacctactgtcacatggagaaaagatgagaagaatcttggcagtgatgccagatacagcattgaaaacactgattcatcctcattactcaccattcctcaagttactcgcaatgatacaggaaaatatattctcacaatagaaaatggagttggtgaacctaagtcttcaactgtgagtgttaaagtgcttgacacaccagctgcctgccagaaactacaggttaaacatgtttctcgaggcacagtcactttgctctgggatcctcctctcattgatggaggatctccaataattaattatgtcattgaaaagagagatgccaccaagagaacatggtctgtcgtgtcacacaaatgttctagcacatccttcaagctaatagatttgtcggagaagactccattcttcttcagagttcttgcagaaaatgaaattggaattggggaaccctgtgaaactacagagccagtgaaggctgctgaagtaccagctcctatacgtgatctctcaatgaaagactcaacaaagacatctgtcatcctcagctggaccaaacctgactttgatggtggtagcgtcatcacagaatatgttgtagaaaggaaaggtaaaggtgaacagacgtggtcccacgctggcataagtaagacatgtgaaattgaggttagccaacttaaggagcagtcagtcctggagttcagagtgtttgccaaaaatgagaaaggactgagtgatcctgtcactattgggccaattacagtgaaagaacttattattacacctgaagttgacctgtcagatatccctggggcacaagtcactgtgagaattgggcacaatgtgcaccttgaattaccttataagggaaaacccaaaccatccatcagttggctgaaagatggcttgccactgaaagaaagtgaatttgttcgcttcagtaaaactgaaaacaaaattactttgagtattaagaatgccaagaaggagcatggaggaaaatacactgttattcttgataatgcagtgtgtagaattgcagtccccattacagtcatcacccttggcccaccatcaaagcccaaaggacccattcgatttgatgaaatcaaggctgatagtgtcatcctgtcatgggatgtacctgaagataatggaggaggagaaattacttgttacagcatcgagaagcgggaaacttcacaaactaactggaagatggtgtgttcaagtgttgccagaacgactttcaaagttcctaatctagtcaaagatgctgagtaccagtttagagtgagagcagaaaacagatacggagtcagccaaccacttgtctcaagcattattgtggcaaaacaccagttcaggattcctggtcccccaggaaagccagttatatacaatgtgacttctgatggcatgtcactaacttgggatgctccagtttatgatggtggttcagaagttactggattccatgttgaaaagaaagaaagaaatagcatcctctggcaaaaagttaatacatcaccaatctctggaagagaatatagagccactggactggtagaaggtctggattaccaattccgtgtatatgctgaaaattctgctggcctaagctcacctagtgacccaagcaaatttaccttagctgtttctccagtagacccacctggcactcctgactacattgatgtcacccgggaaaccatcacacttaaatggaacccaccattgcgtgatggaggcagtaagattgtgggctatagcattgagaaacggcaaggaaatgaacgctgggtgagatgcaactttactgacgtcagtgaatgtcagtacacagttacaggactcagtcctggggatcgctatgagttcagaataattgcaagaaatgctgttggaactataagcccgccctcacagtcttctggcattattatgacaagagatgaaaatgttccaccaatagtagagtttggccctgaatactttgatggtctcattattaagtccggagagagccttagaattaaagctttggtacaaggaagaccagtgcctcgagtaacttggttcaaagatggagtggaaatcgaaaagaggatgaatatggaaataaccgacgtacttggatccaccagcctatttgttagagatgctactcgggaccatcgtggtgtatacacagtggaagccaaaaatgcatctggttctgcaaaagcagaaattaaagtgaaagtacaagatacaccaggaaaagtagttgggccaataagattcaccaatattactggggagaagatgactctgtggtgggatgccccactcaatgacggttgtgctcccataacccactacatcattgaaaaacgggaaaccagcagacttgcctgggcactaattgaggataaatgtgaagcccaaagttacactgccattaaactaataaacggcaatgaataccaattccgtgtttctgcagttaacaagtttggtgttggcaggccacttgattctgatccagtggttgctcaaatacaatatactgttcctgatgcccctggcattccagaacctagcaacataacaggcaacagcattaccctgacatgggcaaggccagaatcagatggtggcagtgaaattcaacagtatatccttgaaagaagagaaaagaaaagcacaagatgggtaaaagtgatcagcaaacgaccaatctctgaaacaagattcaaagtcactggtctgacagaaggcaatgagtatgaattccatgtcatggctgaaaatgctgcaggagttggacctgcaagtggcatctcaagactcattaaatgtagagagcccgtcaacccaccaggtcctcccacagtggtcaaagtaacagacacatcaaagacaactgtgagcttagaatggtccaaaccagtgtttgatggtggcatggaaataattgggtatattattgaaatgtgtaaggccgacttaggagactggcacaaggtgaatgcagaggcatgtgtgaaaacaagatatacagtcactgatctacaagcaggtgaagaatacaaattccgagttagtgctatcaatggtgctggaaaaggcgacagctgtgaagtgactggcacaattaaagcagttgaccggttaacagctcctgagttagacatagatgcaaacttcaaacagactcatgttgttagagctggggccagtattcgcctcttcattgcctaccaaggtagacctactcctacagctgtgtggagcaaaccagactctaaccttagccttcgggctgatatccatacaacagattccttcagcaccctcactgtggaaaactgcaacagaaatgatgcagggaaatatacccttactgtggaaaacaacagtggtagtaagtcaatcacattcaccgtgaaagtgctagacactccaggcccacctggcccaattaccttcaaagatgtgacccggggatctgctacattgatgtgggatgcccctcttcttgacggtggtgcccgaatccatcattatgtggtagagaaacgagaggcaagtcgccgtagttggcaggttatcagtgaaaaatgcactcgtcagatcttcaaggtcaatgacctggccgaaggtgttccgtactatttccgtgtttctgcagtaaatgagtatggtgttggtgagccctatgaaatgccagaaccaattgtagccacagaacagcctgctccacctaggagacttgatgttgttgatactagcaaatcctccgcagtcttagcttggcttaaacctgaccacgatggaggcagccggatcactggctacctgcttgaaatgagacaaaagggatctgacttctgggttgaagctggtcacaccaaacagctaactttcacagtagagcgtcttgttgagaaaactgaatatgaattccgtgtgaaggccaagaatgatgctggctatagtgaacccagagaagccttctcttctgtcatcattaaggagcctcaaatcgagcccactgctgacctcactggaattaccaatcagcttataacttgcaaagcaggaagcccatttaccattgacgtaccaatcagtggtcgtcctgcccccaaagtaacatggaaactggaagaaatgagacttaaagagacagatcgagtgagcattacaacaacaaaagacagaaccacactgactgtaaaggacagcatgagaggtgactctggaagatacttcttgaccctggaaaatacagctggtgttaaaacatttagcgtcacagttgtggtcattggaaggccaggtccagtaaccggccccattgaggtctcatctgtctcagctgaatcgtgtgtcctgtcatggggagaacctaaagatggaggaggcactgaaattactaattacatagttgaaaagcgtgaatcgggtacaacagcttggcagcttgtcaattccagtgtcaagcgcactcaaattaaagtcactcatctcacaaaatacatggaatattctttccgtgtcagttcagagaacagatttggtgtcagcaaacctctagaatcagcaccaataattgctgaacatccatttgtcccaccaagcgctcctaccagacctgaggtctaccatgtgtctgccaatgccatgtctattcgttgggaagaaccctaccacgatggtggcagtaaaatcattggctactgggttgagaagaaagaacgtaatacaattctttgggtgaaagaaaacaaagtgccatgcttagagtgcaactacaaagtaactggtttagtagaaggactggaatatcagttcagaacttatgcactcaatgctgcaggtgttagcaaggccagcgaagcttcaagacctataatggctcaaaatccagttgatgcaccaggcagaccagaggtgacagatgtcacaagatcaacagtatcactgatttggtctgccccagcgtatgatggaggcagcaaggttgtgggctacatcatagagcgtaagccagtcagtgaggtaggagatggtcgctggctgaagtgcaactacaccattgtatctgacaatttcttcaccgtgactgctctcagtgaaggagacacttatgagttccgtgtgttagccaagaatgcagcaggcgtaattagcaaagggtctgaatctacaggccctgtcacttgccgagatgaatacgctccacccaaagccgaactggatgcccgattacacggtgatctggttaccatcagagcaggttctgatcttgttctggatgctgcagttggtggcaaacctgaacccaaaattatctggaccaaaggagacaaggagctagatctctgtgaaaaagtctctttgcagtatactggcaaacgagcaactgctgtgatcaagttctgtgacagaagtgacagtggaaaatacactttaacagtgaaaaatgccagcgggaccaaggccgtgtctgtcatggtcaaagtgcttgattcccctggcccatgtggaaagctcaccgtcagcagagtaacacaggagaagtgcactttagcctggagccttccgcaggaagacggaggagcagaaatcactcactacatcgtggaaagacgcgagactagcaggctcaactgggtgattgttgaaggcgaatgcccaaccctatcctatgtcgttaccaggctcatcaagaacaatgagtacatattccgagtgagggcagtaaacaaatatggccctggtgtgcctgttgaatcagagccaattgtagccagaaactcattcactattccatcaccacccggcatacctgaagaagttgggactggcaaagagcatatcatcattcagtggacaaaacctgaatctgatggtggcaatgaaatcagcaactacctagtagacaaacgtgagaagaagagcctgcgctggacacgtgtcaacaaagactatgtggtgtatgataccaggctgaaggtgaccagcctgatggagggttgtgattaccagttccgggtgaccgcagtgaatgcagctggtaacagtgagcccagcgaagcttccaacttcatctcatgcagagaaccatcatatacccctggaccaccttctgctccaagagttgtggataccaccaaacacagcattagtttggcatggaccaaacccatgtacgatggtggtactgacattgtaggatatgttctggaaatgcaagagaaggacactgatcagtggtaccgagtgcataccaatgccacaataagaaatactgaattcactgtgccagaccttaaaatgggccagaaatattccttcagagttgctgccgtgaacgtgaagggtatgagcgaatacagcgaatcaattgctgaaattgagcccgtggaaagaatagaaataccagatcttgagcttgcagatgatctaaagaagactgtgaccatcagggctggggcctccttgcgcttgatggtgtctgtatctggaagaccacctcctgtcataacgtggagcaagcagggcattgaccttgcaagccgggcaattattgacaccactgagagctactcattgctaatagtggacaaagttaatcggtacgatgctggaaaatacacaattgaagctgaaaaccaatctggcaagaaatcagcaacagtccttgttaaagtctatgatactcctggtccctgtccttcagtgaaagttaaggaagtatcaagagattctgtgactataacttgggaaattcccacgattgatggtggagctccagtcaacaattacatcgttgagaagcgtgaagctgctatgagagcattcaaaacagtaactaccaaatgcagcaagacactttacagaatttctggacttgtagaaggaaccatgtactatttcagagtgctgccagaaaatatttatggcattggagaaccttgtgaaacatctgatgcagtactggtctcagaagtgcctttggtgcctgcaaagctagaagtggtcgatgtcaccaaatccactgttacccttgcctgggaaaaaccactctacgatggtggtagccgactcactggatatgttctcgaggcctgcaaagctggcacagagagatggatgaaggttgtcaccttaaaacccacagtcctagagcacactgttacttccttaaatgaaggtgaacaatacttatttagaataagggcacaaaatgagaaaggtgtgtcagaaccaagagagactgtcacagccgtgactgtacaagacctcagagtgttgccaacaatcgatctttctacaatgcctcagaagaccatccatgtcccagctggcagaccagtagagctggtgatacctattgctggccgtccacctcctgctgcttcctggttctttgctggttctaaactgagagaatcagagcgtgtcacagttgaaactcacactaaagtagctaaattaaccatccgtgaaaccactatcagagatactggagaatacacacttgaattgaagaatgttaccggaactacttcagaaaccattaaagttatcattcttgacaagcctggtccaccaacaggacctattaagattgatgaaattgatgctacatcaattaccatttcctgggaaccacctgaattggacggtggtgctccactgagtggttatgtggtagaacaacgtgacgctcatcgtccaggatggctgcccgtttctgaatcagtgactaggtccacgtttaagtttaccagactcaccgaaggaaatgagtatgtgttccgtgtggctgcaacaaaccgcttcgggattggctcttacttgcagtctgaggtcatagagtgtcgcagcagcatccgtattcctggacccccagaaacattacagatatttgatgtttcccgtgatggcatgacacttacttggtacccaccagaggatgacggtggctcccaagtgactggatatattgtggagcgcaaagaagtgagagcagatcgatgggtccgtgtaaataaagtacctgtgacaatgacacggtaccgctccactggccttactgaaggcttagaatatgaacaccgtgtcacagccattaatgcaagagggtctgggaaaccaagtcgtccttccaaacccatcgttgccatggatccaattgctcctccaggaaagccacaaaacccaagagttactgatacaacaaggacatcagtctccctggcctggagtgttccagaagatgaaggaggatctaaagtcacaggctacttgattgaaatgcaaaaagtagatcaacatgaatggaccaagtgtaacaccactccaaccaagattcgagagtatactctaacacacctacctcagggtgcagaatacaggttccgcgtcctagcttgtaatgctggtggacctggtgagcctgctgaggtaccaggaacagtcaaagtcactgaaatgcttgaatatcctgattatgaacttgatgaaagataccaagaaggtatctttgtaaggcaaggtggcgtcatcagacttaccataccaatcaaaggaaaaccattcccaatatgtaaatggaccaaggaaggccaggatattagtaagcgtgccatgattgcaacatctgaaacacacactgagcttgtgatcaaagaagcagacaggggtgattctggcacttatgacctggttctggaaaataaatgtggcaagaaggctgtctacatcaaggtcagggtgataggaagtcccaacagtccagaagggccactggaatatgatgacatccaagtccgctctgtgagggtcagctggagacctcctgctgatgatggtggtgctgacatcttaggctacatcctcgagagacgagaagtgcctaaagccgcctggtataccattgattccagagtccgaggtacatctctggtggtaaaaggcctcaaagagaatgtagaataccatttccgtgtttcagcagaaaaccagtttggcataagcaaacccttgaaatctgaggaaccagtcacaccaaaaacaccattgaatcctccagaacctccaagcaatcctccagaagtactcgatgtaaccaagagttctgttagcttgtcctggtcccggcccaaagatgatggtggttctagagtcacaggctactacatcgaacgcaaagagacatccactgacaagtgggtcagacacaacaagactcagatcaccaccacaatgtacactgtcacagggcttgttcccgatgctgagtatcagttccgcatcatcgcacagaatgatgttggcctgagtgagaccagccctgcttctgaaccagttgtttgcaaagatccatttgataaaccaagccaaccaggagaacttgagattctttcaatatccaaagatagtgtcactctacagtgggagaaacctgaatgtgatggtggtaaagaaattcttggatactgggttgaatatagacagtctggagacagtgcctggaagaagagcaataaggaacgtattaaggacaagcaattcacaataggaggtttgctggaagctactgagtatgaattcagggtttttgctgagaatgagactgggctgagcagacctcgcagaactgctatgtctataaagactaaactcacatctggagaggccccaggaatacgcaaagaaatgaaggatgttaccacaaaattgggtgaagctgctcaactctcatgccagattgttggaaggcctcttcctgacattaaatggtacagatttggtaaagagctcatacaaagccggaaatacaaaatgtcttcagatggacgcacacacactcttacagtaatgacagaggaacaggaagatgaaggtgtttatacctgcatagccaccaatgaggttggagaagtagaaaccagtagtaagcttctcctgcaagcaacaccgcagttccatcctggttacccactgaaagagaaatattatggagctgtgggttccacacttcggcttcatgttatgtacattggtcgtccagtacctgccatgacttggttccatggtcagaaacttttgcaaaactcagaaaacattactattgaaaacactgagcactatactcatcttgtcatgaagaatgtccaacgtaagactcatgctgggaaatacaaagtccagctcagcaatgtttttggaacagttgatgccatccttgatgtggaaatacaagataaaccagacaaacctacaggaccaattgtgatcgaagctctattgaagaactccgcagtgatcagctggaaaccacccgcagatgacggaggctcctggatcaccaactatgtggtggaaaaatgtgaggccaaggagggggctgaatggcaattggtgtcttcagccatctcagtgacaacctgtagaattgtgaacctcacagaaaatgctggctattacttccgggtttcagctcagaacactttcggcatcagtgaccctctagaagtgtcctcagttgtgatcattaagagtccatttgaaaagccaggtgctcctggcaaaccaactattactgctgtcacaaaagattcttgtgttgtggcctggaagccacctgccagtgatggaggtgcaaagattagaaattactaccttgagaagcgtgagaagaagcagaataaatggatttctgtgacaacagaagaaattcgagaaactgtcttttcagtgaaaaaccttattgaaggtcttgaatacgagtttcgtgtgaaatgtgaaaatctaggtggggaaagtgaatggagtgaaatatcagaacccatcactcccaaatctgatgtcccaattcaggcaccacactttaaagaggaactgagaaatctaaatgtcagatatcagagcaatgctaccttggtctgcaaagtgactggtcatccaaaacctatcgtcaaatggtacagacaaggcaaagaaatcattgcagatggattaaaatataggattcaagaatttaagggtggctaccaccagctcatcattgcaagtgtcacagatgatgatgccacagtttaccaagtcagagctaccaaccaagggggatctgtgtctggcactgcctccttggaagtggaagttccagctaagatacacttacctaaaactcttgaaggcatgggagcagttcatgctctccgaggtgaagtggtcagcatcaagattcctttcagtggcaaaccagatcctgtgatcacctggcagaaaggacaagatctcattgacaataatggccactaccaagttattgtcacaagatccttcacatcacttgttttccccaatggggtagagagaaaagatgctggtttctatgtggtctgtgctaaaaacagatttggaattgatcagaagacagttgaactggatgtggctgatgttcctgacccacccagaggagtcaaagttagtgatgtctcacgagattctgtcaacttaacatggactgagccagcctctgatggtggcagcaaaatcaccaactacattgttgaaaaatgtgcaactactgcagaaagatggctccgtgtaggacaggcccgagaaacacgttataccgtgatcaacttatttggaaaaacaagttaccagttccgggtaatagctgaaaataaatttggtctgagcaagccttcagagccttcagaaccaaccataaccaaagaagataagaccagagctatgaactatgatgaagaggtagatgaaaccagggaagtctccatgactaaagcatctcactcttcaaccaaggaactctatgagaaatatatgattgctgaagatcttgggcgtggtgagtttggaattgtccatcgttgtgttgaaacatcctcaaagaagacatacatggccaaatttgttaaagtcaaagggactgatcaggttttggtaaagaaggaaatttccattctgaatattgctaggcatagaaacatcttacacctccatgaatcatttgaaagcatggaagaattagttatgatctttgagtttatatcaggacttgacatatttgagcgcattaacacaagtgcttttgaacttaatgaaagagaaattgtaagttatgttcaccaggtctgtgaagcacttcagtttttacacagtcataatattggacactttgacattagaccagaaaatatcatttaccaaaccagaagaagctctaccattaaaatcatagaatttggtcaagcccgtcagctgaaaccaggggacaacttcaggcttctattcactgccccagaatactatgcacctgaagtccaccagcatgatgttgtcagcacagccacagacatgtggtcacttggaacactggtatatgtgctattgagtggtatcaacccattcctggctgaaactaaccaacagatcattgagaatatcatgaatgctgaatatactttcgatgaggaagcattcaaagagattagcattgaagccatggattttgttgaccggttgttagtgaaagagaggaaatctcgcatgacagcatcggaggctctccagcacccatggttgaagcagaagatagaaagagtcagtactaaagttatcagaacattaaaacaccggcgttattaccacaccctgatcaagaaagacctcaacatggttgtgtcagcagcccggatctcctgtggtggtgcaattcgatctcagaagggagtgagtgttgctaaagttaaagtggcatccattgaaattggcccagtttctgggcagataatgcatgcagttggtgaagaaggaggacatgtcaaatatgtatgcaaaattgaaaattatgatcagtctacccaagtgacttggtactttggcgtccgacagctggagaacagtgagaaatacgaaatcacctacgaagatggagtggccatcctctatgtcaaagacattaccaaattagatgatggtacctacagatgcaaagtagtcaatgactatggtgaagacagttcttatgcagagctatttgttaaaggtgtgagagaagtctatgactattactgccgtagaaccatgaagaaaattaagcgcagaacagacacaatgagactcctggaaaggccaccagaatttaccctgcctctctataataagacagcttatgtaggtgaaaatgtccggtttggagtaactataactgtccacccagagcctcatgtaacatggtataaatcaggtcagaaaatcaaaccaggtgacaatgacaagaagtacacatttgagtcagacaagggtctttaccaattaacaatcaacagtgtcactacagatgatgacgctgaatatactgttgtggcaaggaacaaatatggtgaagacagctgtaaagcaaagctgacagtaaccctacacccacctccaacagatagtaccttaagacccatgttcaaaaggttactggcaaatgcagaatgccaagaaggccaaagtgtctgctttgagatcagagtgtctggcatccccccaccaacattaaaatgggagaaagatggtcagccactgtccctcgggcctaacattgaaattatccatgaaggcttggattattatgctctgcacatcagggacactttgcctgaagacacgggttattatagagtcacagccactaacacagctgggtccaccagctgccaggctcacctacaagtggaacgcctgaggtacaagaaacaggaattcaagagtaaggaggagcatgagcgacacgtacaaaaacaaattgacaaaaccctcagaatggctgaaattctttctggaactgaaagtgtaccactgacacaggtagctaaagaggctctgagagaagctgctgtcctttataaaccggctgtaagcaccaagactgtaaaaggggaattcagacttgagatagaagaaaagaaggaggagagaaaactccggatgccttatgatgtaccagagccacgcaagtataagcagactaccatagaagaagaccaacgcatcaagcagttcgtgcccatgtctgacatgaagtggtataaaaagatacgtgatcagtatgaaatgcctgggaaacttgacagagttgtacagaaacgacccaagcgcatccgcctttcaagatgggaacagttctatgtgatgcctcttccacgcattacagatcaatacagacctaaatggcgtattcctaaactgtcccaagatgatcttgagatagtgagaccagcccgccggcgtacaccttctcctgattatgacttttactaccgacctagaagacgttctcttggggacatctctgatgaagaattactcctccccattgatgactacttagcaatgaaaagaacagaggaagagaggctgcgtcttgaagaagagcttgagttaggtttttcagcttcacccccaagtcgaagccctccacactttgagctttctagcctacgttactcttcaccacaagctcatgtcaaggtggaggaaacaagaaaagacttcaggtattcaacctatcacatcccaacgaaggctgaagctagtacaagttatgcagaactgagggaacggcatgcccaggctgcgtacagacagccaaagcaacggcaaagaatcatggctgagagggaggatgaagagttgcttcgcccagttacgaccacccagcatctctcagaatacaaaagcgaacttgacttcatgtcaaaggaggaaaagtctagaaagaaatcaaggcgacaaagagaagtgacagaaataacagaaattgaggaagaatacgaaatctcaaaacatgctcaaagagaatcatcctcatctgcgtctagactactgagacgacggcgctccctgtctccaacttatattgagttaatgaggccagtgtctgagctgatccggtcacgtccacaaccggctgaggaatacgaagatgacacagaaagaaggtcacctactccagagagaactcgcccacgatcccccagccctgtgtctagtgagagatcactctcgagatttgagaggtctgcaagatttgatatcttttccaggtatgagtccatgaaagctgctttaaaaactcagaagacatcagaaaggaagtatgaagttttgagtcagcagcctttcacactggaccatgcccctcgaatcacactgagaatgcgctcgcacagggtaccatgtggccaaaatacacgttttattttaaatgttcagtctaagccaactgccgaggttaaatggtaccacaatggtgtggaactccaagaaagcagtaagattcattacaccaacacgagtggagtcctcaccctggaaattctggactgtcatactgatgacagtggaacctaccgtgctgtgtgcaccaactacaagggcgaagcttctgactatgcaacgttggacgtgacaggaggggattataccacctatgcttcccaacgcagagatgaagaggtccccagatctgttttccctgagctgacaagaacagaggcgtatgctgtttcatcatttaagaaaacatctgagatggaagcttcgtcttctgtcagggaagtgaaatcacagatgacggagacaagggaaagtctctcctcatatgaacactctgcatctgcagaaatgaaaagtgctgcattagaagaaaagtcactggaagaaaaatccacaaccagaaagatcaagacgactttggcagcaagaattctaacaaagccacggtccatgaccgtctacgagggcgagtctgcaaggttttcttgtgacaccgatggtgagccggtaccaactgtgacctggctgcgtaaaggacaagtgctaagtacttctgcccgccaccaagtgaccaccacaaagtacaaatcaacctttgagatctcttcagtccaggcttccgatgagggcaattacagcgtggtggtagaaaacagtgaagggaaacaagaagcagagttcactctgactattcaaaaggccagggtaactgaaaaggctgtgacatcaccaccaagagtcaaatccccagagcctcgggtgaaatccccagaagcagttaagtctccaaaacgagtgaaatctccagaaccttctcacccgaaagccgtatcacccacagagacaaaaccaacaccaacagagaaagttcagcacctcccagtctctgccccaccaaagattactcagttcctgaaagcagaagcttctaaagagattgcaaaactgacctgtgtggttgaaagcagtgtattaagggcaaaagaggtcacctggtataaagatggcaagaaactgaaggaaaatgggcatttccagtttcattattcagcagatggtacctatgagctcaaaatcaataacctcactgaatctgatcaaggagaatatgtttgtgagatttctggtgaaggtggaacgtctaaaaccaacttacaatttatggggcaagcctttaagagtatccatgagaaggtatcaaaaatatcagaaactaagaaatcagatcagaaaaccactgagtcaacagtaaccagaaaaactgaaccaaaagctcctgaaccaatttcctcaaaaccagtaattgttactgggttgcaggatacaactgtttcttcagacagtgttgctaaatttgcagttaaggctactggagaaccccggccaactgccatctggacaaaagatggaaaggccattacacaaggaggtaaatataaactctctgaagacaagggagggttcttcttagaaattcataagactgatacttctgacagtggactttatacttgtacagtaaaaaattcagctggatctgtgtcctctagctgcaaattaacaataaaagctataaaagatactgaggcacagaaagtctctacacaaaagacttctgaaattacacctcagaagaaagctgttgtccaagaggaaatttcccaaaaagccctaaggtctgaagaaattaagatgtcagaggcaaaatctcaagaaaagttagccctcaaagaggaagcttcaaaggttctgatttctgaagaagtcaagaaatcagcagcaacctccctggaaaaatccattgtccatgaggaaatcactaaaacatcacaggcatcagaagaagtcagaactcatgctgagattaaagcattttctactcagatgagcataaacgaaggtcaaagactggttttaaaagccaacattgctggtgccactgatgtgaaatgggtactgaatggcgtagagcttaccaactctgaggagtaccgatatggtgtctcaggcagcgatcagaccctaaccatcaagcaagccagtcacagagatgaaggaatcctcacctgcataagcaaaaccaaggaaggaatcgtcaagtgtcagtatgatttgacactgagcaaagaactctcagatgctccagccttcatctcacagcctagatctcaaaatattaatgaaggacaaaatgttctctttacttgtgaaatcagtggcgagccatcccctgaaatcgaatggtttaaaaacaacctgccaatttctatttcttcaaatgtcagcataagccgctccagaaatgtatactcccttgaaatccgaaatgcatcagtcagcgacagtggaaagtacacaattaaggccaaaaatttccgtggccagtgttcagctacagcttccttaatggtccttcctctagttgaagaaccttccagagaggtagtattgagaacaagtggtgacacaagcttgcaaggaagcttctcgtctcagtcagtccaaatgtctgcctccaagcaggaggcctccttcagcagtttcagcagcagcagtgctagcagcatgactgagatgaaatttgcaagcatgtctgcccaaagcatgtcctccatgcaagagtcctttgtagaaatgagttccagcagctttatgggaatatctaatatgacacaactggaaagctcaactagtaaaatgcttaaagcaggcataagaggaattccgcctaaaattgaagctcttccatctgatatcagcattgatgaaggcaaagttctaacagtagcctgtgctttcacgggtgagcctaccccagaagtaacatggtcctgtggtggaagaaaaatccacagtcaagaacaggggaggttccacattgaaaacacagatgacctgacaaccctgatcatcatggacgtacagaaacaagatggtggactttataccctgagtttagggaatgaatttggatctgactctgccactgtgaatatacatattcgatccatttaagagggcctgtgcccttatactctacactcattcttaacttttcgcaaacgtttcacacggactaatctttctgaactgtaaatatttaaagaaaaaaaagtagttttgtatcaacctaaatgagtcaaagttcaaaaatattcatttcaatcttttcataattgttgacctaagaatataatacatttgctagtgacatgtacatactgtatatagccggattaacggttataaagttttgtaccatttattttatgacattttacaatgtaagttttgaaactaactgttggtaggagaaagtttcttatggaacgaataccctgctcaacatttaatcaatctttgtgcctcaacatactgttgatgtctaagtatgcctcagtgggttgagaaaatccccattgaagatgtcctgtccacctaaaagagaatgatgctgtgcatatcacttgatatgtgcaccaatacctactgaatcagaaatgtaaggcattggtgatgtttgcatttaccctcctgtaagcaacactttaacgtcttacattttctctgatgatgtcacacaaaattatcatgacaaatattaccagagcaaagtgtaacggccaacactttgttcgctcattttacgctgtctctgacataaggagtgcctgaatagcttggaaaagtaacatctcctggccatcccttcatttaaccaagctattcaagtattcctatgccagagcagtgccaactcttggaggtcccagagtgcagccaatgcctttgtgtggtagttctaaattttaattgcacctgaaaaacctgggcacctaagcaatgagccacagcaaaaagtaaagaacaacaacaaaataaagctgttgttaaattttaaacaatattactaattgcccaaaatgtcaatttgatgtagttcttttcatgcaagtataaattcaattgttagttataattgttggacctccttgagatagtaacaacaaaataaagcaagctatctgcacctcaaaa

SEQ ID NO: 298 - DNA, 1449 bp, HOMO SAPIENS
cttttcctgtggcagcagccgggctgagaggagcgtggctgtctcctctctccgccatggcgtgtgctcgcccactgatatcggtgtactccgaaaagggggagtcatctggcaaaaatgtcactttgcctgctgtattcaaggctcctattcgaccagatattgtgaactttgttcacaccaacttgcgcaaaaacaacagacagccctatgctgtcagtgaattagcaggtcatcagactagtgctgagtcttggggtactggcagagctgtggctcgaattcccagagttcgaggtggtgggactcaccgctctggccagggtgcttttggaaacatgtgtcgtggaggccgaatgtttgcaccaaccaaaacctggcgccgttggcatcgtagagtgaacacaacccaaaaacgatacgccatctgttctgccctggctgcctcagccctaccagcactggtcatgtctaaaggtcatcgtattgaggaagttcctgaacttcctttggtagttgaagataaagttgaaggctacaagaagaccaaggaagctgttttgctccttaagaaacttaaagcctggaatgatatcaaaaaggtctatgcctctcagcgaatgagagctggcaaaggcaaaatgagaaaccgtcgccgtatccagcgcaggggcccgtgcatcatctataatgaggataatggtatcatcaaggccttcagaaacatccctggaattactctgcttaatgtaagcaagctgaacattttgaagcttgctcctggtgggcatgtgggacgtttctgcatttggactgaaagtgctttccggaagttagatgaattgtacggcacttggcgtaaagccgcttccctcaagagtaactacaatcttcccatgcacaagatgattaatacagatcttagcagaatcttgaaaagcccagagatccaaagagcccttcgagcaccacgcaagaagatccatcgcagagtcctaaagaagaacccactgaaaaacttgagaatcatgttgaagctaaacccatatgcaaagaccatgcgccggaacaccattcttcgccaggccaggaatcacaagctccgggtggataaggcagctgctgcagcagcggcactacaagccaaatcagatgagaaggcggcggttgcaggcaagaagcctgtggtaggtaagaaaggaaagaaggctgctgttggtgttaagaagcagaagaagcctctggtgggaaaaaaggcagcagctaccaagaaaccagcccctgaaaagaagcctgcagagaagaaacctactacagaggagaagaagcctgctgcataaactcttaaatttgattattccataaaggtcaaatcattttggacagcttcttttgaataaagacctgattatacaggcagtgagaaacatgaaaaaaaaaaaaaaaaaa

SEQ ID NO: 299 - DNA, 6774 bp, HOMO SAPIENS
cggcgtgagcttcggccgccattttacaacagctccactcgcgccggacacagggagcagcgagcacgcgtttcccgcaacccgataccatcggacaggatttctccgcctcagcccaacggggagggctagttgcacatagtgatttagatgaaagagctattgaagctttaaaagaattcaatgaagacggtgcattggcagttcttcaacagtttaaagacagtgatctctctcatgttcagaacaaaagtgcctttttatgtggagtcatgaagacttacaggcagagagaaaaacaagggaccaaagtagcagattctagtaaaggaccagatgaggcaaaaattaaggcactcttggaaagaacaggctacacacttgatgtgaccactggacagaggaagtatggaggaccacctccagattccgtttattcaggtcagcagccttctgttggcactgagatatttgtgggaaagatcccaagagatctatttgaggatgaacttgttccattatttgagaaagctggacctatatgggatcttcgtctaatgatggatccactcactggtctcaatagaggttatgcgtttgtcactttttgtacaaaagaagcagctcaggaggctgttaaactgtataataatcatgaaattcgttctggaaaacatattggtgtctgcatctcagttgccaacaataggctttttgtgggctctattcctaagagtaaaaccaaggaacagattcttgaagaatttagcaaagtaacagagggtcttacagacgtcattttataccaccaaccggatgacaagaaaaaaaacagaggcttttgctttcttgaatatgaagatcacaaaacagctgcccaggcaaggcgtaggttaatgagtggtaaagtcaaggtctgggggaatgttggaactgttgaatgggctgatcctatagaagatcctgatcctgaggttatggcaaaggtaaaagtgctgtttgtacgcaaccttgccaatactgtaacagaagagattttagaaaaggcatttagtcagtttgggaaactggaacgagtgaagaagttaaaagattatgcgttcattcattttgatgagcgagatggtgctgtcaaggctatggaagaaatgaatggcaaagacttggagggagaaaatattgaaattgtttttgccaagccaccagatcagaaaaggaaagaaagaaaagctcagaggcaagcagcaaaaaatcaaatgtatgacgattactactattatggtccacctcatatgccccctccaacaagaggtcgagggcgtggaggtagaggtggttatggatatcctccagattattatggatatgaagattattatgattattatggttatgattaccataactatcgtggtggatatgaagatccatactatggttatgaagattttcaagttggagctagaggaaggggtggtagaggagcaaggggtgctgctccatccagaggtcgtggggctgctcctccccgcggtagagccggttattcacagagaggaggtcctggatcagcaagaggcgttcgaggtgcgagaggaggtgcccaacaacaaagaggccgcgggcagggaaaaggggtcgaggccggtcctgacctgttacaatgaagactgacttgctatgtgggattacaccagaagcttgcagtggagtaatggtaaggaaatcaagcaaccttaaatatgtcggctgtataggagcatattctattgcagaagaccttcctatgaagatcatggaatcaaatacgggacattgaactaatacttggactttgatatgaatttctttaacaattttctctgcagtgcaagttattaaactaaagctactctattttcaaaatgtgttccaacagaaatccttcataactcctagcatggtatcttaataaagaataaagttcttttaaaaatctgctctaagtagatttttccccttttttaaattaaggatcccaacagtggtattttgaaatattctcttgaatttgtgcatttaaattttattgcagtggtatagatgaatgccactgatggtatccttaaattttatttctgctcaccaaggttaatcatgattgtctatatcttttttatagtgatcacttttgaattgtgttcagatatgcagtttcaggtgtaatcatcagagctggttagtcaggcattccagatagtggttcttttcagaacctttttaaaagggttggttaactacctcagtagcagaggattgaactataccctgtctgtactgtacatagaaaatctttgtagataaaagcaaggcttgttaaatatgatatgagggtaagattttaatataccaaatgtaacattcttagttgcctttagtttcagaggcttgtaagacttcctcatgaccatcataacaggccttgcttttgtcgtattttgtggctgaaaaagcagccttgcttcttcagatattgtagttatttggatgtataatagtttagcaagatgttacttttgtaagacatcagatgttcaaaaaagtgcatccgaacttgtactaaatactgcagtgtccctttataaaaagtcagactaaaactgacaattgtacagcgaagcctgacatttggatattttgaagttttttcataaatcatagaaattagtatatggctgtagtttagctttttaggtaaaaggtatgtttcattagtgcatttcttcctgctgatcactgtaaacatgtgaatcagctttccatttcttatgcaggtcatgataacttgtagagtagagtacaatcatttgtgctatgtttttaattttctaaagcaccttgatgacagtgagtgtccagtggtgaagcatcctctattgaaccaccctcaaaaatttttttgccaagtcctaagttgatagcttaaagtaaaaagtgaaaattatagtttcattaggacttggtgtaaagaaatcccctccccccttccccaaagggatactgcagttatatcacatacccaataggcaccacgatgaagatcagagcttatacttaattaaggttttatacacaccagttccccagtaaatgcaaatttaacaagaaaatcagacatgtcatatgttcaaaatgctcatggcaaacaatcattttgcattcctgcaaataaaattgttttatactgtaagctggaggcgagtgtaacttatttttgtaataaagtttttattttttttatgtgtcattaatataaatgtgtgttagtgtagaaatcttctggtttaaaaacttagaattgcacacatttcagtatgtttatttgtacttacataattttagaatagtggttgccaatagcctgtatgtttcacattaattggttttttgttatctaaataaatcattttagtatgttgtatgtcagttactgggatagctgggacatagagtgtaatttaaaatttgtcaataagtattcattggaatatatgtaaatgtgccttgccggttattgaaacttatctacaaaatgagtatggggtgacaaaaattagttcctggtgcttaatgaaactttctgccactgattttatatattaccccgtgcttttttaaagtacatctctctcaaaacttagtgtaagtttgagggctacacaaaacatttacatttcattctaacataatgaatataataggttgtggaaagtgggtaaactaaatgtagccttcagtaaaattgaatctcagtgtaatccttggtgctggcatttctcagttccgaggagttaaatgatcccatctaagaggtcattgccatgcctattggcactttactgtcatagcatttttaagggacactgtcaaggtgtttaagttctcagaattacttgttgggattttaggacaggtttgtttacttaaagtaagaactgcattgtcaaagttgaaagaggaacacttttgtgagttcacaaatgtgttcttaagaaaacattaaaatatggagctctgggttttcaagactatttggcattcttaatttggggacttgggagggaaactgataaaaagaaattgaagaattgatggttatacttaaagaagggtaatgtaaacagtggtgatgaaatatatacacatcaagtgaaattacttgacagtgttcatttgaatgactttgaattcaagccattataattacttttaaaattaaatatcatttgcactgttctgataatgggtgcagtttttgagcaatataatcagagctaaatatgcatgtagtgattagtgatgtgaacaattaacgttctgagaagaaatactaactgtggtattttcaaacttaaatttctgtagtaaaatcagtatcaaagtcttatcagatcaaggaaaaacaggcaatgcatataaacatacttttgaatgttgtgtggcctataaagcaataatgcaatttatatggaatgtcatgggatatgagaaatggaaatgcaaaaataactaatcctttagtaaaaatgtcaacatgttaaagggggaatgttaactaatgtaggttattgctatttgtgatttgtttatgggttcttggctttgacagcttcaaagaatggacagtgataagttaaaagaaattttgtatattgtcaaggaaagggtcttaaatccgagtcaagtcccttccttggggtaaaaaatgtattcttaaagcattctgatgttaaaaagaaaacttaagttatctaaccaaaacagacgcaagattttgtttctgcagactacttggcaatcaaaagtgatcataaatttaggttatcagttttcagaaagttgctttgtgagaaaattttgttagatatattctcccaagcatgctttttgtggaaggttttcagccattgccactgaatcagatgttaaaaatgaagggaaaattgagtgtgcacacacacaactgttgtacactcatgattgcagtttttagcttaagaaacttttctaccagttactgtgaatctgacttaaaatgtaaagtttcctcatgataaaataggaacaacatagaaatggattgatggggtgatctgagttattgtatataaaagtttttaaagaatagaatgaacatcaagctagataggcaaaaattgacacattcagaacagcttttttgactgcgaagccaaaagttgtcagaaacagcaaaagatcccttattattacagagtattttacgtagtctctattttaaggagagaaattaaatagaagggcttcatgcatttaggggagggtgctaaaacttctcaagttcgtcaaacttacaggaatacccaccatgatcattttctctctaattatgtataccacaaaattttcatctggccataggaattcactggtgggtgtaaaattaatgactaaagaaattaagtgacaaatacataaaagaaacagacttgtggggatattgttttaaggtgtattaattactcagtgatgataccactcaatagggcatgccactacttttcttaagatgctaattatgaagcagtgctcacaggcattttttaactagcaaattagtagatggacttttggggtctgtcactttttaaaagtatttaagacttaaattctattagcaccacagtctgccttcagtaatacacctaaaatatttttcaggaccagaagcattcagtttgaaaatttgcagatgcaaaccagtattattactaacgctctgggtcaaagattaggtttttaatattaacagtagtctggtaaatatttagaagtctggcattgagaaacaaaagcttgtacctgactagtatttttatttaaaaaaattagttctgttagcttatttaaattgtgttttatttatccgtagaatttatatttatttcattcctttcatctcactgaaaactgtctgcaggccctttgatttggattagatgtgtgaagtactgtcttttgccaaaaacctcaaattacctgttcttttcaacgtagtgggtttgtgcttgtttggagatcagttcaaaaactatctgtactatctgtactgcctctgatgttaagattttatgtatagcataaggaagctagctctgactatattttcctaagaataaagacctatttttgtagcatgtcttaggatctccaggagtccaagaattattgtgggtgtcctccaattcatcactcttcacttaacagcttttaagtagacacttggaatctttagaggtctgtcgccctttgattatccatacattcgaagtaactagccaatggtgaaaaattcctcaagatatcctcagttgcaatcacattactggaagatgaatagaataaatgtattaggctggtcttaatttttgatggaaatattctgttgtcccgtacttgccattggatttgataaagttagtggtaatttggaaagaatcggggacttgccaatatatttgtgggttttagcttatacccctaggatttcttggttgcgggacgagcagttttggccacttccatcaggacaagactttttaggtcacttagtgcaggttttagtttctattttggattaacaacatttatattgattatcgaaaagaagctttcatcatttcagaacagtcctggaagtttgactttgagtgtgggagaagtcctaataaaccattttggaaattaaaaaaaaaa

SEQ ID NO: 300 - DNA, 200 bp, HOMO SAPIENS
atgctactcatcacatcaatgttggtcttatggatgcaattgtcacaggtgaatggacaacaggtaatgcaaattcctcagtaccagcatgtacaagaaggagaggacttcaccacgtactgcaattcctcaactactttaagcaatatacagtggtataagcaaaggcctggtggacatcccgtttttttgatacagtt

SEQ ID NO: 301 - DNA, 439 bp, HOMO SAPIENS
ccctttcagctgttgcttttaggatttgtgagacaggctggagcttggttcagttttgggttcatcattccccgggctgtggcagtgccttccagaaccttcttcccagggctgcggacagggatctggctgggcagtggcaccattccagacctgtgtgagcccgggacctgccggctcttctttgtgtggatgacgtcctgtccgctaaacctccaagggggtccccggctcatcgcagggctcctgctctatgcagcctccttcagccccatcttctcaggtgcaaatattttccagtgatccttattcccagtcagagacacacatgcagcattcaggcttttttgtcatctcgtgggcttttttgtgacgtgtgtgtgttcgacagcaccacagggaaacgcaaatcttgcttattttctattccgtgtcgatt

SEQ ID NO: 302 - DNA, 894 bp, HOMO SAPIENS
cagtctcaatgggggcactggggctggagggcaggggtgggaggctccaggggaggggttccctcctgctagctgtggcaggagccacttctctggtgaccttgttgctggcggtgcctatcactgtcctggctgtgctggccttagtgccccaggatcagggaggactggtaacggagacggccgaccccggggcacaggcccagcaaggactggggtttcagaagctgccagaggaggagccagaaacagatctcagccccgggctcccagctgcccacctcataggcgctccgctgaaggggcaggggctaggctgggagacgacgaaggaacaggcgtttctgacgagcgggacgcagttctcggacgccgaggggctggcgctcccgcaggacggcctctattacctctactgtctcgtcggctaccggggccgggcgccccctggcggcggggacccccagggccgctcggtcacgctgcgcagctctctgtaccgggcggggggcgcctacgggccgggcactcccgagctgctgctcgagggcgccgagacggtgactccagtgctggacccggccaggagacaagggtacgggcctctctggtacacgagcgtggggttcggcggcctggtgcagctccggaggggcgagagggtgtacgtcaacatcagtcaccccgatatggtggacttcgcgagagggaagaccttctttggggccgtgatggtggggtgagggaatatgagtgcgtggtgcgagtgcgtgaatattgggggcccggacgcccaggaccccatggcagtgggaaaaatgtaggagactgtttggaaattgattttgaacctgatgaaaataaagaatggaaagcttcagtgctgccgataaa

SEQ ID NO: 303 - DNA, 369 bp, HOMO SAPIENS
atgttggtactgtccttagatttttggagagagctttcttgccttcaacatctagctgagttttgtcccactgagagaatgggaaacttgactgaaatgatgggagagaatggattaattttggaacatggggcattatgggacatggtaggactgggacaggcctgatagaggctcctttatgtaatgtaagcatagcatgaggttgtaaggagacaatagataggaaggtgcagactggtgagatgagaaagtattaaaaacaacctttgaagtgatgagatgagaaagcattaaaaacaacctttgctttgcccttaggaataatgtgtattatttaaaaggtgtaagcactcattataatttgtt

SEQ ID NO: 304 - DNA, 510 bp, HOMO SAPIENS
  misc_feature (45)..(45): n is a, c, g, or t
  misc_feature (98)..(98): n is a, c, g, or t
  misc_feature (150)..(150): n is a, c, g, or t
  misc_feature (165)..(165): n is a, c, g, or t
  misc_feature (175)..(175): n is a, c, g, or t
  misc_feature (193)..(193): n is a, c, g, or t
  misc_feature (197)..(197): n is a, c, g, or t
  misc_feature (202)..(202): n is a, c, g, or t
  misc_feature (209)..(209): n is a, c, g, or t
  misc_feature (219)..(219): n is a, c, g, or t
  misc_feature (313)..(313): n is a, c, g, or t
acatcatagttgtgaatccattctaaggcagaaatttaagaacangcttcgtcttttgaggaagaccgtaataaaagataatccttcttttaattcgngtctcttgctttaaagaaaagttaccttgcattatagttaatatttctactnggtgtttcctcttangaaacttgangagactattgtcagtgangctngaatngattctngcaaaatcangggaaaagtagtctttagattaataatgtaggattcagaaagtctatagtgtctccctctttgtgggtaggagggaatgggagcagatagaagnctaaagataattttattctgcaggttctggcagtcagaataactggcttttaactttattatgcccgggtacaatgcatattatgtcaaacaaatataacttctttaaatattcacatgtaatcttctcattttgcatgtctagtatttgatgctttgctataaagctacaggtccacaatccctttttcatagaat

SEQ ID NO: 305 - DNA, 2233 bp, HOMO SAPIENS
gggacggcgacagcgggtcggcgggccgcaggagggggtcatgggtaaagactactaccagacgttgggcctggcccgcggcgcgtcggacgaggagatcaagcgggcctaccgccgccaggcgctgcgctaccacccggacaagaacaaggagcccggcgccgaggagaagttcaaggagatcgctgaggcctacgacgtgctcagcgacccgcgcaagcgcgagatcttcgaccgctacggggaggaaggcctaaaggggagtggccccagtggcggtagcggcggtggtgccaatggtacctctttcagctacacattccatggagaccctcatgccatgtttgctgagttcttcggtggcagaaatccctttgacaccttttttgggcagcggaacggggaggaaggcatggacattgatgacccattctctggcttccctatgggcatgggtggcttcaccaacgtgaactttggccgctcccgctctgcccaagagcccgcccgaaagaagcaagatcccccagtcacccacgaccttcgagtctcccttgaagagatctacagcggctgtaccaagaagatgaaaatctcccacaagcggctaaaccccgacggaaagagcattcgaaacgaagacaaaatattgaccatcgaagtgaagaaggggtggaaagaaggaaccaaaatcactttccccaaggaaggagaccagacctccaacaacattccagctgatatcgtctttgttttaaaggacaagccccacaatatctttaagagagatggctctgatgtcatttatcctgccaggatcagcctccgggaggctctgtgtggctgcacagtgaacgtccccactctggacggcaggacgatacccgtcgtattcaaagatgttatcaggcctggcatgcggcgaaaagttcctggagaaggcctccccctccccaaaacacccgagaaacgtggggacctcattattgagtttgaagtgatcttccccgaaaggattccccagacatcaagaaccgtacttgagcaggttcttccaatatagctatctgagctccccaaggactgaccagggacctttccagagctcaaggatttctggacctttctaccagttgtggaccatgagagggtgggagggcccagggagggctttcgtactgctgaatgttttccagagcatatattacaatctttcaaagtcgcacactagacttcagtggtttttcgagctatagggcatcaggtggtgggaacagcaggaaaaggcattccagtctgccccactgggtctggcagccctcccgggatgggcccacatccacctccagtccctggccaggggtgagaggcagaccagcagatggacttgatccctctgtgtctttgggcttctggctggtagataatgtcaacctgcagtcttgattcccagaccctgtacactcctccttttctgttgtgtgatcagtttgtgctttattctgtatttgtctcccatgtcttgctcttctcctggagaattctgtcttctctttggccatctcaaattgagaacctaaactattcctgcagaactgcctggttggcgtccacaagcaatacctctcgttccagcaggaccaagggagccagcctccagtgagtgactccagcaagtgcagccacctctcccttgatggtctgggagcctggcctcagcaaggggccttcctgacctctggctccagtgaagctgaatgtcctcactttgtgggtcacactctttacatttctgtaaggcaatcttggcacacgtggggcttaccagtggcccaggtaattttttgtttcatggactatggactctttcaaagggatctgatccttttgaattttgcacagccctagatacaatcccttttgataaaagggtctttgcttctgattacaggagcactgtggaacgtctgtaaatatgtttttataattccatgtatagttggtgtacactcaaaacctgtccccggcagccagtgctctctgtatagggccataatggaattctgaagaaatcttggggagggaaggggagttggaacaaatgtctgttccctggaggccagtccagtgctcagacctttagactcattgtaagttgccactgccaacatgagaccaaagtgtgtgactagtcaatgaagtgcgacagcattaaagactgatgctaaacctc

SEQ ID NO: 306 - DNA, 1542 bp, HOMO SAPIENS
acaattactctacagctcagaacaccaactgctgaggctgccttgggaagaggatgatcctaaacaaagctctgctgctgggggccctcgctctgaccaccgtgatgagcccctgtggaggtgaagacattgtggctgaccacgttgcctcttgtggtgtaaacttgtaccagttttacggtccctctggccagtacacccatgaatttgatggagatgagcagttctacgtggacctggagaggaaggagactgcctggcggtggcctgagttcagcaaatttggaggttttgacccgcagggtgcactgagaaacatggctgtggcaaaacacaacttgaacatcatgattaaacgctacaactctaccgctgctaccaatgaggttcctgaggtcacagtgttttccaagtctcccgtgacactgggtcagcccaacaccctcatttgtcttgtggacaacatctttcctcctgtggtcaacatcacatggctgagcaatgggcagtcagtcacagaaggtgtttctgagaccagcttcctctccaagagtgatcattccttcttcaagatcagttacctcaccttcctcccttctgctgatgagatttatgactgcaaggtggagcactggggcctggaccagcctcttctgaaacactgggagcctgagattccagcccctatgtcagagctcacagagactgtggtctgtgccctggggttgtctgtgggcctcatgggcattgtggtgggcactgtcttcatcatccaaggcctgcgttcagttggtgcttccagacaccaagggccattgtgaatcccatcctggaagggaaggtgcatcgccatctacaggagcagaagaatggacttgctaaatgacctagcactattctctggcccgatttatcatatcccttttctcctccaaatatttctcctctcaccttttctctgggacttaagctgctatatcccctcagagctcacaaatgcctttacattctttccctgacctcctgattttttttttcttttctcaaatgttacctacaaagacatgcctggggtaagccacccggctacctaattcctcagtaacctccatctaaaatctccaaggaagcaataaattccttttatgagatctatgtcaaatttttccatctttcatccagggctgactgaaactatggctaataattggggtactcttatgtttcaatccaatttaacctcatttcccagatcatttttcatgtccagtaacacagaagccaccaagtacagtatagcctgataatatgttgatttcttagctgacattaatatttcttgcttccttgtgttcccacccttggcactgccacccacccctcaattcaggcaacaatgaaattaatggataccgtctgcccttggcccagaattgttatagcaaaaattttagaaccaaaaaataagtctgtactaatttcaatgtggcttttaaaagtatgacagagaaataagttaggataaaggaaatttgaatctca

SEQ ID NO: 307 - DNA, 1935 bp, HOMO SAPIENS
agaccaaggagtggaaagttctccggcagccctgagatctcaagagtgacatttgtgagaccagctaatttgattaaaattctcttggaatcagctttgctagtatcatacctgtgccagatttcatcatgggaaacagctgttacaacatagtagccactctgttgctggtcctcaactttgagaggacaagatcattgcaggatccttgtagtaactgcccagctggtacattctgtgataataacaggaatcagatttgcagtccctgtcctccaaatagtttctccagcgcaggtggacaaaggacctgtgacatatgcaggcagtgtaaaggtgttttcaggaccaggaaggagtgttcctccaccagcaatgcagagtgtgactgcactccagggtttcactgcctgggggcaggatgcagcatgtgtgaacaggattgtaaacaaggtcaagaactgacaaaaaaaggttgtaaagactgttgctttgggacatttaacgatcagaaacgtggcatctgtcgaccctggacaaactgttctttggatggaaagtctgtgcttgtgaatgggacgaaggagagggacgtggtctgtggaccatctccagccgacctctctccgggagcatcctctgtgaccccgcctgcccctgcgagagagccaggacactctccgcagatcatctccttctttcttgcgctgacgtcgactgcgttgctcttcctgctgttcttcctcacgctccgtttctctgttgttaaacggggcagaaagaaactcctgtatatattcaaacaaccatttatgagaccagtacaaactactcaagaggaagatggctgtagctgccgatttccagaagaagaagaaggaggatgtgaactgtgaaatggaagtcaatagggctgttgggactttcttgaaaagaagcaaggaaatatgagtcatccgctatcacagctttcaaaagcaagaacaccatcctacataatacccaggattcccccaacacacgttcttttctaaatgccaatgagttggcctttaaaaatgcaccactttttttttttttttgacagggtctcactctgtcacccaggctggagtgcagtggcaccaccatggctctctgcagccttgacctctgggagctcaagtgatcctcctgcctcagtctcctgagtagctggaactacaaggaagggccaccacacctgactaacttttttgttttttgtttggtaaagatggcatttcaccatgttgtacaggctggtctcaaactcctaggttcactttggcctcccaaagtgctgggattacagacatgaactgccaggcccggccaaaataatgcaccacttttaacagaacagacagatgaggacagagctggtgataaaaaaaaaaaaaaaaaagcattttctagataccacttaacaggtttgagctagtttttttgaaatccaaagaaaattatagtttaaattcaattacatagtccagtggtccaactataattataatcaaaatcaatgcaggtttgttttttggtgctaatatgacatatgacaataagccacgaggtgcagtaagtacccgactaaagtttccgtgggttctgtcatgtaacacgacatgctccaccgtcaggggggagtatgagcagagtgcctgagtttagggtcaaggacaaaaaacctcaggcctggaggaagttttggaaagagttcaagtgtctgtatatcctatggtcttctccatcctcacaccttctgcctttgtcctgctcccttttaagccaggttacattctaaaaattcttaacttttaacataatattttataccaaagccaataaatgaactgcatatgaaaaaaaaaaaaaaaaaaaaaaaaaaaaaaaaaaaaaaaaaaaaaaaaaaaa

SEQ ID NO: 308 - DNA, 404 bp, HOMO SAPIENS
  misc_feature (80)..(80): n is a, c, g, or t
  misc_feature (83)..(83): n is a, c, g, or t
  misc_feature (85)..(85): n is a, c, g, or t
  misc_feature (89)..(90): n is a, c, g, or t
  misc_feature (93)..(93): n is a, c, g, or t
  misc_feature (97)..(97): n is a, c, g, or t
  misc_feature (101)..(101): n is a, c, g, or t
  misc_feature (103)..(103): n is a, c, g, or t
  misc_feature (106)..(109): n is a, c, g, or t
  misc_feature (112)..(115): n is a, c, g, or t
  misc_feature (117)..(120): n is a, c, g, or t
  misc_feature (122)..(123): n is a, c, g, or t
  misc_feature (141)..(141): n is a, c, g, or t
  misc_feature (143)..(143): n is a, c, g, or t
  misc_feature (168)..(168): n is a, c, g, or t
  misc_feature (181)..(181): n is a, c, g, or t
aaacatgactcactgcaccgtcatcctcccaggctcaaccatcttcccacctcaccctccagctacagctactccagatntgngntganntgngagnatcntntgnnnncgnnnngnnnngnntgcagtgagctgaaatcncncgactgtactctagcctgggtgacngggtgagaccctntctcaaaacaaacaaacaaaaaccccaccagcaaccttgctgacaaatccacaggcccccacgtctgccaattgcctgcctgtatgaactgggcacctgggggaggggcgtggcccccaggctactcatcttggctttcacagccaaagggcctgggtggaacctcagcttactgtgtttactgactgggtaatgtggcctctgaagctgtcacctatctata

SEQ ID NO: 309 - DNA, 1765 bp, HOMO SAPIENS
gcagaagggtcacgtggtggctgggccggggaaatggcggcttcaggagagagcgggacttcaggcggcggaggcagcaccgaggaagcatttatgaccttctacagtgaggtgaaacaaatagagaagagagactcggttctaacttcgaaaaatcagattgaaagactgacccgtcctggttcctcttacttcaatttgaacccatttgaggttcttcagatagatcctgaagttacagatgaagaaataaaaaagaggtttcggcagttatccatcttggtgcatcctgacaaaaatcaagatgatgctgacagagcacaaaaggcttttgaagctgtggacaaagcttacaagttgctactggatcaggagcaaaagaagagggccctggatgtaattcaggcaggaaaagaatacgtggaacacactgtgaaagagcgaaaaaaacaattaaagaaggaaggaaaacctacaattgtagaggaggatgatcctgagctgttcaaacaagctgtatataaacagacaatgaaactctttgcagagctggaaattaaaaggaaagagagagaagccaaagagatgcatgaaaggaaacgacaaagggaagaagagattgaagctcaagaaaaagccaaacgggaaagagagtggcagaaaaactttgaggaaagtcgagatggtcgtgtggacagctggcgaaacttccaagccaatacgaaggggaagaaagagaagaaaaatcggaccttcctgagaccaccgaaagtaaaaatggagcaacgtgagtgaccgcccaaggtcacaggcacagaacctttcccctgctatctcccttcctgcttcgaaggactcattctttcctcccacttccaccccaacatagagtagtatttgctttttagtccattttgttttcaatacgatttaatatcgatcagagtaattcttttgtacattgaaatgaggggcttggtttaaaaaaagacctttccctctccctgcccctagaacaaccagtattagaaggtgccaccattggtgctgccttctcttcccacagcctgtaactcagtgttttgtacttcactgaattgtgatggttagaaacttcgtggatagtttgtggaaatcatccaattaaacatactgcttaaaacagtgttgctgtgacttcagagacaagcctggaaggggcaccttaggaagccccttcgcttcagttgctcgcttctgggtgtgctcccttcgaaggcccagataagacagggaacacttgtgagcacacagagcagcatctgatgccctgtggtgtttggcatgtgccccctgtctactgaccaatcagtgtggcatgaggcccacgccacccaaacctttcactttccaaagagctagccgtcctccacccagtaccatgtcctagcctgtctgcatttgttagtggtaatattctttatgtataataaatttttatacccaagccattgatgtacttttccttgtactctcccttgtgggtcccttgtctggcttggctgaaccccaaaatgctttggggttggacagacctggctgaaccttagtttcttcatctatgaaatgggaatatgaattactgcagcagcttttagggcagatttgccatggcatatacaaggtaactaccatagtgctccttgggtattgccaatatcctattatttctgtgtaaaatgaagatactgattgttttgaggattaaatgaagtaatatatgaaa

SEQ ID NO: 310 - DNA, 11479 bp, HOMO SAPIENS
gagtcccaggattccggggactggagggcagcgccggcagccaaggattttgacacttcatgacatgtcattatttagagcaataatgaatattgacctgttttggattagttgatgaccttcggaaatgatccaataatatctactatagagaagctgaatatactccatttggagtgaacagcccggattgttacagaattttcaagatgacagatccaatgatggacttttttgatgatgccaatctttttggtgagaccttagaaggtttgtcagatgatgcatttgtacaaccaggacctgtttcactagttgatgaattgaatttgggtgcagaatttgaaccgttgcacatagattcactgaaccatgttcaaggtactccaacacatcagaagatgactgattttgaacagttaaatcaatttgattcaataaaatttcaccatgttaatcaatcttttggtagcccagctgaacatgtgttatctccacactctcagtttaattgttctccaatccatccccaaaaccaacccaatggtttgtttccagatgtatcagatggcagtccaatgtggggccatcagacagctactaccatttcaaatcaaaatggatctccttttcaccaacaaggacattcacactctatgcatcaaaataaaagctttgtggcacaccatgactttgccttatttcaggccaatgaacaacaaacacagtgtacttcactacgctcacaacaaaacagaaataatctcaacccagggcagaattctcttagccagtctaaaaattttatgaatgtttctggtccacatagagtcaatgttaaccacccaccacagatgactaatgcatctaattcacaacagtctatttcaatgcagcaattttctcaaacgtcaaatccttcagcacacttccacaagtgtagcagtcatcaagaaggaaattttaatggaccttccccaaatatgacttcttgttctgtcagtaattcacagcaattttcttcacattattccttttccagtaatcatatatcaccaaacagtctacttcagtcctctgcagttcttgcatctaatcatacaaatcagactttatctgattttactggaagtaattccttttcacctcatagaggaatcaagcaagaatctactcagcatatcctaaaccccaatacatcattgaattcaaataatttccaaatattgcattcatcacatcctcagggtaattatagcaattcaaaattatctcctgtgcacatgaacttcccagatcctgttgactcaggaactcaaatgggccatttcaatgatcatgtagaaactaatggcttttcatctttagaagagaatttacttcatcaagtggaatctcaaactgagccattcacaggacttgaccccgaggacctccttcaggagggtcttcttcctcactttgatgagtcaacattcggacaagataattcaagtcacattttagatcatgaccttgatcggcagtttacttcgcatctggtaacacggccttctgatatggctcagactcagttgcaaagtcaggctcggagttggcattcatcattttctaatcatcagcatttacatgacagaaatcacctatgtttacagcgacagcctccatcttccaagaagagcgatggttctgggacatatactaagttgcagaatacccaggtgagggtcatgtctgagaagaagcagagaaaaaaggtggaatcagaaagcaagcaagaaaaggctaatcgtataatatcagaggccatagcaaaagcaaaggagcgtggggaacgcaatattccacgagtaatgagccctgaaaactttcctactgcttcagttgaaggaaaagaggaaaagaaaggtagaaggatgaaatccaagccaaaggacaaagacagcaaaaaaacaaaaacatgttctaagttaaaagagaagacaaaaattggcaaactcattattacattgggtaagaaacaaaaaagaaagaatgagtcttcagatgaaatatctgatgcagaacagatgccacagcatacattaaaagatcaagactctcaaaaaagaagatcaaatcgacaaattaaaagaaaaaaatacgcagaagatatagaagggaagcaatctgaagaagaggttaaaggttctatgaaaataaaaaagaattcagctcctttacctggtgaacagcctttacaattgtttgtggagaatccgagtgaagaagatgctgcaattgtagacaaaattctatcttctagaaccgtaaaaaaggaaatatcacctggagtgatgattgatacagaagaattttttgtaaaatacaagaattactcctatcttcactgtgagtgggccacagaagagcagcttttgaaagataaaaggatccagcagaaaatcaaacgattcaaattgagacaagcacaaagagcacatttttttgcagacatggaagaagaaccatttaacccagactacgttgaagtagacagagtattagaagtctctttttgtgaagataaggatactggtgagcctgttatttactacttagtaaaatggtgctcattgccatatgaagatagtacttgggaactaaaagaagatgtagatcttgcaaaaatagaagagtttgaacaactgcaagcttcaaggcctgacacaagacgtttggaccgtcctccttctaatatttggaagaaaatagatcaatccagggactataaaaatggcaatcaactcagggaatatcaactggaaggactcaactggctcttgttcaattggtacaatagacgaaactgcatcttagcagatgaaatgggtcttggcaaaactattcaatcaattacattcctctatgaaatccttctgactggtataagaggacctttcctgattattgctccactttctactattgcaaactgggagagagaatttcgtacgtggactgatattaacgttgtggtttatcatgggagcctgattagcagacaaatgatacagcaatacgagatgtacttcagggattcacaggggcgtatcattcgaggagcttacagattccaagccatcatcaccacttttgaaatgattcttggaggctgtggagagcttaatgcaattgaatggcgatgtgtgattattgatgaagcacataggttaaaaaataaaaattgtaaactcttagagggcctgaaactcatgaatctggaacacaaggtgcttttgactggcacccctctccaaaatacagttgaagaactatttagtcttcttcactttcttgaacccttaaggtttccttctgaatcaacatttatgcaagaatttggggatctgaaaacagaggaacaggtacagaaacttcaggctatcctgaaaccaatgatgttgagacgattaaaagaagatgtggaaaagaagttggcacctaaagaagaaaccatcattgaagtagaacttactaatattcaaaagaaatactaccgggctatcttggaaaagaacttttcttttttatccaaaggagcaggacaaactaatgtacctaacttggtcaataccatgatggagctcaggaaatgttgtaatcatccatatcttataaaaggtgctgaggagaaaatacttggagaatttagagatacttacaatccagctgcttctgattttcatcttcaagcaatgatccagtctgctggtaaattggtccttattgataaattgcttcccaaaatgaaagccggaggtcataaagtgctcatcttctctcaaatggttcgttgccttgacattctggaggactatctcatacataaaagatacttatatgagcgaattgatggcagagtcagaggaaatcttcggcaagctgctatagatagatttagtaaacctgattcagatagatttgtttttctcctgtgtacccgagctggtgggttgggcatcaacttaactgcagctgatacatgtataatttttgattctgattggaatcctcagaatgatcttcaggcccaagctcgttgccacagaattggtcagaacaaagcagttaaagtctacagactggtaactcgtaactcatatgagagagagatgtttgaccgagccagtttgaaactgggcctagataaagctgtgttacagagcatgagtggaagagaaagtaatgttggtggtattcagcagctttccaaaaaggaaatagaagatctgcttcgaagaggtgcttatggtgctattatggaggaagaagatgaaggctctaaattctgcgaagaggatatcgatcagattttactacgtcgtacaaaaactattacaattgaatcagaaggacgtgggtcaacatttgccaaggcgagttttgtggcatctggaaaccggacagatatttctttagatgatcccaacttctggcaaaaatgggctaaaaaggcagaaatagatatagaggccatcagtggcagaaacagcttggttattgacactccaagaattaggaagcaaacaagaccttttagtgccacaaaagatgaattggctgaattatctgaagctgaaagtgaaggagatgaaaagcccaaactccggagaccctgtgaccgttccaatggctatggaagaactgaatgctttagagttgagaaaaacctgctagtttatgggtggggccgatggagagagattctatctcatggccgtttcaaaaggcagctaaatgaacacgatgtagagataatttgccgagctctcttagcatattgccttgttcactaccgaggagatgagaagattaaaggtttcatatgggatctcattactccaactgaagatggacagacacgagagctacagaatcatctaggcctatcagctcctgtacccaggggtcgaaaagggaagaaagtaaaaactcaaacaagctcatttgatatacaaaaagcagaatggcttcgaaaatataatcccgagcagctccttcaagatgaaggctacaaaaaacatataaaacaccactgtaataaggttttgcttcgtgtgagaatgctgtattatctaaagcaagaagttattggaaatgagtgtcagaaagtatttgatggagttgatgcaagtgacattgatgtttgggtaccagaaccagaccactcagaagttcctgctgagtggtgggattttgatgctgataagtcactccttattggagtttttaaacatggatatgaaaaatataacactattcgagcagacccagcattatgcttcttggaaagagtgggaaaacctgatgagaaagcagttgctgctgaacagagagcgaatgattatatggatggggatgtggaagatccagaatacaaacctgccccagccatctttaaagatgatatagaggatgatgtttcctcaccaggagatcttgttatagcagatggagatggtcaactgatggagggtgataaagtatattggcctactcaatcagctttaaccacacgtttgaggcgtctcatcactgcataccagcgtactaataaaaacagacaaattcagcagatacaaccgactttctcggtgcctaccagtgtaatgcagcctatttatgaggaagccactcttaatcctaaaatggcagccaagatagaaagacagcaaagatggacaagaagagaagaagctgacttttatagggttgtatctacatttggagtggtttttgaccctgacagaggccaatttgattggacaaaatttagagctatggctaggctacataagaaaactgatgatagtttggaaaaatatttgtacgcattcatgtccatgtgtcggagggtttgtcgtcttccttccaaagaagaattggtggatccaaatatttttatccagcccatcacagaagaacgtgcttctaggactttgtatcgcattgaacttctaaggaaagtacgggaacaggcccttcgacatccacagttgtttgaacgcttgaagctttgccatccaaatccagatttaccagtctggtgggaatgtggccctcatgatagggatttgcttattggtgctgccaaacacggggtgagccgaacagactatcacattcttcgtgatcctgaactctcatttatggcagctcagaggaactacagtcaaagtaagatggctcattcaaggacttctaccccacttctacagcaatatcaagtagcactttctgcttctcctcttacctctctacctaggctcctagatgctaaaggtattattctagaggagatgaaagttaaaagtgaaaaccttaaagaggagcctcagtcttctgaagaagaatctatgtcttctgtggaaaccaggacactaataaaatctgagcctgtaagtccaaagaatggtgttttaccacaggctactggagaccagaaatctggtggaaaatgtgaaacagacagacgcatggttgcagccagaacagaacccctaactccaaacccagcttctaagaaaccaagagtccacaaaaggggatcagaatctagttctgattctgactcagattctgagagatcatcttgttcttccagatcatcttcttcctcatcatcctcttcttgctcccactctcgatcaggctctagttcttcttcatcttcatcttgttcttcagcatcttcttcatcctcttcctccacctcttcctcctcctcctcctcttcatcttcatcagaagaaagtgacagtgatgaagaagaagcccaaaaacgagaaagtactactcacatgaaagcctatgatgaagaaagcgtcgcgtcactgagcactacccaggatgagactcaggatagttttcagatgaacaatgggacaccagagtctgcttatatcttacaaggtggatatatgctggcagcctcgtattggccaaaggatcgtgtgatgatcaataggttggacagtatttgtcaaacagttctgaaaggaaagtggccttcagctagaagaagttatgatgctaacacagtggcttctttctataccacaaaactgctggacagccctggagcagctacagaatacagcgatcccagtgtacccactcccccaggtgccggtgttaaagaagaacatgatcagtcaacacagatgtcaaaggaaggtggtttgaagttgacatttcagaagcaagggcttgctcagaaaagaccatttgatggtgaagacggtgctctggggcagcagcagtacctcactcggcttcgagagcttcaaagtgcatcagagaccagcctcgtcaatttcccaaaatccataccagtatcaggtacttccattcaaccaacccttggtgccaatggtgtgatattagacaaccagcctatagtcaaaaaaaggcgaggaaggaggaagaatgtagaaggtgttgacatcttcttttttaacagaaataaaccacctaatcatgtttctttaggcttaacctcctcacagatttccacagggataaatccagcactatcctatactcaacctcaaggaattcctgatacagaaagtccagttccagttattaatcttaaagatggaacgagacttgcaggagatgatgcaccaaagagaaaggatttggaaaaatggcttaaggagcacccgggttatgtggaagatttgggagcttttattcctagaatgcagcttcatgagggaagacccaaacaaaaaagacaccgttgcagaaaccccaataaactagatgtgaatagtctcactggagaagaacgtgttcaactgattaacagaagaaatgctagaaaggttggaggtgcatttgctccccctttgaaagatttatgtagattcctaaaagaaaattcagaatatggagtagctcctgaatggggagatgttgttaagcaatctggatttcttccagaaagcatgtatgaacgtattctcactggtcccgttgtgagagaggaagtaagcaggcgggggagacggcctaaaagtggaattgcaaaggccacagcagcagcagctgctgcatctgccaccagtgtttcaggcaatcctttgttagccaatggactacttccaggtgtggatctcacaactcttcaggccttacaacaaaacctacaaaacttgcagtcactgcaagtaactgctgggttgatgggaatgcctaccggccttccttctggaggagaagctaaaaacatggctgctatgttccccatgctgctgtcaggaatggctggattaccaaatctgttgggcatgggaggactcctgacaaagcctacggaatctgggacagaagacaaaaagggaagtgactctaaggagtcagaaggaaaaacagaaaggacagagagccaaagttcagagaatggtggagaaaactctgtgtcaagttctccttccacatcctctactgctgcattaaatacagctgcagctgccaacccattagctcttaacccactattactatctaatatactttatccagggatgcttctcactccaggccttaatcttcatattccaactttgtcccagtccaatacttttgatgtacaaaacaaaaacagtgacttaggctcgtctaagtctgtagaagtaaaagaagaagattccagaattaaagatcaggaagacaaaggaggaactgaaccaagtcctctcaatgaaaacagcacagatgagggttcagagaaagctgatgcttcatctggatctgatagtacatcgtcgtcatctgaggattcagattctagtaatgaagactgattcccagactctgcacttaaaatatgaactgattttggattttttctttaataattaattgtaaataccccagtgttgagtgcatcaataacttactgaccgaacatttcagttatttgtttagaagtgcaaactgctttcagagactttttgcatgtaatatttcttaagattcataagtttctgaactcgtatgtactatcaaatacataaaggtgtaaaattacaacaaaaggcattataattttgttgggggttaattttatgaaaattatgctcaataagagttgtatatttaatatatttgcagtgaacacagaatactttatgcatattactgatttaatttgaatatagttttacagcctccttgacacctataatttacagatcaaaactcagcaataatttgggcagctaatgaatgtcatgaaagctgtagaatctacatcaccatccattgctttaattacatgaaaatgctctagtgttgtgatgcactgctgatgtttccaattcaggtacaagtatgttttaaagaagaaataagtttcccaatcagccaatttaactggctacctgttacctcagctgagttagtttaggaagtttacattcgtttctaattctatacttgttttcaggggttttttaaacacatcctatatatcatgtcaatctggcaagaaatatgacttgctttttgctgagcttaattcagatatcagtaaaattaagtcataaaataatcatgtgtcatgtgactttggcaccctatagacatacttagttttaacttttcaaagtttggcctcctattagaaataatcatgtctcagatgagtaatgtctgtttccagggttcagaaaaggcaaactcatgaaatgccactgaaaagaactttcaacacagcatacttcatgtaaaagaaattgtttgtttgctttctttgtgtagatttctatttgtgttttatgtcatggaaatattccagaattaacagataatagtggtaaagtaatatgcagatagtctaaattcattttgagtttctaggtgtaagcagactaaatgttgcccagaatcagtgttgggttatcagtttatattaaatatactgagttgcccgttttgaaaatgcactttgaataatctcaaaaagatgtacaagttatacctgtaaaccacaaaagtgaagcctgaggcttctgttcaatttcatagactcctttaccatgtaaaatttgtctgatatttgatttgtgatacaatttctcctgctaaagctgctattattctgacaaggtagaggtccaggttcacctttatatatatttaaaacaattagtactgaattggacataaaaatattgacattctaaggagagatatatgttagcatttttctggtactcaaataagttagtagtaaagtctgcaagggcataaatttagggggaaaaagtgtcccagttctctcctacagaaaaaatactttcagtatgttttgataaaactgttgctttgtcatgagttagtcaattgtatcaggttttccaagacctttaccagtaaattatgtttctgtatgtaaaataaccccttattagagagacagtgttatatgtatttacaaaattatataagttccattgggattgtattgattttgtattttcccaaaatagtactttgaattgatagtcctttatgcaatgtcttagcaatagtctctataatgcccatccaggagaagtgggtagtaattcttcatcatgaaaatgatatattacatatttagtatcttccctttgcagtattgcacttttgtttaactagaatacacctatgagatagccaaagtttcaaacacagttatcttagtttaccggtggagtatttcaacaccaaccacatttcccttcctccctctaattctacccacatgatctttattccttcctttcgccaattaaaaaaaaaaaaaaggaaaaaaaatctgtagatcttgtcactaaaatctaatttatatcaaatttatgagagaaagtattttcctaattatggtcaaataaatttggttaacatcctagtgattctctttctatataataaggcaattacagttttcaaagcattaagtctaacataactttaaacattctcttaggtttcaagacacttctatttaatattcattggggaaaagttgtccagctatcagctaagaaaacacatgcaaatatggttgtgtaaagttaagggttataaggaaaaaaaaatcagtagaattacataatactaaagttgcagttgaaagaatatccaagtatgtgttggtagttactaaaagaattatagctgttattgccttgtatttatagcccttgtttcaggttttatgattcaagtcttagtccaatctttcttttggacatttgcaatatttaccagttgtgttttgtgtagtctgaatttgctttctgtagttgagcaaacgtcttaaaaagtcatttgtaatttattaaattactttctatgatgttctatagagcaaatggaagtttaattattttttattaaacatattctttgactacccatgaaaaaaaaaaaaaaaaaa

SEQ ID NO: 311 - DNA, 1047 bp, HOMO SAPIENS
gtccagaggcggcggtatcacaggctctccgacatgtctatgctggctgaacgtcggcggaagcagaagtgggctgtggatcctcagaacactgcctggagtaatgacgattccaagtttggccagcggatgctagagaagatggggtggtctaaaggaaagggtttaggggctcaggagcaaggagccacagatcatattaaagttcaagtgaaaaataaccacctgggactcggagctaccatcaataatgaagacaactggattgcccatcaggatgattttaaccagcttctggccgaactgaacacttgccatgggcaggaaaccacagattcctcggacaagaaggaaaagaaatcttttagccttgaggaaaagtccaaaatctccaaaaaccgtgttcactatatgaaattcacaaaagggaaggatctgtcatctcggagcaaaacagatcttgactgcatttttgggaaaagacagagtaagaagactcccgagggcgatgccagtccctccactccagaggagaacgaaaccacgacaaccagcgccttcaccatccaggagtactttgccaagcggatggcagcactgaagaacaagccccaggttccagttccagggtctgacatttctgagacgcaggtggaacgtaaaagggggaagaaaagaaataaagaggccacaggtaaagatgtggaaagttacctccagcctaaggccaagaggcacacggagggaaagcccgagagggccgaggcccaggagcgagtggccaagaagaagagcgcgccagcagaagagcagctcagaggcccctgctgggaccagagttccaaggcctctgctcaggatgcaggggaccatgtgcagccgcctgagggccgggacttcaccctgaagcccaaaaagaggagagggaagaaaaagctgcaaaaaccagtagagatagcagaggacgctacactagaagaaacgctagtgaaaaagaagaagaagaaagattccaaatgaatccttcccagccggggccttccgacc

SEQ ID NO: 312 - DNA, 1020 bp, HOMO SAPIENS
atggagatggatgagcacccggatatcctgcccacccaggggcaaggcaacatcatcattactaagtatgagcagggccccaaagcccaggacccagcatccatgggccgctgccggaggcctggcagctccgctaactccatcatggctcatttgacagcaaaggaggtgggctaccacagggacctgagccgcaacactgccgtcctcctttatctgccggaggaagatgctttctgggtggctggctcagctgctggccgcccaaatactgcccagctccggaagctcctatcacatcaggagcaggtgctgcacaagtccttcccaaagatcatgagacagctgggcaaggaagggctatgcattgagggttccatgctgacgaggctcctccagtgtttccttgatgggaaatccttcgggctcaccctgcgactgtgggatgtgcttatcttggagggcgagcaggtactgacagccatggcgcatgcatcattcaaaatacacagggagcacctcatgaagctttcctggagcaccgtctgggagtttcaggagcgactctctcagagctgggccctggaggacaactcggtcctcaggaaccttcaaacctctatgaaggaactcacaaaaaaacactgggacctgccatccccagagagcttgctacaaaatgcacattgctgtaccatagcctggggcttgcagtccaaggctggcaagaattcctgcacgtcaagggcctcaggtgactttcgtgcacatccaaggacagagtccttgatgaaacaccttcctgctcaaaaaagaaggaacaagggtcaacgaacagcgagcaagtcatggaaagagatgaaatatccccccctgggtgtggccatcgggaaggaatcctgccccatcactgacaatgagctgcattttttggagaggcggcccctgtccccaaagctggtgcaagccctgggtgtagcaggccagtgccttgcagtgcaattgtacctgaggacctaa

SEQ ID NO: 313 - DNA, 3932 bp, HOMO SAPIENS
tcccagacagaacctactatgtgcggcggcagctggggcgggaaggcgggagctgggggcgctgggggcgctgcggccgctgcggccgctgcagccgctgcagcgccagggtccacctggtcggctgcacctgtggaggaggaggtggatttcaggcttcccgtagactggaagaatcggctcaaaaccgcttgcctcgcaggggctgagctggaggcagcgaggccgcccgacgcaggcttccggcgagacatggcagggcaaggatggcagcccggcggcagggcctggcgaggagcgcgagcccgcggccgcagttcccaggcgtctgcgggcgcgagcacgccgcgaccctgcgtgcgccggggcgggggggcggggcctcgcctgcacaaatggggacgaggggggcggggcggccacaatttcgcgccaaacttgaccgcgcgttctgctgtaacgagcgggctcggaggtcctcccgctgctgtcatggttggttcgctaaactgcatcgtcgctgtgtcccagaacatgggcatcggcaagaacggggacctgccctggccaccgctcaggaatgaattcagatatttccagagaatgaccacaacctcttcagtagaaggtaaacagaatctggtgattatgggtaagaagacctggttctccattcctgagaagaatcgacctttaaagggtagaattaatttagttctcagcagagaactcaaggaacctccacaaggagctcattttctttccagaagtctagatgatgccttaaaacttactgaacaaccagaattagcaaataaagtagacatggtctggatagttggtggcagttctgtttataaggaagccatgaatcacccaggccatcttaaactatttgtgacaaggatcatgcaagactttgaaagtgacacgttttttccagaaattgatttggagaaatataaacttctgccagaatacccaggtgttctctctgatgtccaggaggagaaaggcattaagtacaaatttgaagtatatgagaagaatgattaatatgaaggtgttttctagtttaagttgttccccctccctctgaaaaaagtatgtatttttacattagaaaaggttttttgttgactttagatctataattatttctaagcaactagtttttattccccactactcttgtctctatcagataccatttatgagacattcttgctataactaagtgcttctccaagaccccaactgagtccccagcacctgctacagtgagctgccattccacacccatcacatgtggcactcttgccagtccttgacattgtcgggcttttcacatgttggtaatatttattaaagatgaagatccacatacccttcaactgagcagtttcactagtggaaataccaaaagcttcctacgtgtatatccagaggtttgtagataaatgttgccaccttgtttgtaacagtgaaaaattgaaaacaacctggaagtccagtgatgggaaaatgagtatgtttctgtcttagattggggaacccaaagcagattgcaagactgaaatttcagtgaaagcagtgtatttgctaggtcataccagaaatcatcaattgaggtacggagaaactgaactgagaaggtaagaaaagcaatttaaagtcagcgagcaggttctcattgataacaagctccatactgctgagatacagggaaatggaggggggaaagctggagtattgatcccgcccccctccttggttgtcagctccctgtcctgtgtgtgggcggaacatagtccagctgctctatagcaagtctcaggtgtttgcagtaagaagctgctggcatgcacgggaacagtgaatgccaaacacttaaagcaattcgatgtttaagtatgtaagttcttttttttttagacagcgtttcgctcttgttgcccaggctagcatgcaatggtgtgacctcggcttactgcaacctccgccttcccagattcaagcgattctcctgcctcaggctcccaagtagctaggaccaggtgcgcgccaccacgcccggctaatttttgtattttgtatttttagtagagatggggtttcaccatgttggtcaggctagtctcgaactcgtgaccgcaagcgattcacccacctcagcctcccaaagtgctgggattaccggcttgagccaccacacccggcacatcttcattctttttatgtagtaaaaagtataaggccacacatggtttatttgaagtattttataatttaaaaaaatacagaagcaggaaaaccaattataagttcaagtgagggatgatggttgcttgaaccaaagggttgcatgtagtaagaaattgtgatttaagatatattttaaagttataagtagcaggatattctgatggagtttgactttggttttgggcccagggagtttcagatgcctttgagaaatgaatgaagtagagagaaaataaaagaaaaaccagccaggcacagtggctcacacctgtaatcccagcgctttgggaggctaaggcaggcagatcacttgagaccagcttgggcaacatggcaaagccccatctctacaaaaaacacaaaaattagctgggcattgtggcgcacacctgtattcccatctagtcaggaagctgagatggaagaattaattgagcccacgagttcaaggctgcagtgagtcgtgattgtgccactgcactccagccggggtgacagaagagaccttgtctcgaaaaggaatctgaaaacaatggaaccatgccttcataattctagaaagttattttcaactgataaatctatattcacccaaataatcaagggtgaaggtaaaataatacatttttagacaagcaaagactcaggggttacctccatgtgccctttttagggaagctgttggagaaaatactccagcaaaatgaaggagtacacaaaccagagaatgacatgaatccagcaaataggatccaacacaggcaatattccagctatggagctagctttaaaaaggaacagtaaaaatattaatcggttagctgggtggaatggcccatgcctgtagtcccagctactcaggaggctcagcagcaggacgacttgagcccaagagttccagaccagcctggccaccttagtgagatcccttctcttaaaaataataacttattgccagatttggggcatttggaaagaagttcattgaagataaagcaaaagtaaaaaaaaaaaaaaaaaaaacaaggggaaagggttggttaggcaatcattctagggcagaaagaagtacaggataggaagagcataatacactgtttttctcaacaaggagcagtatgtacacagtcataatgatgtgactgcttagcccctaaatatggtaactactctgggacaatatgggaggaaaagtgaagattgtgatggtgtaagagctaaatcctcatctgtcatatccagaaatcactatataatatataataatgaaatgactaagttatgtgaggaaaaaaacagaagacattgctaaaagagttaaaagtcattgctctggagaattaggagggatggggcaggggactgttaggatgcattataaactgaaaagcctttttaaaattttatgtattaatatatgcattcacttgaaaaactaaaaaaaaacaataatttggaaaaacccatgaaggtaactaacggaaggaaaaactaagagaatgaaaagtatttgcctctggaaagaacaactggcaggactgttgttttcattgtaagacttttggagccatttaattgtacttaaccattttcatctatttctttaataagaacaattccatcttaataaagagttacacttgttaataagtaaaaaaaaaaaaaaa

SEQ ID NO: 314 - DNA, 522 bp, HOMO SAPIENS
  misc_feature (316)..(317): n is a, c, g, or t
ttgtctccttaattacctaggcttgtttcccatatgagtagactctcccttagctgggaaagcctgacgaacgccatctggccccttgatttacaagacattaagggctacttacccaacccccttcctcaaagagttaacctgcgtaagcagatcctcagcatttcaaaggagcccaattagctgataaggtactggaacaaacaatgtacgaagttcccaggattttgctcaaaagcataacaacataaagccttgagtctgtgtctggcatagcatccatatctaactcttatgaaggatttagagcccggcnnctggttccgttgctttttttgtaaccatttgtcttttaaattgtttatttctctgtaaccatttgttttttgattcttgcatgtttttacttctgtagaattattgcatttgagctccgctccccttccgaaccaaggtataaaagtaaatcaagccccttcctcggggccgagagaattttggaaagtcaagccttctcttggc

SEQ ID NO: 315 - DNA, 3306 bp, HOMO SAPIENS
ctctgtggttcgggtccgctttcgtctccgtcctgctgccgttaccgccgctgctgccgccgcttgcgtcccccgctccggtctgtggtgcagccgggacccaggaccatgtctctgtctcgctcagaggagatgcaccggctcacggaaaatgtctataagaccatcatggagcagttcaaccctagcctccggaacttcatcgccatggggaagaattacgagaaggcactggcaggtgtgacgtatgcagccaaaggctactttgacgccctggtgaagatgggggagctggccagcgagagccagggctccaaagaactcggagacgttctcttccagatggctgaagtccacaggcagatccagaatcagctggaagaaatgctgaagtcttttcacaacgagctgcttacgcagctggagcagaaggtggagctggactccaggtatctgagtgctgcgctgaagaaataccagactgagcaaaggagcaaaggcgacgccctggacaagtgtcaggctgagctgaagaagcttcggaagaagagccagggcagcaagaatcctcagaagtactcggacaaggagctgcagtacatcgacgccatcagcaacaagcagggcgagctggagaattacgtgtccgacggctacaagaccgcactgacagaggagcgcaggcgcttctgcttcctggtggagaagcagtgcgccgtggccaagaactccgcggcctaccactccaagggcaaggagctgctggcgcagaagctgccgctgtggcaacaggcctgtgccgaccccagcaagatcccggagcgcgcggtgcagctcatgcagcaggtggccagcaacggcgccaccctccccagcgccctgtcggcctccaagtccaacctggtcatttccgaccccattccgggggccaagcccctgccggtgccccccgagctggcaccgttcgtggggcggatgtctgcccaggagagcacacccatcatgaacggcgtcacaggcccggatggcgaggactacagcccgtgggctgaccgcaaggctgcccagcccaaatccctgtctcctccgcagtctcagagcaagctcagcgactcctactccaacacactccccgtgcgcaagagcgtgaccccaaaaaacagctatgccaccaccgagaacaagactctgcctcgctcgagctccatggcagccggcctggagcgcaatggccgtatgcgggtgaaggccatcttctcccacgctgctggggacaacagcaccctcctgagcttcaaggagggtgacctcattaccctgctggtgcctgaggcccgcgatggctggcactacggagagagtgagaagaccaagatgcggggctggtttcccttctcctacacccgggtcttggacagcgatggcagtgacaggctgcacatgagcctgcagcaagggaagagcagcagcacgggcaacctcctggacaaggacgacctggccatcccaccccccgattacggcgccgcctcccgggccttccccgcccagacggccagcggcttcaagcagaggccctacagtgtggccgtgcccgccttctcccagggcctggatgactatggagcgcggtccatgagcaggaatccctttgcccacgtccagctgaagccgacagtgaccaacgacaggtctgcccccctcctcagctgatggccacatctgcagtgctgcccatctggtggcttcccccgcccttcccatgtagcctgttctgtcatcatctgtgcgttcctgtgtagagaacatccaggccccggctgcctggtcttgccccacttgagtctggcctggactggatcccagctgttctaggcagggccgggcagagtggggcgcaggcccctgaagggcgagacccagtggctgggctgcccagggctgaggggccgcctcttgagggtacacgcctctggtcacatggccatggagccttgggtacccctgagttaagggaggacatttggccagctggtggctgggaggggagcctggctgccctgctgcttctcctgcctaataaacaggcttctcctgcaccaggtgtgatctgtccgcccaagggccagaaggccgggagcacggggatgggagcgcccgcaccctggctggaagatgaacttcccgtaagcacgtaattccctgcaggtccggcagctacacctggagtgtggggcctggtccctccccatgcccctcggtggggctctcctgggcccctcactcccactggcaatgtcacaagggcctccccaggcccctcctgcctcgggcaggccccagccctcctccttacccaacctcccatccagaaccttgctgccagggcctcccagctcgctcctgcggccaaaggccagctgtcaggtgctatgcggggtcaccagcagagtgcccgctggcaggtgggggcttccccgcttccggggtctgccccaggactcctgggtggacctcccccccccacctccgctgactcctgcaggcactggggagctctgctggaattgggggttttaaaacttcattagcagatttgtgctcttccatactgtttgtttgtttgttaggtgaaatacagtgtggtgagctgcactggtgacaacagcccttacctggctggggaggtgtctccagcagagctcactcccgcctacagccactcacaccccggggacaggaagctgtagagttggcgggccaggagggcagttgagagctggccagcggagggtgcagggaagcccagctgtgctcaactctcctgcctccgccttccaccctgggcccagggacagacagacattgccctcagaagggcagggaggaggctgtcctggagaggcctgtaggtccattcttcacccgtccctaccaggccaactcggcctgcaggaagggagacctgcagggcgctacccctgcgcccccacacacagtagggccagaacaccatcccctccaccggggtgtgccgaggacagtggggaggagaggagaggggcagcttcctcctggccccaggaagggctggcatcgggttcctggcacagcccctcctgtccaggactttatcatcggcagacctcagaagacaacacacaaaggtttcttttgtcttagcttcatttctcttaaaaaacaaggaacaagaaaacattgcaccagcgttctaagcctcaaacaaaacacaaaacaaatccccctgcgaagcaacaataaactttacatctctttggcaacaat

SEQ ID NO: 316 - DNA, 2792 bp, HOMO SAPIENS
aatttagagaagatgtagggagtgttcaacatgttcgttgtggaagagaaagagctaagagagaggagcttaaagacacaaacgggtagaatcaaggagtgtgctctcaaatgagaggaacaggagtgacattaaccttgaaatgctcggagactctactccttcatgacagtaggaggataattaacaatagatacaaatgcaggaattgatgagtgccatcagaaagctgtatcatgagctgcctgcacttctaaagtgtccagtggatttttaatcacatgagcctggaaatagggttatgaaaagaagctcagagcagagcaccgaaagtggccactaccagcatgaagagcccaacaattcaaactggtgaagtgagaaaaacagaatgcagctttcaaggttcgtttcaagcagttggcttgtgggactctgagagatgctgctgcccatgacatgcgggaattatcatgatcaactacccagcttggatttcatccagtggccaagagctttgtgtgggagacggcaagggttggatttttcaaaagagtaaaccaggataaatcatgaggaacctataacccttttggccacatgcaaaaaagcaagacccgtgaccaaggtgtagactaagaagtggagtcatgcttcacacggccatatcatgctggcagccattcctgggtctggctgtggtgttaatcttcatgggatccaccattggctgccccgctcgctgtgagtgctctgcccagaacaaatctgttagctgtcacagaaggcgattgatcgccatcccagagggcattcccatcgaaaccaaaatcttggacctcagtaaaaacaggctaaaaagcgtcaaccctgaagaattcatatcatatcctctgctggaagagatagacttgagtgacaacatcattgccaatgtggaaccaggagcattcaacaatctctttaacctgcgttccctccgcctaaaaggcaatcgtctaaagctggtccctttgggagtattcacggggctgtccaatctcactaagcttgacattagtgagaataagattgtcattttactagactacatgttccaagatctacataacctgaagtctctagaagtgggggacaatgatttggtttatatatcacacagggcattcagtgggcttcttagcttggagcagctcaccctggagaaatgcaacttaacagcagtaccaacagaagccctctcccacctccgcagcctcatcagcctgcatctgaagcatctcaatatcaacaatatgcctgtgtatgcctttaaaagattgttccacctgaaacacctagagattgactattggcctttactggatatgatgcctgccaatagcctctacggtctcaacctcacatccctttcagtcaccaacaccaatctgtctactgtacccttccttgcctttaaacacctggtatacctgactcaccttaacctctcctacaatcccatcagcactattgaagcaggcatgttctctgacctgatccgccttcaggagcttcatatagtgggggcccagcttcgcaccattgagcctcactccttccaagggctccgcttcctacgcgtgctcaatgtgtctcagaacctgctggaaactttggaagagaatgtcttctcctcccctagggctctggaggtcttgagcattaacaacaaccctctggcctgtgactgccgccttctctggatcttgcagcgacagcccaccctgcagtttggtggccagcaacctatgtgtgctggcccagacaccatccgtgagaggtctttcaaggatttccatagcactgccctttctttttactttacctgcaaaaaacccaaaatccgtgaaaagaagttgcagcatctgctagtagatgaagggcagacagtccagctagaatgcagtgcagatggagacccgcagcctgtgatttcctgggtgacaccccgaaggcgtttcatcaccaccaagtccaatggaagagccaccgtgttgggtgatggcaccttggaaatccgctttgcccaggatcaagacagcgggatgtatgtttgcatcgctagcaatgctgctgggaatgataccttcacagcctccttaactgtgaaaggattcgcttcagatcgttttctttatgcgaacaggacccctatgtacatgaccgactccaatgacaccatttccaatggcaccaatgccaatactttttccctggaccttaaaacaatactggtgtctacagctatgggctgcttcacattcctgggagtggttttattttgttttcttctcctttttgtgtggagccgagggaaaggcaagcacaaaaacagcattgaccttgagtatgtgcccagaaaaaacaatggtgctgttgtggaaggagaggtagctggacccaggaggttcaacatgaaaatgatttgaaggcccacccctcacattactgtctctttgtcaatgtgggtaatcagtaagacagtatggcacagtaaattactagattaagaggcagccatgtgcagctgcccctgtatcaaaagcagggtctatggaagcaggaggacttccaatggagactctccatcgaaaggcaggcaggcaggcatgtgtcagagcccttcacacagtgggatactaagtgtttgcgttgcaaatattggcgttctggggatctcagtaatgaacctgaatatttggctcacactcacggacaattattcagcattttctaccactgcaaaaaac

SEQ ID NO: 317 - DNA, 6668 bp, HOMO SAPIENS
aggctggcgtccccgccccgaaagcactgggcccgccgcgtcgcaccgtcctctttcctttccttctccctccccttttcccttccttcgtcccttccttccttcctttcgccgggcgcgatggagccggggcgccggggggccgcggcgctgctagcgctgctgtgcgtggcctgcgcgctgcgcgccgggcgcgcccaatacgaacgctacagcttccgcagcttcccacgggacgagctgatgccgctcgagtcggcctaccggcacgcgctggacaagtacagcggcgagcactgggccgagagcgtgggctacctggagatcagcctgcggctgcaccgcttgctgcgcgacagcgaggccttctgccaccgcaactgcagcgccgcgccgcagcccgagcccgccgccggcctcgccagctatcccgagctgcgcctcttcgggggcctgctgcgccgcgcgcactgcctcaagcgctgcaagcagggcctgccagccttccgccagtcccagcccagccgcgaggtgctggcggacttccagcgccgcgagccctacaagttcctgcagttcgcttacttcaaggcaaataatctccccaaagccatcgccgctgctcacacctttctactgaagcatcctgatgacgaaatgatgaagaggaacatggcatattataagagcctgcctggtgccgaggactacattaaagacctggaaaccaagtcatatgaaagcctgttcatccgagcagtgcgggcatacaacggtgagaactggagaacatccatcacagacatggagctggcccttcccgacttcttcaaagccttttacgagtgtctcgcagcctgcgagggttccagggagatcaaggacttcaaggatttctacctttccatagcagatcattatgtagaagttctggaatgcaaaatacagtgtgaagagaacctcaccccagttataggaggctatccggttgagaaatttgtggctaccatgtatcattacttgcagtttgcctattataagttgaacgacctgaagaatgcagccccctgtgcagtcagctatctgctctttgatcagaatgacaaggtcatgcagcagaacctggtgtattaccagtaccacagggacacttggggcctctcggatgagcacttccagcccagacctgaagcagttcagttctttaatgtgaccacactccagaaggagctgtatgactttgctaaggaaaatataatggatgatgatgagggagaagttgtggaatatgtggatgacctcttggaactggaggagaccagctagcccacagcaaccaaagagacttcctcttggcgttcaggaaacacagattctttgtccttttcccaacagcccaggctgttgatacctcagagccttctctttactctccaaagtgaaagggaagcccccgtctctctaactgcatgtcatcaggggtgagcctgcctttcctatcttcacacctgccacctcatgttcacacctatctttctcaccttttttttgagatggagtctcgctctcttgcccaggctggagtgcaatggcacgttctcagctcactgcaacctccgcctcttgggttcaagcaattctgctgcatcagcctcccgagtacctgggattacaggcatgtgccaccacgcccggctaattttgtatttttagtagagacggggttttgccatgttggccaggctggtctcgaactcttgacttcagatgatccatctgccttggcctcccacagtgctgggattacaggcgtgagccaccatgcccggcctctttctcacctttacacctgtcttcttatcctcacatctgttttcacaccttcatccctgtcttcctcatgttcacacttgtcttccccatgttcatagctgcctttcttaccattttggtttgaagggcagtcttctctggcttgtttttttgtttttcccagaaaatcagtattattttttaaataagaaaaacattcctagaagatgataattgtgaaaacctcctttggcttatttgcttttccagattttagtctcctttctccccatccgggaaagatggtggaagacataggctaaatttctccagcctcacaatggtcttcacttggtctgacttgtaccaattctagcacccactgaaaaacaagttgagtagagagtgtagagtgcagaaatgtggcttttgccccactttgcatctccaaaattacaacggttggccgatcccatttgaggacaatgcttagttataagtctccgagttggaaaaggaagaaagccagagctgtctagtttcattcattctttcagtaaatatttattgagtacctactgtgtgctaggcattgacctgggaactagagatacttcacagaataacagggaaagttccctgtgctcatggagcttacattctacagggagaaagagatagccaatacataggaataaatatatacaaggtatcatgtagtgataattgctgtggagaaaaataaagcaggggagggagtaagaaatcctggagatgaggctgcagttttaaatggggcctcactgggaatgtgacgttgagcagagacgttagggaagtggatcctggacaaggcattccaggcagaggaacaggatgtgcactgccccaaagtgagaacttgctctacgtggtcaggaaagagcagggagaccaagcagagtcgtgggcaggggtagaatggaaggagaggcggctggggaggacaggtggtggagggccttggcttctgctaagtgagatgggaaccactggagggtttgaacagaggagtgccttgattgatttatattttgcaagggtcattctagctgccatattgtgaaaaactttagtggacaagggcagaaggaagagggaagacctgttaggaagctactgcaaggttccaggcttgggcctgggccacagcaacagcagtggtcaaatatctagatttattttgaaaagagccaataggatttgctgagagtttgaatgtggagtgtaagagaaggaagagttaatgatgacattaaggtttttggcctgaatagcaggaaagatggagttaccagttactgaaatagggaaggatgggctgggtaagtatggaatttggtgcaaagcaggctgtctgtggttggaatgggaggttctggctgcaaatcaaagtggagagttctctcaggtcaggtctgcagcagagctcgagacagggatctgaatgcacttggtttattgttgggggtgctctcagaaggaacctgtgaaagcctttatcagtcatttattggctgtgagaagttctctgggagtgtgggtacatttgaaggcaagtgacttcagttgagggcaagtctctggaaaagaggctgtaggcatctggcagctaccatgcatggtagtgtgttgggggtgggggtcctgggcactggctgtgtgaagggatctggcagggcaccacagcgccccctactgaaccatcagcatgtcagtggcatttaaagccatgcagctggaggggccactgagattgtctctgagtattactgagaagcaacagaaaagagccatggatggagcccttgggctctctgggaaatgggaaatcagccaaaggactgagaaggagttaccttaaggtcagagaaaaccaagagagtgtggtgttctggaagctgagctttctttattcaacctcattcccttctccaaataagccacttgtgtagttgggcccctccagggttgaaggcaagaggagaaaggcacagcgtttgggaaacaagacttttcctgcaatagcctgggaaggaataaaaggatagagtgtttgggtttttgtgtaatggtggttaattggggtggaacactcacacgttgtgctttttctgggcttcccttatcccccagaacactctaccaacctcggggaactcgggcacatccttctgtttctccttcagctctatcctgctttcctcatcccttctgacaccacgtcctcactcacctgcacaagaatccctgcatcaggttctcctttgagggtacccacccaggacagtcccctaccacttctgtcttgggctgaagttgcccacgtccacaaaatctgtactcccagcgggggtgtttggcccgaggagtcagtgttattactggtggatgcaccgtgtccacagcagcccccaatcccagcgatgcgtcagatcttacgtggcttcctgctgggggagatggccttcacccacgggatgccgggttctcctttctttcctcaccccaacctttactccaccagagaaacttccttttgaactcagtggggaagagggtgatgagacaggactagaaagtagtgggggacccagcgagtggacgccctgctccgggattcctgagtctgtaaatagtgtgcccagcagctgtgaactccccttatagcctcaggctgcagtgtccttcccagctgtgtgagaaaatgaaagccgacgtccacagggacccaggcagggttgggtgttgtgactcactccacctctgtgccctgcagaggtactgttgggtccttgtcttgtgagcctggggtgagctctctgtacatgttgttgttccacgtatgggttgacttggcatgctggggggtcctcgttcactctctgaagttggcctcctttcactggggattgaaaagcacctccacccctaccctagtgatgtcccctgaggacccgggtgatagtacagtcaatattgtcagtactttgctttgattgaaggctgtagagctgagttaccaaaatttctatttcaaaggaaaccaaaccttaaaaaaaaaaaacaaaaactgggctgggtcttccaaacctaccatgaaaccctggtgtgcaggctgcactcaatgacctcaacccaacacctccctgagtgtgcttcttggaagagcctagaagattcctggatggagaccccattggttcagcctcaagtctggcccgtcttcgaaaaaacaaacacatttgtaagctttgtgggagcttccaggcctgctctaagatgccttgcttgtcctttgacccatcagcatggagctcagtggttgctgtttggttctgcaggctggtggggaggccgcccatcgtggtggggcatctgtccagccccattgccactcagggcatccaaacaggaggcacccgctgggaagggtctaaagatactccttgtggccactgctactgttcacacttgacttgtggagaagcgaagggctgaggggaggtttgtgtacacccatgtatttaaaagtgactgactgactgaaatgagcacataccgacatatgcaacatactaataccttcctgattttcgagactttctaattactacaactaacctgttgtgctcacctctggaattcagaaagagagccactgcgagcactgaccacaagggctgccttaggaaggaaatgtgtgctttcaggagttcttattaggggaattttaagagcacaaaaattttattgaacccaccttagtgacaaacagaaaatgatttgttagattgtcagttggaaggggtttattatgactgctggtgaaataaacagtgaccagtttctgccaacatttatggaaataacgtttctaggttttaaatgtgagccgtaaactgaagctacttcagttaaaaaaaaaaaaatcaatacttaaactgtagggaaaaggtggattggtgccagagaaaacattatttaatagtgtcagaacatggaactgcaacacagtttgtagcaaggcactgagaaaaacccacaactaatccttcatcgcagctgtctgaactcttgatcatctgccatcccccaaacagtgacttctttttttctggtgactccaggcctgaatgacctagtgtggagagtttaaactatgtacaagggaggaaagaaaaaaaggaaaggaaccttaagtaagcctcagccaaaggttttatgcattggacttcctgtgcctgcccccaggggcaagactgatccccatgcctgtgcccatgacatctccctgaaagaggacaccatgacagcccggctttgccttgactgacccactgctaccccagaaataagaatcaagagcagctattgttatccttagagtgttttccgtctagggccggctcgtgaacagccacatatccttgcacctgacactgtccccacacaaatagctggctttcgttgcttgttgaatgaatgagtgagttggctctatatccccttggagctggccggtaagatattagtgcctcattttacaagaagagaataggaaggaattaagcaatttggccaacagatacaagatagattccagagttttatctcccactttagggtggcagccagtaggccaaactccaaagaccgttgctgatgtctttttctgcctcccctctttgggttagtgtggtatgtacaagctcactcttgttgaaaattagaaaatagttgaaaacaaaaggtttttgtttttctttttaaatcacattaaatgttttacattgcttaaaaaaaaaaaaaaaaaa

SEQ ID NO: 318 - DNA, 569 bp, HOMO SAPIENS
  misc_feature (162)..(162): n is a, c, g, or t
  misc_feature (173)..(173): n is a, c, g, or t
  misc_feature (271)..(271): n is a, c, g, or t
  misc_feature (280)..(280): n is a, c, g, or t
  misc_feature (361)..(361): n is a, c, g, or t
  misc_feature (374)..(374): n is a, c, g, or t
  misc_feature (381)..(381): n is a, c, g, or t
  misc_feature (387)..(387): n is a, c, g, or t
  misc_feature (393)..(393): n is a, c, g, or t
  misc_feature (421)..(421): n is a, c, g, or t
  misc_feature (433)..(433): n is a, c, g, or t
acgtcttatgcatttatttagtatagtgaaagccttatatacacatttaatataattagtctctggatatttggattattttttagtagtacttttttagagtgtgggttttttcttttcttttctgtttttgagacagtgtctggttctgtcacccaggcnggagttcggtngcccagtcttggctcactacaacctcagactcccgggctcaagccatccttccacctcaccctcctgagtagctgggactacaggcacttgccaccgngtctggctnattttaaaatattttttgtagagacaaggtttcatgtttcccaggctggtcttgaactcctaagctcaagtgatccacccnctccccaaagtgntgggatngtaggncagganccaccacacctggcagttttttccttcnttgttttgaganggggccttgctccatcacccgagctggagtgtaggtagcatgatcatagctcgctgcaaccttgaaatcctgggctcaagcgatccccctgcctcagccttccaagtagtggggactattggtccatgccaccatg

SEQ ID NO: 319 - DNA, 728 bp, HOMO SAPIENS
gcggcctcagatgaatgcggctgttaagacctgcaataatccagaatggctactctgatctatgttgataaggaaaatggagaaccaggcacccgtgtggttgctaaggatgggctgaagctggggtctggaccttcaatcaaagccttagatgggagatctcaagtttcaacaccacgttttggcaaaacgttcgatgccccaccagccttacctaaagctactagaaaggctttgggaactgtcaacagagctacagaaaagtctgtaaagaccaagggacccctcaaacaaaaacagccaagcttttctgccaaaaagatgactgagaagactgttaaagcaaaaagctctgttcctgcctcagatgatgcctatccagaaatagaaaaattctttcccttcaatcctctagactttgagagttttgacctgcctgaagagcaccagattgcgcacctccccttgagtggagtgcctctcatgatccttgacgaggagagagagcttgaaaagctgtttcagctgggccccccttcacctgtgaagatgccctctccaccatgggaatccaatctgttgcagtctccttcaagcattctgtcgaccctggatgttgaattgccacctgtttgctgtgacatagatatttaaatttcttagtgcttcagagtttgtgtgtatttgtattaataaagcattcttcaacagaaaaaaaaaaaaaaaaa

SEQ ID NO: 320 - DNA, 11760 bp, HOMO SAPIENS
tggccaatggccgcgcgctctgcccgccccgcctcctcgctgcgggaagggtcctgggccccgggcggcggtcgccaggtctcagggccgggggtacccgagtctcgtttcctctcagtccatccacccttcatggggccagagccctctctccagaatctgagcagcaatgccgtttgctgaagacaagacctataagtatatctgccgcaatttcagcaatttttgcaatgtggatgttgtagagattctgccttacctgccctgcctcacagcaagagaccaggatcgactgcgggccacctgcacactctcagggaaccgggacaccctctggcatctcttcaatacccttcagcggcggcccggctgggtggagtacttcattgcggcactgaggggctgtgagctagttgatctcgcggacgaagtggcctctgtctaccagagctaccagcctcggacctcggaccgtcccccagacccactggagccaccgtcacttcctgctgagaggccagggccccccacacctgctgcggcccacagcatcccctacaacagctgcagagagaaggagccaagttaccccatgcctgtccaggagacccaggcgccagagtccccaggagagaattcagagcaagccctgcagacgctcagccccagagccatcccaaggaatccagatggtggccccctggagtcctcctctgacctggcagccctcagccctctgacctccagcgggcatcaggagcaggacacagaactgggcagtacccacacagcaggtgcgacctccagcctcacaccatcccgtgggcctgtgtctccatctgtctccttccagcccctggcccgttccacccccagggcaagccgcttgcctggacccacagggtcagttgtatctactggcacctccttctcctcctcatcccctggcttggcctctgcaggggctgcagagggtaaacagggtgcagagagtgaccaggccgagcctatcatctgctccagtggggcagaggcacctgccaactctctgccctccaaagtgcctaccaccttgatgcctgtgaacacagtggccctgaaagtgcctgccaacccagcatctgtcagcacagtgccctccaagttgccaactagctcaaagccccctggtgcagtgccttctaatgcgctcaccaatccagcaccatccaaattgcccatcaactcaacccgtgctggcatggtgccatccaaagtgcctactagcatggtgctcaccaaggtgtctgccagcacagtccccactgacgggagcagcagaaatgaggagaccccagcagctccaacacccgccggcgccactggaggcagctcagcctggctagacagcagctctgagaataggggccttgggtcggagctgagtaagcctggcgtgctggcatcccaggtagacagcccgttctcgggctgcttcgaggatcttgccatcagtgccagcacctccttgggcatggggccctgccatggcccagaggagaatgagtataagtccgagggcacctttgggatccacgtggctgagaaccccagcatccagctcctggagggcaaccctgggccacctgcggacccggatggcggccccaggccacaagccgaccggaagttccaggagagggaggtgccatgccacaggccctcacctggggctctgtggctccaggtggctgtgacaggggtgctggtagtcacactcctggtggtgctgtaccggcggcgtctgcactagtgaagccctgggctcttcccaccacccatctgttccgttcctgcagtacacctggcccctctccgaagccccttgtccctttcttggggattgtggaggctgggtcagaggggagttaagggactgcaggcctggcagcaggacatgccttggctgaaccaagtcctgagagcagcatctctgtccccacggtgccttgtgtgggtccccgtccttggctttctgggtcctgggctgcccccagtgctccagaccttccccactggcaatccaggttatcatccatgtcctccagaggagcttcctcctccaggcctcagccctgttggcccaggtggagcaggagggaccactggaacatgtggtgcttgggaatgcctctcctgttgcattggtccctgaaggcctcagggcaggtatgtggtgtgtgggcgactccacaagacctgcctcccatcctggcagcccagcctgagaccgttgcattgaggcaggcaggagcggcagggtggctgctctccaggagcccaactgccttgagttcctgccccactgggccccctcccctgctgggcaatcctgggaaggtctggaggttcctgtggacctcagggaagccaggggcagctgtcaggcctgaggaagacctgtggagctcctctccagcctcctctttccctcccctctggtctccattctcttcagctccctacatgggctggggaggagacacctggtgggcagagctcaggcagaggtttggatttcagctccctcacttccggggctgtgtggctttggcagatgtcagacttctggtcttgcttctccacgtggacagtgagtatctggctcattcttcactgggttcttctgagattgaacctacaggtgtttgccaagtgcctggcccagagcaagtggccactgcttctcccatctctctcctgcccaacctggtagagctgagggcatgagaggcagagtgcacagtggtcaagggtgcagctctgcagcacaggcagcctaggcctgcgtcccaacctgcctctcaccagctctgtgaccttgggcaagggatttatctgtctgtcccttagttttctcacctgtaaaaggaggataagtatatatatatatttcccagtgttgtgaagattaaaggagtttatcgatgtaggtcttaggatgagtcctggcatttaccaagggttggatatatgttattatcactattaagtgttgagggtccaggcatgctgggcaacagggaccccatctctacaaaaaagtttaaaaaattagccaggcgtggtggtgcacctgtcgtcttagctacttgggaggctgaggtgggaggatcacttgagcccagaagcttgaagctgcagtgagctaggatcgtgccactgcactccaacctgggtgagagagcgagaccctgtctcaagaaaaagaaaaatgcagagaaacaggagtcttggctactcctttagaggcagactcagaccctcctgcctcacagctttatctttgtatttgccccttactttatcttgtgccttgagaaattgctggggagagaggtatgtccactgggcagctgtacaggatggaggatatagggcgtttccactcccagcagccaggttccctcaccccaagctcacccactgttggggagattatctacaataacaccagaaacacattggggtggattgggggtatccttatgggttcttttcagggaaccattgctggacaaggcacaggagccacctccatttctgagctctgcaagggacaagaactagagccatcaggggctgggctcactgtggccccaccccaagccgtcagcctccagggatctacaccctgccttggctgctacagctttttcactccactgccctaggggagttcagcaacctaatgatctctatctctgaacatctcttcatcccatgctccaagtccagcaacctgcaccctggaaccaggagtggaccctacccgagctgtctgtattaatccccatcccccaccaccaatcttaaaaagccctctgtccccctaccctaaaccccagttaggtacccatgctgggcaggtcagttaacaatttatgcacaggtactagttttattgtattaccgttccagggtagctttgaaaaaagtatctcaaaaaggcaacatgggccgagcgcagtggctcacgcctgtaatcccagcactttgggaggccaaggtgggcagatcgcctgaggtctggagttcaagaccagcctggccaacagggtgaaaccccgtctctacaaaaataagaaaattagccaggtgtagtggcagacgtctgtaatcccagctattcaggaggctgaggcacgagaattccatgaacccaggatgcggaggttgcagtgagccgagattgtgccactgcgctccagcctgggcgacagagtggtattctgtttcaaaaaaaaaaaaaaaggcagtatgtagccccgaagactgttgcccaagtggtagaatgttagcacactaccagcctaggtaaaaaatacaaaaagtaactgggcatggcggcgcccatctatagtcccagctacatgggaggctgaggtgggaagataagtcacttgagcccgccaggaggcggaggttgtagtgagctgagatcgcaccactgcactccagcctgggtgaccgagtgatactctgtctcaaagaaaaaaaattataattttagcacagtaaccagccatgatgggagataccctgggtaaggcatgtagaaagggttgagggaccttcccagtcccctagccccgcctcccatcctcccatctttttcttttttcttttttttagagaatcacccagcctggagcgaagtggtgcaatcataactcactgtatccttaaactcccgggcttaagcgatcctcctgcctcagccttctgagtaactaggacttcaggtacctgtcaccatgcctggctaattaaatttttttttcttttttttttttgagatggagtcttgctctgtcacccaggctggagtgcagtggcgcgatctcagctcactgcgacctccacctcctgggttcaggccattctcccgcctcagcctccagagtagctgggactacaggcgcctgccaccacgcctggctaatttttttgcacttttagtagagacggggtttcactgtgttagccaggatggtctcgatctcctgaccttgtgatccgcccgcctcggcctcccaaagtgctgggattacaggcgtgagccaccgcgcccagccaaattaaattttttatagagatgaggtcatgctgttatgttgcccaggttggcctcatgagatcttgccttagcctcccaaagtgctgggattacagatgtgagacactgcacccaaaccccaccacttttttttttcctttttctttttttgagacagtcttactccgttgcccaggctggagtgtagtggcatgatctcagctcactgcaacctccgcctcccgggttcaagcaattctcctgcctcagcctcccgagtagctgggattacagaggcctgccaccacacccgactaattttcgtatttttagtagagacggggtttctccatgttggccaggctgttcttgaactcctgacctcaagtgctccacctgcgttggcttcccaaagtgctgggatacaggagtgagccactgcgcctggctgatcccagcacttttcaaatgatgccgctcaaagccgtgacttggcctactttgaacagcaaacttgttgctgctgttgtcaacctgaaggcctctcaaatgccagcttcaagcagggtgtgaattggccagtgtcagatctcaggagtcctgtgttgagagtgtggctttcagctgcggggagctgcacttggtggggaaagccaggcaggtcaccctcacagccagataatgtggaggtcagaacccaaggaagggagtgagacctccactcccagtgggggacctggccacccatccttggggacctgagaaagcgtacttcaccttggggtgaaggctgggtggggccagagggaccagtgccctcctcagtgcttaggggcagagccacctgcagcaatggtatctgcatattagcccctctccaccttctttctcccgctgaatcatttccctcaaagcccaagagctgtcactgcttctttctccctgggaagaatgcgtggactctgcctggtgatagactgaagccagaacagtgccacaccctcgccttaattccttgctaggtgttctcagatttatgagacttcttagtcaaatatgagggaggttggatgtggtggcttgtgcctgtaatcccagcattttgggaagccgaggtgggaggatcccttgaagccaggagtttgagacaagcctgggcaacaaagcaagaccctatctctaaaaaaaaaaaaaaaaaaaaaaaaaaaaaaaaaaaaaaaaaatctaggagatgctctttaccctgcctggcctcaaactattaatagcttcctttgagcaacattatttattatgaactttcaaacacaaaaaagtagagagagtagaataacaaatccccatgagcccatcacccaacttcagtaattatcaattcatggccatcttgttcacccctgcctgcttccctgcttcccctcattctgcagaggttcttttcttttgagacagagtgttgctctgttgcccaggctggagtgcagtggtgcaacttcggctcactgcaacctccgcctcccaggttcaagtgattctcctgcttcagcctctcaagtagctgggattacagatgcccgccaccacacctggctaattttcgtatttttgttagagatggggtttcaccatgttggccaggctggtctcgaactcctgacctcaagtgatccgcccgccttggcctcccaaaatgctgggattacaggtgtgaaccacggtgcctggccactgtacaggttatttatagaagttggagagtgaagggttgagaaagccaaggggcagatgcgggtctggaggattttgtgcctaaggccctctctttgctcccagacagcatgaagtaacaatgaggcatccacctcttggttttgtggcctctgtggatgacgtctctcaccttgaaccagttcagagttggagtagcgcaggatcctgtcttcagaggaggggccgaagcgggttcctctgttgtcaagctctttggaggtgcctggctgctactactgtcccagagaggtgatgatgaatgatgggtgtgtccagtggcagtttgccccactgaggcaggggcttccactaggccctgacagagcccttccagcaggcagaaatccctgtgctaggcaagattcaaactccgtagcatgtctcctgctcccatctcttaggaatggagtccttcaggccttgagtcccacattttccatgatgctccattaagcagctgatagcacccccacctccagggaaagtgagttcagagtccttggtctaatgcatctgtgttgaaattgaggccttcccctgtgttcacctttctgctctttttcttttagcccaaggctatgaaggcctcattcggtgctgggcatggtcactcctagcattcctcactctgttgctaacagcaacagcaataataataagggttacaacttactccataccttactgtctgccaggcattaagctaagtgctttacatatattaagtcatttaatcctcataatgaccctatgaaagagataccatctcaacccaattgacagctggtttgcaagattaggagggatgaaggacccaggggacaatgcgagggaaaactctgaccccggggccccaggctggatgttctttatgcctgtgaaccacagcttatcacatgtctggagttagggaccccacttaaagtgagattttggctggaggtggtggatcatacctataatcccagcactttgggagaccaaggcagaaggactgcttgaggccaggagttcaaaaccagtgtaggtaacagctagaccctatctctacaaaaaatttaaaaattagctgggtgtggtggtatgtgcctcaagttccagctactcaggaggctgaggtgggaggatcacttgagcacaggagtttgaagttacagtgagctatgatggcaccactgcacttcagcctaggcaacagagggagaccctgtctttaaagtacatagaggtttttcacaccaacacatctctgcccagtgtgccaacatctgccacctgctataatagtactataacactcaatatgtaattaatgtagtctcagggatgttatgacaatatgattacaactatcacgtgtgtgcccagccaggctcaatgccccaggctgggcgaggtggggcaggggacacagcctaaaatgccaggcctcaggaagccatttggtttagcagacattgtttattaaaggagttacctatgccagatcgaaggcctaagatgattaagacactatgagtgccttcaagtggttggggacgttcatgattgtggtacagacaaataggctttcacatcattcttttatgtaatcatacaacagatatttgcacctacatgtgcagagcactgtgataggcctcagtgacacagaataatacggcaaagaccccacccgatgagccccctcccaccacccaccagtacagtagggggtggtttaatggagtgttcctggaatatgaagtgggggcaggcattaggggtggcaaagggacaagtgtttatctgatcagttatgtactgtttataataagtaaatcagcagagggggaataatacttagaacctatagagagtaaatctgacaagatgaaatgctgatgaaaatatggaggaaatgaaactctcatgggttttgcagggaatctaagtcagtgctgtgttgtgaatgtaggtgtaccctttgaattcatatgttgaatcctaacccccaaagcaatggcattaagaggtggggcctttggggctgggtatggtggctcatgactgtaatcccagcactttgggatgctggcagggggcagatcacttgaagccaggagtctgagatcagcctggccaacatggtgaaaccccatctgtactaaaaatacaaaaattagccaggtgtgatggcgtacatctgtaatttcagccactcgggaggctgagacaggagaatagcttgaacccagtaggtggagatttcagtgagccgagatcgtgccactgcactccagcctgggtgacagagcgagactccatctcaaaaaaataataaagatgtggggcctgtgggaggtggttaggtcatgagggtggagatcatgaatggggttagcaccttataaaacaggcttgagggagcccttctgtcccttctaccatgtgtggatgcagtgagaaggcaccgtatctctgaagcagagagcccgccctggacactggatctgctggcaccttgatcttggacttcccagcctctagaactgtgagaaataattttttgttgtttacaaattacccaggctaaggtgtttcattgtaacctgaatggaccaagctggtgtgaccctgttggaaaactggcagtatctaccaaaagccgaacatacgtataaactgatccagcagttccactcctgggtatgtacaccacagaaagctatgtccaccgagacattggcaagaatgtttctaaccacacgctgactgtagccccaaacctgaaacaacccaaatgtccatccaccaacccaaatgtccatccacagttgaagctacagtgaagtcacagggtcgaatactactgcacagcaacgaatatgaatgaaaatatcgctatgcacagcaacatggataaatttcacagacatgaggtcaagcaaaagaggtcagagtcctcatcatcaagagagaattcattgtatgattctcttcctacaaaaagtacagaaataagcaaaactgatccatggtgttagaagccaggggaacagttaacaggggagggatactggggaggggcatcctggagtgctggtctacctcatctgggtgttgatttcacgagtattgtcagtttgtttccagactccctgttggagatgtggaaataaaaaccacctaaacaagagcagagaggccatttggtcaaagtttgcaaaggagtcagccatgattgcttgtatttggcaggggtcaaaggcaggcagggactgtgaaatgttatagtggaaaaaaagggaaggctctgggtgtgctgtgattggagattgttggcatggggacagagcggactaactggaggggcatctttggttggttgggggggtatatttggctttctctggttggtctggagttggaagagggggtgtggtggctggggattgggaagaagctggcagccactaagttcagactgttctgggtccgattgctgctgaggctgtggtttggcttccttggcttcccaggctggtcatgggtttctggccagagtctattgtcatatgtggcctggccattgtccagttgtatgttcagtctcttggaaggaagggtattgactctgagaggggccaccatcgctggaatgggggacacacagtacttcctccagctgcctacacccccctagggtcagtggcgcctgcctgtgagggtgagcccaatggctagagggctctgctccaagtcattgcttactacacccacaaacattcttcgttctttaaggcctaacttaaagcccagatcctacaggaaaccttgattagacccctctctttattaagcttcctaagatcaaaccctgcttttgtgtaaatgctgacctccttgcctacattttaaaaacctagagctgggcatgatggccccagcctgtaatcccagtgattcaggagactgaggtgggaggattgctagaagccaggagttcgagaccagcctgggtaacatagctagaccacatctcttaaaataaaatagttaatttagccaggcatgatgatatatgcctgtagtcccaactacttggaaggctgaggtgtgaggatctttgagcccgggaggtcgaggctacagtaagctatgatctcaccactgtactccagcctgggtgacagagcgagacccagactcaaaaaataaaaataaaaaccctgaatatcttccttctacttcttcagtgctgtttttatttaaaaaaaaaaaaaaccagccaaaaccacaactttttactgaagtgtaatgtaaatgctgtaaaaggcagtgaaaggcacaagggaggtggaggggtaggaagggtggaagtggcgggaggaagtggcagggcaggcaaaatgaagggaagccctgggttcttgtcctgcatccgcagccagctcccactttcctcaccctccaggacctgtaaactgtgaggctggaccagttatgtcaaatctgtcctcccccagagctcagtccctctgcccttgggtgtccttggcacaaggcaggctaggctgcaccagcttcctccatctccgtcctgcctcccccatccccaggtgccattcccacaccatctgaatcactgatttcctcgcaatcagacgctatcttccagttaatcacttcgcttgtatttaacataagaaagaaaaaccctttcattatcacatacagctggaaatcggcttcttgcaggaggcgtatccaaaggaattggagaagagataaactggtaattggtgaaagaattactttaattttttttcctacttgctgtcatgatgatgtccttagaattgtgagcccgtggacacttctgtacaataaatctgctattattacttcta

SEQ ID NO: 321 - DNA, 2676 bp, HOMO SAPIENS
agagccagcggacggaaccattccaaacagcctagtctcgtgctgagagcctctccggtttcacgctgagacccgctcacccccgctctggccccttagatgctattttggcccgagtgtcacgtcgggcgctctttagagaggactgggacaagagttgcggacgcgaagaacgagtaagcggtggttcatccctcctgaccccacccccgtggcctggcccgatggtcgcgcccggggttgcgagatttgcgcctgcgcagtgcggcgcctagagggaaagcgagagggagacggacgttgagagaacgaggaggaaggagagaaaatggcgtccacggattacagtacctatagccaagctgcagcgcagcagggctacagtgcttacaccgcccagcccactcaaggatatgcacagaccacccaggcatatgggcaacaaagctatggaacctatggacagcccactgatgtcagctatacccaggctcagaccactgcaacctatgggcagaccgcctatgcaacttcttatggacagcctcccactggttatactactccaactgccccccaggcatacagccagcctgtccaggggtatggcactggtgcttatgataccaccactgctacagtcaccaccacccaggcctcctatgcagctcagtctgcatatggcactcagcctgcttatccagcctatgggcagcagccagcagccactgcacctacaagaccgcaggatggaaacaagcccactgagactagtcaacctcaatctagcacagggggttacaaccagcccagcctaggatatggacagagtaactacagttatccccaggtacctgggagctaccccatgcagccagtcactgcacctccatcctaccctcctaccagctattcctctacacagccgactagttatgatcagagcagttactctcagcagaacacctatgggcaaccgagcagctatggacagcagagtagctatggtcaacaaagcagctatgggcagcagcctcccactagttacccaccccaaactggatcctacagccaagctccaagtcaatatagccaacagagcagcagctacgggcagcagagttcattccgacaggaccaccccagtagcatgggtgtttatgggcaggagtctggaggattttccggaccaggagagaaccggagcatgagtggccctgataaccggggcaggggaagagggggatttgatcgtggaggcatgagcagaggtgggcggggaggaggacgcggtggaatgggcgctggagagcgaggtggcttcaataagcctggtggacccatggatgaaggaccagatcttgatctaggcccacctgtagatccagatgaagactctgacaacagtgcaatttatgtacaaggattaaatgacagtgtgactctagatgatctggcagacttctttaagcagtgtggggttgttaagatgaacaagagaactgggcaacccatgatccacatctacctggacaaggaaacaggaaagcccaaaggcgatgccacagtgtcctatgaagacccacccactgccaaggctgccgtggaatggtttgatgggaaagattttcaagggagcaaacttaaagtctcccttgctcggaagaagcctccaatgaacagtatgcggggtggtctgccaccccgtgagggcagaggcatgccaccaccactccgtggaggtccaggaggcccaggaggtcctgggggacccatgggtcgcatgggaggccgtggaggagatagaggaggcttccctccaagaggaccccggggttcccgagggaacccctctggaggaggaaacgtccagcaccgagctggagactggcagtgtcccaatccgggttgtggaaaccagaacttcgcctggagaacagagtgcaaccagtgtaaggccccaaagcctgaaggcttcctcccgccaccctttccgcccccgggtggtgatcgtggcagaggtggccctggtggcatgcggggaggaagaggtggcctcatggatcgtggtggtcccggtggaatgttcagaggtggccgtggtggagacagaggtggcttccgtggtggccggggcatggaccgaggtggctttggtggaggaagacgaggtggccctggggggccccctggacctttgatggaacagatgggaggaagaagaggaggacgtggaggacctggaaaaatggataaaggcgagcaccgtcaggagcgcagagatcggccctactagatgcagagaccccgcagagctgcattgactaccagatttattttttaaaccagaaaatgttttaaatttataattccatatttataatgttggccacaacattatgattattccttgtctgtactttagtatttttcaccatttgtgaagaaacattaaaacaagttaaatggtagtgtgcggagtttttttttcttccttcttttaaaaatggttgtttaagactttaacaatgggaaccccttgtgagcatgctcagtatcattgtggagaaccaagagggcctcttaactgtaacaatgttcatggttgtgatgttttttttttttttttaaataaaattccaaatgtttataaagagtcaaaaaaaaaaaaaaaaa

SEQ ID NO: 322 - DNA, 1386 bp, HOMO SAPIENS
ggaacccgcggcgcagggggcggagtgctcgcgcggcgctgcgtccgggagacgtttttccaggggcattgttatttgtgaccacaatgaaaaatgtagacagtgatgatctggtaactggcacacttcccaagctcaagagctcaaaagaatggttggagcccaagcccctttgttttatggaggttttagctaaagaagatactgaggcagctattcaatcaatattatacaaagaaaattctgtaattaaggaactagataagtatttacaacatcatgccttcttaaatgcaagaagaaaggagatgttatataaaagatgggttgactgtgtggcagatcctcttcagaagaaaattatagaaaaagtttgctcacataagaagattaaaaaaaggaggcaaggggaattagatggctttttaaaacatgtaaataaaaagggaaatgcatttatagaacattatgatccaaaagagtatgatcccttttatatgagcaagaaggaccccaattttctgaaggttaccatcccaccatttcatgaccctttgaaaaaagcacaatatgacaaggataacgaaaaaagaactcttcttcagtgtgagactggcaaaatatattcaataaaggaattcaaagaagttgagaaggttcagctgcattccagattcccacaaatttctaattcaaggcactttataactccaaacgagtggctgaaactgcctacaagatacatagaaagtgaattttgtagaaggagaaggttaaaggtgaaagtgaattttaatgactgtagttttgatttgaaacctttggcaagagctccttatcttttggaatcccaggaagaagaaaaaacagttatttacaaaaacaaagggtcatcctttctagaaagagaaccgctgtgctatcaggagggaaataatccaagtgccaaagaggccatctctgaagggtatttttcttccttgagcctcagccaggaacgggaggaagaccaggatgggtctccctccccgcgtttggggctgctgaagctggagctataagaaagaagagggaggtttcagcaaccaaggagcacacaccctgatccttgattggtgaaaggatacacaaaatcaggctgcttcagaggaagtcatctgctcacaggaatcagggtgaaggccaaggacggcactcaagaattgtcctgtctctaaaaaaaaagcatctgcaacgaacttcctttaatttttgagttcagtgtctgtgataattaagaaatggcaataccatgtattttccccagaagttaagaaatattgctgaacgaaccaataaaaataattacagctccctcaaaaaaaaaaaaaaaaaaaaaaaaaaaaa

SEQ ID NO: 323 - DNA, 2498 bp, HOMO SAPIENS
gtgcgcgtccacagctctcactcaccctccggcttcctgtcggggctttctcagccccaccccacgtttggacatttggagcatttccttccctgacagccggacctgggactgggctggggccctggcggatggagacatgctgcccctgctgctgctgcccctgctgtggggggggtccctgcaggagaagccagtgtacgagctgcaagtgcagaagtcggtgacggtgcaggagggcctgtgcgtccttgtgccctgctccttctcttacccctggagatcctggtattcctctcccccactctacgtctactggttccgggacggggagatcccatactacgctgaggttgtggccacaaacaacccagacagaagagtgaagccagagacccagggccgattccgcctccttggggatgtccagaagaagaactgctccctgagcatcggagatgccagaatggaggacacgggaagctatttcttccgcgtggagagaggaagggatgtaaaatatagctaccaacagaataagctgaacttggaggtgacagccctgatagagaaacccgacatccactttctggagcctctggagtccggccgccccacaaggctgagctgcagccttccaggatcctgtgaagcgggaccacctctcacattctcctggacggggaatgccctcagccccctggaccccgagaccacccgctcctcggagctcaccctcacccccaggcccgaggaccatggcaccaacctcacctgtcagatgaaacgccaaggagctcaggtgaccacggagagaactgtccagctcaatgtctcctatgctccacagaccatcaccatcttcaggaacggcatagccctagagatcctgcaaaacacctcataccttccggtcctggagggccaggctctgcggctgctctgtgatgctcccagcaacccccctgcacacctgagctggttccagggctcccctgccctgaacgccacccccatctccaataccgggatcttggagcttcgtcgagtaaggtctgcagaagaaggaggcttcacctgccgcgctcagcacccgctgggcttcctgcaaatttttctgaatctctcagtttactccctcccacagttgctgggcccctcctgctcctgggaggctgagggtctgcactgcagatgctcctttcgagcccggccggccccctccctgtgctggcggcttgaggagaagccgctggaggggaacagcagccagggctcattcaaggtcaactccagctcagctgggccctgggccaacagctccctgatcctccacggggggctcagctccgacctcaaagtcagctgcaaggcctggaacatctatgggtcccagagcggctctgtcctgctgctgcaagggagatcgaacctcgggacaggagtggttcctgcagcccttggtggtgctggtgtcatggccctgctctgtatctgtctgtgcctcatcttctttttaatagtgaaagcccgcaggaagcaagcagctgggagaccagagaaaatggatgatgaagaccccattatgggtaccatcacctcgggttccaggaagaagccctggccagacagccccggagatcaagcatctcctcctggggatgcccctcccttggaagaacaaaaggagctccattatgcctcccttagtttttctgagatgaagtcgagggagcctaaggaccaggaggccccaagcaccacggagtactcggagatcaagacaagcaagtgaggatttgcccagagttcagtcctggctggaggagccacagcctgtctgggggaaaggacaagtcagggaccacttgctgaagcacgaagagcccttgtggcaatgttaacattaactgatgtttaagtgctccaagcagatggaattagagaggtgggctcaaatctaggccctggcactgtcatcaagcaattcactgcatccctctgtgcctcagtttcccattctgtaaatcagagatcatgcatgctacctcaaaggttgttgtgaacattaaagaaatcaacacatggaaatcaaccaacatgggtcctggaacagggcgttgtgctcagtgctttctggtctctcttccttgaatagaaaggtcctgctggcaagttctctcaaggctggggatgaccaggcacaaaaaacagggcagcaatatgttggtgtcactccccttcccaaaactcttcgaagactccctaggaaagaccagcccctcagcctggcacttggttcatgatgtgggatcttatatccttgccagagtcatatctttgcccacttttacctgcaatccttgcatcatattcctttggctccagtccttcatttatgagacccataggaatccttccaacagccaaagagttgagtctaactctttcctgcccaaacccattcacggccccctggccttagacaatatatcaca

SEQ ID NO: 324 - DNA, 2849 bp, HOMO SAPIENS; identical to SEQ ID NO: 250

SEQ ID NO: 325 - DNA, 2975 bp, HOMO SAPIENS
gaagacacttccggttgcgacggaggtaggcttacgaggcctgtgtcgggtagaaagggtccttcctggaccgggaccctctgccacgaccatggaccgtaggaaaaagcctttggacgtcacggcctcctcgttggtagatcttaaggctgaactcttccgaaagcaagaagaattcaaacaagaaaaacttctaaaagattctggagtttttggaaaaccaaaaacaactaacaagaaaccaagtatctggagcaaacagaatgtaggcgtttcaaatcgagctgagaaggatgctgaacagaagattgaagaacagaagactttagacaaagcaagggaaaaattggaagaaaaagccaaattatatgaaaaaatgactaaaggagactttatagatgaagaagtagaggatatgtaccttgtggatttcacacagaagatcatagacaagcgcaaagaaatggaggcatctggtgcccatagagattctcaaaaggcaggagaaagggacgacgatgaggaaaaccttcctgagggagagatccctcctccccaagaccccagtgaagaatgggtggattacgtggactctttggggcgttcccggcgctgtatgagaaaggatttgccagatctgctggagatggataaaaatcttcaggggagactttttattagtcctgctaatgaaaaaaccctattatctgaagatatgagaaaagaacttcagcgccagcaatgggaggaagaagaaagagaggccctgaagaggcccatggggcccgtacattatgaagacattcgggaaaatgaggcccggcaacttggtgttgggtattttgcctttgcccgagacaaagagttgagaaacaagcagatgaaaaccttagagatgctgcgtgaacagacaacagatcagagaacaaaacgagaaaacataaaggaaaagcgaaaggctatcttagaggcaagacttgccaaacttcgacaaaaaaagatgaaaaaatcaaaagaaggtggaacagaagaagaaaatagagatggagatgttattgggcctttgccaccggagccagaggctgtgccaaccccacgtcctgctgcccagagtagcaaagtagaagtcattgtccaggagaggaaggacaccaagcctggagtgccacacatccgggagtgggaccgcggaaaagaattttcctttggatactggtcgaagaggcagtcagatctccgggctgagagagatcctgagtttgccccgccgtcagattactttgtgggtcagaagagaactggtttttccagcagccaggcatggagcagacctgggccagcacagagtgacccagggcagtgccctgaccagagccacggacctagccctgaacatacgtcacccactcctgcccccgacaacccaccacaagcccccacagttactttcaaaactctggatgacatgatttcctattacaaacaagtgacatgatctttcaaagcacgctgacttgggtttgtactttgacagtgcctttctctcccagagggagaaataactttaggaactgaattgtacctttgtcctgtcctttccctaggaggcacagacttcgggttggatttgtcagcaaggaggaaagttatggaaactttggccacttggctgttcattttattctaagtgggatagggacatacctacctggatttacatgtgagctgcgatagaatagaagtatttattctgtaaaattagacactgagatgtgcttataaccctgtttcatatctactcccacgacttactcatatttaagggttcttttccattccttttgcaaatccgagcatgcaggtgtctttattccaagggttcagcttccagatcagccgatggaccataggtcacgaggaatttctccctgtcaagcagtggaaaactgcatgggaggcaaaatgctctgttctccaagaggacccggaagtaatcacataggaaatgataaggaagaccaggaggagctcttcgtagtccagaaaggtagaagtgggagttgtttacttaattttactgtcataccatgctattacctacactcctgtgtgcagtgggcattcagtaaatgtgtgttgaaggactgggacgtacgtggaggctgctggacctggtcagagactgatgtgccttagcggcaatggttagagcttttcagtgcatcccacctccctgtcgcccccatgctcggcttcctcacattcaggagcctgacttggatcagacttggggctgcacagtggagcaggtgggttcccgtgtcattagtaataaggagagggttgggggtgggcagggctccagaaagtcagcagtgtgcctgggcacccaccccatcctctacctgccacacctcagagggttcctacagctgcacacaagcagttgagagttgatgaccaggcccatagggctcccacagctggttcccaggccagtgagtgctgtgagaatacagtagcacaagtccttgttctctgaagagtgggaaggagaggagtgagtgaagtagcctgtcccctgcaggtcctctgcgatggcattgtctcggttcccgcagtgctgcagtgtggaagggagtgccccatcctcattacagatgacacactggagtgtggaggggtcgatgacttgtgcagggtcatatggtacctaaggggcagatctcagacttaaacacaattgatgtctaacccctagacagtctttttagtgccctctgctctcagtcttgttgccctagtatcaagcaatcttagacaaacatcctgaattcttacaaacttacctctaaactctgaggataaagttgccagtccttttaatggtcagcctaatcattctgtcagcctaatcgggtaattgctttttttaataaatacacataaaaaccaactaaaaaaaaaaaaaaaaa

SEQ ID NO: 326 - DNA, 3234 bp, HOMO SAPIENS
cccagaactccctgtaggaattgccaaggggagaaggaaggaagggtgtttctacagagatgacagaatgtggctagagtaggctttctcaaccttggtactgttgactcttggggtgggataattctttgttgtgggggcagtcctgtgtgtcgtaggatgccaagcagtgtccatggcttctactcactggataccagtagccccctcccttctccacaagtcatgacaatgacaaatgtctctaggctgagcatgctggctcatgcctgtaatcccagcactttgggaagctgaggaaggaggatcacttgagcccaggagttcaagaccagcctgagcaacacagtgagacctcatctctacaaaaataaaataaaattagccaggtgtgatggcgtgcacccataatcccagctactcgggaggctgaggtgggcggatcacttgagcctgcgaggtggaggctgcagtgagctgagattgtgccactgcgctagagcctgggggacagagcgagaccctgtctagaaaaaaataagtctccagacattgccaaatgtttttggaaggcagaatcacccgctgattgaaaactactgggcctttggagatggggagcatacgggcaagactggagagtggattgggagctgagtaggctgcagcgacaatgcaaagtgatggaaggggagaggcgggcctacagcaaggaagtccaccagcgcatcaacaagcaacttgaggagatccggcgcttggaggaggtacggggcgatctccaggtgcagatcagcgcagcccagaaccaggtcaagcggcttcgggacagtcagcggctggagaacatggaccgcctgctgaagggccgggcccaggtgcaggcggagatcgaggagctgcaggagcagaccagggccctggacaagcagatccaggagtgggagacgcggatctttacccacagtaagaatgtcaggtccccgggattcatcctggatcagaaggtcaagatcaggcgaaggatcaggatcctagaaaaccagttggacagggtcacctgtcactttgacaaccagctggtacggaatgcggccctgcgggaggagctggatctgctgcggatcgacaggaaccgctatctgaacgtggaccgcaagctgaagaaggagatccaccacctgcatcacctggtcagcacccttatcctctcctccacctctgcctacgccgtcagggaggaggcgaaggccaagatgggcttgctgcgggagcgcgcggagaaagaggaggcccagagcgagatggaggcgcaggtcctgcagcggcagatcttgcacctggagcagctgcaccacttcctcaagctcaagaacaacgaccggcagccggatcccgatgtcctggagaagcgtgaaaagcaggccggggaggtggccgagggcgtctggaagacctcccaggagaggctggtgctttgctacgaggacgccctgaataaactgtcccagctgatgggggagagtgaccctgacctgttggtgcagaagtatctggagatcgaggagcgcaactttgctgagttcaacttcatcaacgagcagaacttggagctggagcatgtgcaggaagagatcaaggagatgcaggaggctttggtgagcgcacgtgccagcaaggatgaccagcatttgctgcaggagcagcagcagaaggtgttgcagcagcgcatggacaaggtgcactcggaggctgagcgccttgaggcccgcttccaggatgtgcggggacagctggagaagctcaaggctgatatccagctcctcttcaccaaggcccattgcgacagcagcatgatcgatgacctccttggggtcaagaccagcatgggagaccgggacatgggcctcttcctgagcctcattgagaagcggctggtggagctcctgacagtgcaggccttcctacatgcccagagcttcacctccctggccgacgctgccctcctagtgctgggccagagcctggaggaccttccgaagaagatggccccacttcagccccctgacactctagaagaccccccgggttttgaggccagcgatgactaccccatgagcagggaggagctgctgagccaagtggagaagctggtggagctccaggagcaggcggaggcgcagcgccagaaggacctggccgccgccgccgcgaagctggacggcaccctgagcgtggacctggccagcacccagagggccggctccagtaccgtcctggtgcccaccaggcacccccatgccatccccgggtccattttgagccacaagactagcagagaccgtggctctcttggccacgtcacttttggcggcctcagctccagcactgggcatttgcccagccacatcacgcacggtgaccccaacactggccacgtgaccttcggctccaccagtgcctcgagtgggggccacgtgaccttcagacccgtcagcgccagcagctacctgggctccactggatacgtggggtccagcaggggcggagaaaacacagagggtggtgtggagagcggaggcacagcgtctgattcgagcggaggcctcgggtccagcagagaccacgtctccagcaccggccctgcctccagcactggcccgggctcctccaccagcaaagactcccggggctaacacgaggggcacgcagcccccaccctgccctggctctctgtggggtctttttttgtgtctctacttcccctgtttgccttgtgggtctctgtctttttctcccagtggcaggcctctgtctttttgccccttcaactgttttcatctgcccttcatcaccgcctcacctgtgtctcccggttcctttctctctgctcctgacactgcttttccctctgactcctgatctcctgttctctgggcttcctggtcagtgtctgtccgtcttgtctccatatctgccccttccctgtctgctgagccctggccccctgtggatcccccacctcctgtttccggctctctctcctcatctccatctcccaggctctccacgcatcctgtgtccctgtctctgtagctccttactccccaagagccccccagtgctgacaggtgtgggaaaagtcagggcgaagacgccaggttcagcatgggaaaatgggactgtggaaataaagtatatgtgtggagagctggcttcaaaaaaaaaaaaaaa

SEQ ID NO: 327 - DNA, 1498 bp, HOMO SAPIENS
accaaacctcttcgaggcacaaggcacaacaggctgctctgggattctcttcagccaatcttcattgctcaagtgtctgaagcagccatggcagaagtacctgagctcgccagtgaaatgatggcttattacagtggcaatgaggatgacttgttctttgaagctgatggccctaaacagatgaagtgctccttccaggacctggacctctgccctctggatggcggcatccagctacgaatctccgaccaccactacagcaagggcttcaggcaggccgcgtcagttgttgtggccatggacaagctgaggaagatgctggttccctgcccacagaccttccaggagaatgacctgagcaccttctttcccttcatctttgaagaagaacctatcttcttcgacacatgggataacgaggcttatgtgcacgatgcacctgtacgatcactgaactgcacgctccgggactcacagcaaaaaagcttggtgatgtctggtccatatgaactgaaagctctccacctccagggacaggatatggagcaacaagtggtgttctccatgtcctttgtacaaggagaagaaagtaatgacaaaatacctgtggccttgggcctcaaggaaaagaatctgtacctgtcctgcgtgttgaaagatgataagcccactctacagctggagagtgtagatcccaaaaattacccaaagaagaagatggaaaagcgatttgtcttcaacaagatagaaatcaataacaagctggaatttgagtctgcccagttccccaactggtacatcagcacctctcaagcagaaaacatgcccgtcttcctgggagggaccaaaggcggccaggatataactgacttcaccatgcaatttgtgtcttcctaaagagagctgtacccagagagtcctgtgctgaatgtggactcaatccctagggctggcagaaagggaacagaaaggtttttgagtacggctatagcctggactttcctgttgtctacaccaatgcccaactgcctgccttagggtagtgctaagaggatctcctgtccatcagccaggacagtcagctctctcctttcagggccaatccccagcccttttgttgagccaggcctctctcacctctcctactcacttaaagcccgcctgacagaaaccacggccacatttggttctaagaaaccctctgtcattcgctcccacattctgatgagcaaccgcttccctatttatttatttatttgtttgtttgttttattcattggtctaatttattcaaagggggcaagaagtagcagtgtctgtaaaagagcctagtttttaatagctatggaatcaattcaatttggactggtgtgctctctttaaatcaagtcctttaattaagactgaaaatatataagctcagattatttaaatgggaatatttataaatgagcaaatatcatactgttcaatggttctgaaataaacttcactgaag

SEQ ID NO: 328 - DNA, 5769 bp, HOMO SAPIENS
agcgggactgagcgccgggagagacctgcgcaggcgcaggcgcgcgggaagggccagcctgggtggcccaccccgcgcctggcgggactggccgccaactcccctccgctccagtcacttgtctggagcttgaagaagtgggtattccccttcccaccccaggcactggaggagcggccccccggggattccaggacctgagctccgggagctggactcgcagcgaccgcggcagagcgagcgggcgccgggaagcgaggagacgcccgcgggaggcccagctgctcggagcaactggcatggcccgagccatggccgccgcgtggccgctgctgctggtggcgctactggtgctgtcctggccacccccaggaaccggggacgtcgtcgtgcaggcgcccacccaggtgcccggcttcttgggcgactccgtgacgctgccctgctacctacaggtgcccaacatggaggtgacgcatgtgtcacagctgacttgggcgcggcatggtgaatctggcagcatggccgtcttccaccaaacgcagggccccagctattcggagtccaaacggctggaattcgtggcagccagactgggcgcggagctgcggaatgcctcgctgaggatgttcgggttgcgcgtagaggatgaaggcaactacacctgcctgttcgtcacgttcccgcagggcagcaggagcgtggatatctggctccgagtgcttgccaagccccagaacacagctgaggttcagaaggtccagctcactggagagccagtgcccatggcccgctgcgtctccacagggggtcgcccgccagcccaaatcacctggcactcagacctgggcgggatgcccaatacgagccaggtgccagggttcctgtctggcacagtcactgtcaccagcctctggatattggtgccctcaagccaggtggacggcaagaatgtgacctgcaaggtggagcacgagagctttgagaagcctcagctgctgactgtgaacctcaccgtgtactaccccccagaggtatccatctctggctatgataacaactggtaccttggccagaatgaggccaccctgacctgcgatgctcgcagcaacccagagcccacaggctataattggagcacgaccatgggtcccctgccaccctttgctgtggcccagggcgcccagctcctgatccgtcctgtggacaaaccaatcaacacaactttaatctgcaacgtcaccaatgccctaggagctcgccaggcagaactgaccgtccaggtcaaagagggacctcccagtgagcactcaggtacagagcatgccagcgcctcagctaatgggcatgtctcctattcagctgtgagcagagagaacagctcttcccaggatccacagacagagggcacaaggtgacagcgtcgggactgagaggggagagagactggagctggcaaggacgtgggcctccagagttggacccgaccccaatggatgaagaccccctccaaagagaccagcctccctccctgtgccagacctcaaaacgacgggggcaggtgcaagttcataggtctccaagaccaccctcctttcatttgctagaaggactcactagactcaggaaagctgttaggctcacagttacagtttattacagtaaaaggacagagattaagatcagcaaagggaggaggtgcacagcacacgttccacgacagatgaggcgacggcttccatctgccctctcccagtggagccatataggcagcacctgattctcacagcaacatgtgacaacatgcaagaagtactgccaatactgccaaccagagcagctcactcgagatctttgtgtccagagttttttgtttgtcttgagacagggtctggctctgttggcagactagagtacagtggtgagatcacagttcattgcagccttgacttctcaacgccaagtcatcctcccacctcagcctcctgagtagctatgactacaggtatgtgccaccacgtctggctaatctttttattatttgtaaagtcgaggtttccctgtgttgcccaggctggtcttgaactcttggctccaagtgatacttctgccttggcctcccaaagtgctgaattaagcagctcaccatccacacggctgacctcatacatcaagccaataccgtgtggcccaagacccccaccataaatcacatcattagcatgaaccacccagagtggcccaagactcccagatcagctaccaggcaggatattccaagggcttagagatgaatgcccaggagctgaggataaagggcccgatctttctttgggcaaggttaagcctttactgcatagcagaccacacagaagggtgtgggccaccagagaattttggtaaaaatttggcctctggccttgagcttctaaatctctgtatccgtcagatctctgtggttacaagaaacagccactgaccctggtcaccagaggctgcaattcaggccgcaagcagctgcctggggggtgtccaaggagcagagaaaactactagatgtgaacttgaagaaggttgtcagctgcagccactttctgccagcatctgcagccactttctgccagcatctgcagccagcaagctgggactggcaggaaataacccacaaaagaagcaaatgcaatttccaacacaagggggaagggatgcagggggaggcagcgctgcagttgctcaggacacgctcctataggaccaagatggatgcgacccaagacccaggaggcccagctgctcagtgcaactgacaagttaaaaaggtctatgatcttgagggcagacagcagaattcctcttataaagaaaactgtttgggaaaatacgttgagggagagaagaccttgggccaagatgctaaatgggaatgcaaagcttgagctgctctgcaagagaaaataagcaggacagaggatttgctctggacagagatggaagagccgggaacagagaagtgtggggaagagataggaaccagcaggatggcaggggcaaagggctcaagggtgaggaggccagtgggaccccacagagttggggagataaaggaacattggttgctttggtggcacgtaagctccttgtctgtctccagcacccagaatctcattaaagcttatttattgtacctccagcggctgtgtgcaatggggtcttttgtggaaatcaaggagcagacaggtttcatgtgtactgtcaccacgtgggatggaaccagaggcatggaagcaagacgctaaatgaagagggccataagggctgggattcccaggcaccttaggaacagcttgtctttttttttttcctctccaaaaaaaatgtttaagggacggtgtctcctgtcacccaggctggagtgcaatggcacgatcatagctcattgcagcctctaactccggggctcaagcaatcctcccacctcagcctaccaagtagctgtgaccacagctgcccctcaccatgctaagctaatttttttaattagatagtacataaacgtcccaaaattagaagataaaaagacatgagggatccattctaatttgtgtttggagtgtaatggtccagctccattcttctgcacatggatatccagttttacacaacactgtgaatgtaatgaatgccactgaatcatacactcaaaaatagctaaaatggcaaattgtctgttatctctttttaaccaccatttttgaaaattaattataccaaaaaaccattgaatagtgcactttatttatttatttatttgtttatttatttatttattttagaaataagagtctcactttgttgcccaggctggagtgcggtggcgtgatcatggctcattgcagcctcgacctgctgggctcgggctatccttccatctcagcctcccgagtagctgggactataggtgggcgccaccccacctggctaaatctctttttaacttttgtagagataggcatctcgctatgttgcctaggctgggctggaactcctgggctcaagtgctcctcctgccttggcctcccaaagcgctaggattacagatgtgagccaccgcgcccaccctgaaccttactttttttgctcagtttctggtaattcagagaatgcctcctgagttgttctacacccacctcatattccatgggagggctgtacagggcttttttaacgaggcctctaaggacaggcatttgtatcctttccagcctttcactattacaatgttgtagtgaataactttacacactgtcatttattttacttttttttttttttattttagagaaaggaatcttgccatcttgcccaggctggtctcaaattcctgggcccaaacaatcctcccgccttggcctcctaaagtactgggatttataggcataagccaccgtgcctggccaatgcacactgtcatttagctcatgttaacacctgagtgtaggacacactcctggaggtggaattgctgggccaaagagtatgtttcttgtcattgtgatagatattgacaaatgaaccctcacagaagttgtgctgagttctgttcccaccagcgacgtaggcgatgacctttttctggagggagggggcatccttggagtccacagagccaggaatggagagtgggcccagaattttggtataggtgttgtataaacttatagtaaggttaagaaaaccgccactatccttatcagagacttggcggggggcagggtatgatggagatcataaggaggctaaaacactccacaccctccctctgcattgctcctgcacaggagtcgggaatcttttcaggttgatacgatctcaccttgaggagctgtgaggtcccagaagcctctgggttgcagattgcttggggtgaaaatgtctgtgctactgaaatctaactttttacaaaaaattacgggctgggcgcagtggctcacgcctgtaatcccagcactttgggaggctgcagcgggtggatcacttgaggtaaggagttcaagaccagaccatagtgaaaccgtgtctctacaaaaaaaattagccaggtgtggtggtgcatgcttgtaatcccagctactcagaaggctgaggtgggagaatcccttgaacccgggaagtggaggctggagtaaaccatgatcgagttactgcactccagcctgggtgacaagagtgagactctgtctccaaaaaaaaaaaaaaaaaaaaaaaaaactggattgcctggctctactccgggcacagcatgcaggcccagttctgctgctctgctgtttgttctgctttcctccacatattggcatcaccctctggtgccaagatggctgctgcattccaggcatcacatccagactcagacccagagaagctgcccatccctacctgggtgagcctttgtaggaacgagaaaccgcatccagcagcagaaacctcacccagcagcgtcttttccggtctcattcaccagcgccgcccaccgctcaaccaatccctggccaaaagaatgggaccgcctggaaggctggaccaaacaggacctgccctctggggctggggagaggcccagatgaaggctgcaggacaggatggactcctagacctctgttaccagcagtgactacctctgtctgggtggttggaacatgtttgaattttattctaagtactgtctacaagttctgcaataaaccttgactcttcttttaataatgcaaa

SEQ ID NO: 329 - DNA, 5068 bp, HOMO SAPIENS
agagcgtgcgcgcacccagactccttgcgggagcgagcgcgtctgggagcccgcggccggagaagggctgcgggttagggggccggcgcccgcggttcaggattccagaattggaaataacgggagggaggacctggtccagcttcccttcctcaaataaggaaattgacacctggcgtgagtacctgtggagaagaaacaatggattccttagaccatatgctgacagatcctctggaacttggtccgtgtggagatggccatggcacgcgcatcatggaggattgcctcctgggaggcaccagagttagtctgcccgaggaccttctggaggatcctgagatcttctttgatgttgtcagcctctcaacatggcaggaagtgttaagtgattctcaacgtgaacacctccagcagtttctgccccagtttcctgaagacagtgctgagcagcagaatgaactcatcttagccttgttcagtggggagaacttccgctttggaaaccctctgcacattgcccagaagcttttccgagacggacactttaaccccgaggtggtcaagtaccggcagttatgcttcaagtcacagtacaagcgctacctcaactcccagcagcagtatttccatcggctgctgaagcaaattcttgcttcccggagtgatctgctggagatggcccggcggagtggccccgcccttcccttccggcagaaacgcccttcaccatcccgcacacctgaggagcgggagtggcggacccagcagcgctacttgaaggtcttaagggaagtgaaagaggagtgtggtgacacagccctgtcatctgatgaagaggatctcagctcatggcttccgagctctccagcacgttctcctagtcctgcggtgcccctgcgggtggtgcccacactttcaaccacggatatgaaaactgcagataaagtagaactgggggacagtgacctgaagataatgttaaagaagcaccacgagaagcggaaacatcagccagatcacccggaccttttgacaggggacctgactctcaatgacatcatgactcgagtaaatgctggcaggaagggctctctggcagccttatatgacttggctgtccttaaaaaaaaggttaaggaaaaagaggaaaagaagaagaagaaaataaaaacgatcaaatcagaggcagaggacctggccgagccgctaagcagtactgaaggggtcgcacctctctcacaggccccctctccgctggcaattcctgctatcaaggaagagccccttgaagacctcaagccttgccttggaatcaatgaaatatcttccagcttcttctctcttctattagagatcttgctgctggagagtcaggctagccttcctatgctagaggagcgagttttggattggcagtcatcgccagccagctccctcaacagctggttctctgcggcccccaactgggctgagttggtactaccagccctgcagtatcttgctggagaaagtcgagctgttccttccagtttctctccatttgttgaattcaaagagaaaacccagcagtggaagttgcttggccaatcccaagataatgaaaaggaattagctgccctcttccagctatggctagagaccaaagatcaggccttctgtaagcaagaaaatgaagacagctcagatgccacaacacctgtccctcgggtaagaactgactatgtggtgcgtcccagcacgggggaggagaaacgggtttttcaggagcaggagcgttacaggtatagccaaccccataaggcgttcacctttcgcatgcacggctttgagtctgtggtggggccagtgaagggcgtgtttgacaaggagacctcgctcaacaaggctcgggagcactccctgctgcgctccgaccggcctgcctacgtcaccattctgtctcttgttcgggacgctgcggctcgactgcctaatggagaaggcacacgggcagagatctgtgaactgcttaaggactcccagtttcttgcaccagatgtcaccagcactcaggtaaatacagtagtgagtggtgcactggatcggctacattacgaaaaagatccctgtgtgaaatacgacattggacgaaagctgtggatctacctgcatcgtgaccggagtgaagaagagtttgagcggattcaccaagcacaagcagctgcagctaaagccagaaaagctcttcagcaaaaacccaagcccccatccaaggtgaagtccagtagcaaggagagctccataaaggtccttagcagtggcccttctgagcagagccagatgagcctcagtgactccagtatgccacccaccccagtcacacctgtaacccccaccacaccagcattgcccgccattcccatctcccctccacctgtatcggcagtgaacaaaagcggcccttccacagtctcagaaccagctaagtctagctcgggtgttcttctggtgtcttcaccaacaatgccacatctgggaacaatgctttccccagcttccagccagactgcacccagttctcaggctgccgcccgggtcgtgagccactctggctctgctggactgtctcaggtgcgagtggtggcccagcctagccttcctgctgttccccagcagtcgggagggccggcacagacattgccacagatgccagcaggaccgcagatccgggttccagccactgccacacagaccaaagtagtgccccagacagtaatggccactgtgcccgtcaaagcgcagactacggcagccactgtgcagcggcctggacccgggcagacagggctcacggtgacaagtctccctgccacagccagccctgtgagtaagccagccacgagttctcctgggacctctgctcccagtgcctccacggctgccgtcattcaaaatgtcacaggacagaacatcatcaagcaggtggcaatcactgggcagcttggtgtgaagccccaaacaggcaacagcattccactcacagccactaacttccgcatccagggtaaggatgtattgcgtctgccgccctcttccatcaccacagatgccaagggccagacggttctgcgaatcactccggacatgatggccacattggccaagtcccaggttaccacagtcaaattgacccaggacctcttcgggacaggaggcaacactacaggcaaaggcatctctgccaccttacacgtcacttccaatccagtacatgcagctgatagccctgccaaggccagttcagccagtgccccttcatccactccaacaggtaccactgtggtcaaagtgactcctgacctcaagccaacagaagcctcaagttcggcttttcgcttgatgccagctcttggcgtgagtgtggctgaccagaagggaaaaagcacagtggcctcttcagaagcaaaaccagctgccacgatccgcatcgtgcagggactgggagtgatgcctcccaaagcaggccagaccatcaccgttgcaacccacgccaagcaaggggcctcggtggccagtgggtctggaactgtccatacttcagcggtgtccttacccagtatgaatgctgctgtgtccaagactgtagctgtggcttctggggctgcaagcacccccatcagcatcagcacaggagcccccaccgtgcggcaggtccctgtcagcaccacggttgtgtccacgtcccaggctgggaagttgcctacacggatcacagttcccctctctgtgatcagccagccaatgaagggcaagagcgtggtcacagcccccatcatcaaaggcaaccttggagccaacctcagtgggttgggccgcaacatcatcctcacaactatgccagcaggcactaagctcattgctggcaataagcctgttagtttcctcactgctcagcagttgcagcagcttcagcagcaaggtcaggccacacaggtgcgcatccagactgtccctgcatcccatctccaacagggaacagcttctggctcctccaaagcagtctccactgttgttgtgactacagctccgtctcctaaacaggcacctgagcaacaatgattatgagagaggatggcttccgtgaaagaccatgcctggtctgtcctggctgagaagggaccagggaggttgcatcattgttttaagcttgcctgttcaaggcagccaggcgaggggtgatggcaacggtggcctggattcgtggcctggattctgctgccacgtgccatagtggagcaccctgagaaaggttcactccagggttccaaggtctgctctctaccaatctaggagaatattctgttgaaattgcaggaattaccagttacgtccaacaagccagagttctgagagtaagacccccagggaaggcttaccagttgcagagtgcacacagcgaataggctggttctccatgaggattgtattttttggcttctggtcttctccatgactagtggtctggataggagttttgtgtccagaaaattttatgtaatttatttttttaaagaacctgttgtacatctttctcaaatacaaacttgggctttagctgccccctccactaaaccgatgacttacttttttgactagaatgagaaaatggcaagaatcttagtaaggtggtagccagcttggtaactgcatagtaatcgagaggctgtaagatgggaattcatcgtaggcagcgaggtagagtgggtcccctgaaatgggattcgcttggcactgcctcttaaagataggggtgttgggatcttgattgtggccgccccccccagctttacctgcccactttgtccttcttggcaagcctgttcacatggacgtccagagccagtggacagagaggaggggacggacagcagaggtgctgcttttgcagcagaaactttgttgcagttcagagtataccttctgctctgctccagagcaagagttgcaaaccaggcccttggggctggccatttgtttttgtaaataaagttttattggaacacagcccaaaaaaaaaaaaaaaaaa

SEQ ID NO: 330 - DNA, 4124 bp, HOMO SAPIENS
gcacagactcaaagccccgcgggcgagctcagcagcccggagcgaccgcggccccgccgcctcccccgcgagtcccggcgatgcggcccggcctgtgagcggccggcgaccctgggacgccccgccgcacaactacctcaacgccgtgccgcccccctcccgcccccagggaatctctggagattggttcaccttttgtggtcctgaccccttctgtcctcactgtaccttgaagtcctagagtccaataaaatcgctgcctcccagctgtttggatcacagagaggtttttgcactgccatagggcgcccccgtgaggcgcttcgccccccaccatgttccagcgcctctccagcctcttcttcagcaccccctcgccccccgaagaccccgactgcccccgcgccttcgtgtcggaggaggatgaagtggacggctggctcatcattgacctgccggacagctacgcggctccacccagccccggggccgcccctgcccccgcgggccgccctccgcccgcgccctccttgatggacgagagctggtttgttacccctcccgcctgttttacggcagaggggcctggactcggtcccgcccgcctccagagcagtcccctggaggacctcctcatcgagcaccccagcatgtccgtttacgtcaccggcagcaccatagtgctagagcccgggtccccttccccgctcccggacgcggccctgcctgacggcgacctcagcgaaggggaattgacgcccgcccgccgcgagccgcgggccgcgcgccacgccgctcctctcccagcgcgggcggcgctgctggagaaggcgggccaggtgcggcggctgcagcgggcccggcagcgggcagagcgccacgcgctgagcgccaaggcggtgcagcggcagaaccgagcccgcgagagccgtccgcgccggtccaagaaccagagcagcttcatctaccagccgtgccagcgccagttcaactactgagcgtccaccggccgcgccacgaaccccttgccgatcccgatccctgtcgggctcctccgactcctcgggctggacaccgaaacctcccttcttaaagcgtgtgaggttgggtgatagccgttccttccccgacaccctcaatttccccatctctgatcctctaatctgcctctgaacccattcacccttcaccctcactcctggtccccatacccagcatctaatcatccatgccccctactcctggcccctccatcctttcttctctggtccccatccctgtctctccctttcacccttgccctccagtcctctacctctggcctgcccctatttctgaaagcttcttccagtccctgatctggctcattccccaccttcaactcccaccttacatgtctcacactatcccatggttggcattacactcactcctgttcccttattcttcattcccagtaattccctaccaaatggtggggaccctgagcccagctctgaccaggtagagcctgtgcagcctgggctgctgtcattgccctccagtaagggctcagggttttgcttttagtctccccttccttctgccttgggggcggtactctgtggagctgcttaggcctggaaaggtacagtatgtagaagaggactgtgagacgtgagttagagggagaagatggagggaatctagggaacgaggcagcctattggagatgcggacaggacagacacgttgagaagctgcagggagcagggcaccaagggagtgtgcactgtgcttgctcagagaggccaaaccctgctcccaggctgaagcctggagtctgcccccacttcccttttctataatccacccttctgcaggccctgaaatctgaagggcttagttagtaccttgccactctacccccaacacgtcacccgagtagaagctgggcaaggccctaccatcctggccgtctgttcacaagcccaaggtgctagaactagcttaggagacatgcaggccacagggcttctaggcagggaaagggcacacaccctaggtcagcgtgcagagcagtgatgctggaggacacaccatggggtgaagccatcccaaggctgacagctcagtcttcaccttgcctctggccttgtatttcacaccctgctcagtatggctagccagcagtcctgagtaggagtccaggactcccactgtctcaatctgcaaattgttcctatccaggttcagggccttcagggggcctcttttcattttctcccacaggcctctctttctttctaggttgctggggagaaatgggtaccctatgatccccctccccttctcctccagtaaatacctggaagagggaacctgaatccctgggggagacagaaggggcaggggccaccagcctccccttcttgtggtgagactgaattttgggctcagacaccagcaacagcctcttgggatgccctgagttgcttcccatttcctctttctagccgtccttttctagtgtgtgctcactcttcctaggaacttttaagacttcttggtacctatgaacataggtcctcccctcaccccaactctaggtttccaggcctcacagccaagctgaagcttggagaaaactctgcattcccatgagggcaaaggcagctgccctccctgaccctatagccccaggcctcatggggggtatgtggggaagggatggggtatccccatggatgctgggatgaggacagaggaagacctgatggggtctcctattccagggaataagccaaattaacactaaaaacggatcaaagctcccacgccagtccactagggccccagtagttgacagccttgctcctctcccaagttctccttcagaacctagttgcttttattcttccagctaccacttgggcacttcacagccagcctagggtcttcggcacctccaagagctgaatctccctccaacccttcttgcctactcctcactgccagctgggacctaggctcagtcctgtgtggtgcccatgatccttctggtgggggaagagtttaagttatagggcatttggctcaaattttaaaaggccttttgtttacctatatttctggaggctcctgtattctagaacccaatctctcacctgcttggttgcaaggctcatatttttttgtacctttcctatagattctgtagcatttgagtgtggcaatattttaattgtgtatagatttctaagaaccaacactactcagtctcctgctagtctgactcctgaagcatcagcccttgtcatactgtattgactgtgtacgtgcctttcaccttgagcatgcttcaggatttttttttaaaccacagaacttgaatacatgagggaaccagagttcaaagtcctatgcaaccttaggagggggttagagagtctgttttgattgatgttttctgaggccctagaggagtttgtatcaatttgtgagtattaatgtcagtactaccagcactttgccaaaactgtcagagggacccgtttctagagtgagtcccagttacatcaaacagtgacttccagttattccccagtaagtctgagtggttccttcaagctgggtgtctttccagcctttgccagtctagccccagcagggcaccgtgtatgaatgcagtttggtgctgttttagagtatgcctgctccccagccccctgcctggaaccctctgagcaacttgctctgacctataatgtcttaggtgcaacacggaccccaccagagctcttggatacccccctagatccatgtggctttatgtgaggggactgaatgcagacacaccatagcccccttctactactttccctctcgccctgccacctagttccacatggaaccaacaagttgagtgcatccctgttgggtgttttgtgttgagactggctgaaatgaggagactttgaccatgtgacgtgtcaacagactcaaggagacaaccacctcaactgggtcatgtggcatgcctgtgtatgtgtgtaacagaattctgattgttagactgtaatgctattcctctatgggagaaaaaaattaatataaagaaaaacaaataaaaatatatttaaagc

SEQ ID NO: 331 - DNA, 1497 bp, HOMO SAPIENS
agtccggccggaacctgtttgcgaccccgagtcccatgacaccgcttctcctcacaccccagtccgcagtgcccctccccagcctcggccgggcctcccgggagccgggcgtggcgttccagctagtgagccgtttctcccctgggctcggaggcggaagcttgaggggcgcggggaggagcttcgcgtgcggggtgaacgcccgctctacgtgctcgttctcttcgcgaccgctgcgcgcgagccccgtgtccccacggcgggcagcagcggcggcggcggcggctgaacgcggagggggcggagggagcccgcggcggcggcagcagctacagcgaaatggcggagaccgtggctgacacccggcggctgatcaccaagccgcagaacctgaatgacgcctacggaccccccagcaacttcctcgagatcgatgtgagcaacccgcaaacggtgggggtcggccggggccgcttcaccacttacgaaatcagggtcaagacaaatcttcctattttcaagctgaaagaatctactgttagaagaagatacagtgactttgaatggctgcgaagtgaattagaaagagagagcaaggtcgtagttcccccgctccctgggaaagcgtttttgcgtcagcttccttttagaggagatgatggaatatttgatgacaattttattgaggaaagaaaacaagggctggagcagtttataaacaaggtcgctggtcatcctctggcacagaacgaacgttgtcttcacatgtttttacaagatgaaataatagataaaagctatactccatctaaaataagacatgcctgaaatttggcaagaaggggcaaaaacgtgactattaatgattgataagcaccagtgaagaagttctaacttttagcatgctgcacagaaactggtataacatgccttcagtatactaacactcatatgctcagttttgttttgttttggcagttgacaagaagttaatttgctttagtaaaaatccctcattccagcctttctatataaatagctctttcttgctgttttaatgtggtgcacactatagcctcacaaacctgttattccagtgtaatctgcagtgtcgtaactaaagttactggcttggtcttatttgcacagtttttgcgtcttgtttgcttcttgcatctgattaactagaatatttctctttcccccttttaatttgtgatgtcacttgaccccatttatgtgtaggagcactacaccattggtttccaatactgcacacataagatacatacttgtgtgcagaaagtatcttcctccaggcttgtaatacccttcacatggaagattaatgagggaaatctttatattctgtataaaaacaaaagcaaatttatatactaaaatcatttgtctaaaaatttaagttgttttcaaataaaaattaaaatgcatttctgatatgcaaaaaaaaaaaaaaaaaaaaaaaaaaaaaaaaaa

SEQ ID NO: 332 - DNA, 536 bp, HOMO SAPIENS
  misc_feature (71)..(71): n is a, c, g, or t
  misc_feature (89)..(89): n is a, c, g, or t
  misc_feature (326)..(326): n is a, c, g, or t
  misc_feature (360)..(360): n is a, c, g, or t
  misc_feature (373)..(373): n is a, c, g, or t
  misc_feature (381)..(381): n is a, c, g, or t
ggcttaacagaatcaccaagtgtcacagtcagctcttggccagtggaaaattgtctgggcctgtatatgtnggaggaactcagataganaaaggacttgtaaacagcatggaaacctcaacatctgctgtctcaagcacttaaaaaaggctacaattcaggtgttactggatgacttaactgcatggacatttaggggctgacttgtgttgtgattattccaattgtgggctttggagaagcagagggatgattttcagttgtgtgggtgttaagtctatggattgggaatttaccactgaaattgatcgttcaaagtgtgacttnatagtagggccagctcctcctaagttgtcctttngtttttcacatanaatacatnctggtactttttacttggaaagttgtactatgtccatgaaaatggttaaatgagaaggccataaagattcatttaatagctgaaaagcaacttttaaaatagaataggacgaatttaacatggaatgatgtgccctttactgatatttaacacat

SEQ ID NO: 333 - DNA, 4638 bp, HOMO SAPIENS
accgtgggccacgccttccgggccccgcggctggccggctcctcgcgccctcccctctctcggccgctcttcgggccgcctctgcgtgtggggccgcccgcgccagtgtgagcctgagctgacggcggctccgggaggctcgcagaaggggagggccgggcggcgcgggagctgagcatcgccagggcgggcggcagggcgcggcctctccgccgggtgtaccacctgtcgcggcgcgagacctctggtgaaagaaaagatgttgtcccggttaagagtagtttccaccacttgtactttggcatgtcgacatttgcacataaaagaaaaaggcaagccacttatgctgaacccaagaacaaacaagggaatggcatttactttacaagaacgacaaatgcttggtcttcaaggacttctacctcccaaaatagagacacaagatattcaagccttacgatttcatagaaacttgaagaaaatgactagccctttggaaaaatatatctacataatgggaatacaagaaagaaatgagaaattgttttatagaatactgcaagatgacattgagagtttaatgccaattgtatatacaccgacggttggtcttgcctgctcccagtatggacacatctttagaagacctaagggattatttatttcgatctcagacagaggtcatgttagatcaattgtggataactggccagaaaatcatgttaaggctgttgtagtgactgatggagagagaattctgggtcttggagatctgggtgtctatggaatgggaattccagtaggaaaactttgtttgtatacagcttgtgcaggaatacggcctgatagatgcctgccagtgtgtattgatgtgggaactgataatatcgcactcttaaaagacccattttacatgggcttgtaccagaaacgagatcgcacacaacagtatgatgacctgattgatgagtttatgaaagctattactgacagatatggccggaacacactcattcagttcgaagactttggaaatcataatgcattcaggttcttgagaaagtaccgagaaaaatattgtactttcaatgatgatattcaagggacagctgcagtagctctagcaggtcttcttgcagcacaaaaagttattagtaaaccaatctccgaacacaaaatcttattccttggagcaggagaggctgctcttggaattgcaaatcttatagttatgtctatggtagaaaatggcctgtcagaacaagaggcacaaaagaaaatctggatgtttgacaagtatggtttattagttaagggacggaaagcaaaaatagatagttatcaggaaccatttactcactcagccccagagagcatacctgatacttttgaagatgcagtgaatatactgaagccttcaactataattggagttgcaggtgctggccgtcttttcactcctgatgtaatcagagccatggcctctatcaatgaaaggcctgtaatatttgcattaagtaatcctacagcacaggcagagtgcacggctgaagaagcatatacacttacagagggcaggtgtttgtttgccagtggcagtccatttgggccagtgaaacttacagatgggcgagtctttacaccaggtcaaggaaacaatgtttatatttttccaggtgtggctttagctgttattctctgtaacacccggcatattagtgacagtgttttcctagaagctgcaaaggccctgacaagccaattgacagatgaagagctagcccaagggagactttacccaccgcttgctaatattcaggaagtttctattaacattgctattaaagttacagaatacctatatgctaataaaatggctttccgatacccagaacctgaagacaaggccaaatatgttaaagaaagaacatggcggagtgaatatgattccctgctgccagatgtgtatgaatggccagaatctgcatcaagccctcctgtgataacagaatagaagcactcccctgataaatactttctgtgctccagggaaccccttttttcagacaagaagagataatgtcttcagttttatggtgttttctgtgttttgttctccctgaccactttggttgatgtattttttccatgcgtctccacatctgttggggtagacgtgttgattgattgcattgcccaccagcaccctacagtcagatagttgtgatgctttaattctaacatacagcccgtaccacatccaggagatgtaaaaagtgtgtttgtgaatgtcttcacttgtactctaattcagacttgccaaagtatttgctatttactattatgggtaatactcttctctggcctagttcttacagagctactaaaatagaaatttacttttatggatagaagtacagaattttgagaagaaactaaattttcaccaaattttaaggaaaaattgtcattatctaaaaatgttcttatatatctgcttcatcttaccttcatactctgaaattccctatagcagacagagctagggaaatattaaaaatttaccctatttattttctggaactaaatcaagccttaactataacattatgagagtaatgggaactactgctggctttaagtaaataaaagtcattgttttcaacagtgtataaaaatcatagtgtaacctttttatttaataaatatcttacatttaattgcttcagttatgctatcttattgcccaactagaaatttagatttgcttatgaaaaacacatatttttgttacttctagatgattctaggagggagtataagatacctaatcatatgggaacatcacgtgactttttaaatctaaattagtcatgcttcacatcaaaatgagtcatatttaactggagaaactatgcccttattccagaactgatgctctttattgcttgagataattttggaatgttactatgatactgtttctttgaatatcattagtagtgacaactctttctccattgaaggcagacttaatttttttaaaccaccaacattaatttagagctaaatggggatgaataaggttggtgttcatctgggaaatgccttttttaatcccagtaaaatgggtaataatggctatccagaacagttttcttgtgtggcttgcatattgaagaattctaaaggaaaatatatctgcctaccatgcttgctcttagggaagaaaacttaaatgctcattctaggatagtaacaacaacagataattcatcgataatatgagcatgcacagtatttgatattgctctgtaggaaaaaagagacttcatttttttcatcttctgcctatgaatacaaattgattctttttttttttttttttttttgagacagagtctcactctgttaccaggctggagtgcagtggtgtgatctcagctcactgcaacctctgcctcccaggttcaagcagttctcctgcctcagcctcccaagtagctgggactacaggtacacgccaccacgcccagctaatttttgtatttttagtagagacgggatttcaccatgttggccaggagggtctcgatttcctgacctcgcgatccgcccacctcagccttccaaagtgctgggattacaggcgtgagccaccgcacccagccaattttttttttttttttttttgagacagagtctcgcttttgtcgcccagtctggagtgtagtggcatgatctctgcaacctctgcctcctcggttcaggcgattcttctgccttagcctcccaagtagctgggattacaggcaccggccaccacacccagctaatttttgtatttttagtagagatggggtttcaccatgttggccaggctggtctcaaaatcctgacttcaggtgatccacccactttggcctcccaaagtgctgggattacaggcgtgagccaccacacctggtccaattcatcataattctgaatataatttaataattttaaaatggtcgcaatggcattgccatttggagtatgggaaaatgcagttggttaattcattgaacagattagtaaagtcagaagtctttttcataacatacggtcacaattcctttcttttaattaaagacaaaaggtttatgggttttggtttgtttgttttagatatggggttttgctatgtcacccttgctggagggcggtggctgttcacaggcgtgggtcatagagcactgcagcctggaactcctgggttcaagctctcctcctgcctcagcctcctgagcagcttggactaaaggtgtgcaccaccgcacctggctgagaggcttctgtttttcatgttccctttatcaaaacaaaatcacgcctaaacatactctctgtgtgaaatcttgattttagttcaacctaagaaatataataaatataaacctgtttcttgcttagtgtttattgaaggcaggaacgtatgctgaattaaagtaattttactacgaagtttgcttattaagtatgcctggtacagtcttcatggaagttattaagtattttaaggaaaaaaataggctaaatggcatatagcctgcttaaataaaataattctatttttttaaaaaaaaaaaaaaaaaa

SEQ ID NO: 334 - DNA, 4885 bp, HOMO SAPIENS
ccctccagaatacccatcatatagcccctgaggtggcatggtgatgtctccatgagggaaccccttcccactcatcctgtcacgtatatcatagtgttcttgactgggccattcatctaagatgggatttaccctgtgaaacagggagaagacttatggaccccaagcatcatttcgagttgtagttgagtttttaaaagacatacatgcaaagttcctttgctttggaccctctgcattattaaagctgctgtattgctaacccagaactgctccagtgtcttgactgatcatcatggcttcagtttggaagagactgcagcgtgtgggaaaacatgcatccaagttccagtttgtggcctcctaccaggagctcatggttgagtgtacgaagaaatggcaaccagataaactggtggtagtttggaccagaagaagccgaaggaagtcttctaaggcacatagctggcaacctggaataaaaaatccctatcgtggtgttgttgtgtggcctgttcctgaaaacattgaaatcactgtaacactttttaaggatcctcatgcggaagaatttgaagacaaagagtggacatttgtcatagaaaatgaatccccttctggtcgaaggaaagctcttgctactagcagcatcaatatgaaacagtatgcaagccctatgccaactcagactgatgtcaagttaaaattcaagccattatctaaaaaagttgtatctgccgctcttcagttttcattatcttgcatttttctgagggaaggaaaagccacagatgaagacatgcaaagtttggctagtttgatgagtatgaagcaggctgacattggcaatttagatgacttcgaagaagataatgaagatgatgatgagaacagagtgaaccaagaagaaaaggcagctaaaattacagagcttatcaacaaacttaactttttggatgaagcagaaaaggacttggccaccgtgaattcaaatccatttgatgatcctgatgctgcagaattaaatccatttggagatcctgactcagaagaacctatcactgaaacagcttcacctagaaaaacagaagactctttttataataacagctataatccctttaaagaggtgcagactccacagtatttgaacccattcgatgagccagaagcatttgtgaccataaaggattctcctccccagtctacaaaaagaaaaaatataagacctgtggatatgagcaagtacctctatgctgatagttctaaaactgaagaagaagaattggatgaatcaaatcctttttatgaacctaaatcaactcctcctccaaataatttggtaaatcctgttcaagaactagaaactgaaaggcgagtgaaaagaaaggccccggctccaccagtcctctcaccaaaaacaggagtattaaatgaaaacacagtttctgcaggaaaagatctctctacttctcctaagccaagccctataccaagtcctgttttggggcgaaagccaaatgctagtcagtctttgcttgtatggtgtaaagaagttacaaagaactaccgaggagtaaaaatcaccaattttactacatcgtggagaaatggtttatctttttgtgcaatattacaccactttagaccagatttaattgactacaagtctctgaatcctcaagatattaaagagaacaacaaaaaggcatacgatggatttgccagcataggaatttcccgattattggaaccttctgatatggtattattagcaattcctgataaactgactgttatgacttatctctatcaaataagggcacatttcagtggccaagaactaaatgtcgttcagatagaggaaaacagcagtaaaagcacatataaagttggaaactatgaaacagatacaaacagttctgttgatcaagaaaaattctatgcagagcttagtgatctgaagcgggagcctgaactacaacagcctatcagcggagcagtagacttcttatcacaggatgactctgtatttgtaaatgatagcggggttggagagtcagaaagtgagcatcaaactcctgatgatcaccttagtccaagcacagcctccccttactgtcgcaggactaaaagtgacacagaaccccagaagtctcagcagagctctggaaggacttcaggatctgatgaccctggaatatgttccaatacagattcaacccaagcacaggttttgttaggcaaaaagagactattgaaagctgagactttagaattgagtgacttatatgttagtgataagaagaaggatatgtctccaccctttatttgtgaggagacagatgaacaaaagcttcaaactctagacatcggtagtaacttggagaaagaaaaattagagaattccagatccttagaatgcagatcagatccagaatctcctatcaaaaaaacaagtttatctcctacttctaaacttggatactcatatagtagagatctagaccttgctaagaaaaaacatgcttccctgaggcagacggagtctgatccagatgctgatagaaccactttaaatcatgcagatcattcatcaaaaatagtccagcatcgattgttatctagacaagaagaacttaaggaaagagcaagagttctgcttgagcaagcaagaagagatgcagccttaaaggcggggaataagcacaataccaacacagccaccccattctgcaacaggcagctaagtgatcagcaagatgaagagcgacgtcggcagctgagagagagagctcgtcagctaatagcagaagctcgatctggagtgaagatgtcagaacttcccagctatggtgaaatggctgcagaaaagttgaaagaaaggtcaaaggcatctggagatgaaaatgataatattgagatagatactaacgaggagatccctgaaggctttgttgtaggaggtggagatgaacttactaacttagaaaatgaccttgatactcccgaacaaaacagtaagttggtggacttgaagctgaagaagctcctagaagttcagccacaggtggcaaattcaccctccagtgctgcccagaaagctgtaactgagagctcagagcaggacatgaaaagtggcacagaagatctccggactgaacgattacaaaaaacaacagaacgttttagaaatcctgttgtgttcagcaaagattctacagtcagaaaaactcaacttcagtctttcagccaatatattgagaatagaccagagatgaaaaggcagagatcaatacaggaagatacaaagaaaggaaatgaggagaaggcagcgataactgaaactcagaggaagccatcagaagatgaagtgcttaataaagggttcaaagacaccagtcagtatgtagtaggagaattggcagcactagagaatgagcaaaagcaaattgacacccgtgccgcgctggtggagaagcgccttcgctatctcatggacacaggaaggaacacagaagaagaagaagctatgatgcaggaatggtttatgttagttaataagaaaaatgccttaataaggagaatgaatcagctctctcttctggaaaaagaacatgatttagaacgacggtatgagctgctgaaccgggaattgagggcaatgctagccattgaagactggcagaagaccgaggcccagaagcgacgcgaacagcttctgctagatgagctggtggccctggtgaacaagcgcgatgcgctcgtcagggacctggacgcgcaggagaagcaggccgaagaagaagatgagcatttggagcgaactctggagcaaaacaaaggcaagatggccaagaaagaggagaaatgtgttcttcagtagccatcagatcagaaagaatctctcccaacattttagagtcttgcttcccaaaccagaaaaagtcagactcattgttgatttaaaacttttaacattttgtttggctggattgtactactttacctctactttaccaccaccacccttttcctccctcctttccaaataatatacagaactccaaaatagcttcatttaaggatttttttgtgagttaacaatttccttgaaatcctgtgaaatagatttgcacagacaccttgtgagtgattggtattggaggtgttcaagaaactgttcgaaaaagaacaaaaacacttccctcgttattttctctcattttttgatgagaggaaaatttgaaacattattcttgttgttgttggtaatagcataatgacagtgggaggggtacaaggggataagaaaaatgtcatgatttttttccggtcctgccacatgtaacacttactctgttacctaaattttatagttagatcatatccaatctacttattaaactgtgttctatttaccagtggagtttttctgcagtggttgcgtttcactgtaaggataatggagttcctctcctctgctttcctcagaggatggtcctttaacatagccagaaacaagccctgtggtttgaaggtgagctgtgaggatgggactaattgatatgcaccagtttacaaagacagtcttatcatccgagaatacaccatctttttctctggataattatttcttacatcatgcttgattcctacattttgttgggtctcaacattggctcacgaatgctgttaatatttattctgtattgataaaaagtctgtcttgccactacaagtaaatcccccatttaatattttcttctttagcatagcactgtcattttttgtgaaaatggttatgtttatttattacaatactgagtcatatataaattttcaataaaagcagaaactttcttaccttaaaaaaaaaaaaaaa

SEQ ID NO: 335 - DNA, 6131 bp, HOMO SAPIENS
ctccgactctcggcacctggcctccagctttcggaactatggaggccgcgcccgggacccccccgccgccgccatcagagtcgccgccgccgccatcgccgccgccgccatcaacgccttcgcctcctccgtgttcccccgacgcccgcccggccaccccgcacctcctccaccaccgcctcccgctccctgacgacagggaagatggagagttggaagaaggtgaattggaagatgatggggcagaggagacccaggatacctccggagggcctgagagaagccggaaagaaaagggggagaagcatcacagtgattcggatgaggagaagtcccacaggagactgaagcggaaacggaagaaagagcgggagaaagagaaaaggaggtcgaagaagaggaggaaatccaagcacaaacgccatgcttcttctagcgatgacttctctgacttctcagatgactcggatttcagccccagtgagaaaggtcaccgcaagtacagagagtacagccccccatatgcgccgtcccaccagcagtaccccccatcgcatgccacgcccctgcccaagaaggcatactccaagatggacagcaagagttatggcatgtacgaggactacgagaatgagcagtatggggaatatgagggcgacgaggaggaggacatgggcaaggaggactatgacgacttcaccaaagagctgaaccagtaccggcgtgccaaggagggcagcagccgcggccgaggcagccgaggccggggccggggctacaggggccgaggaagccgtggaggatcgcgaggccgcggcatgggcaggggcagccgaggcaggggcagaggctctatgggaggagaccacccggaggatgaagaggatttctacgaggaagagatggactatggagagagtgaggagccaatgggagacgacgactatgacgagtactccaaggagctgaaccagtaccgccgctccaaggacagccgaggccgagggctaagtcgaggccgtggcaggggctcccgaggtcgagggaaaggaatgggtcggggccgaggccgaggtggcagccgaggagggatgaacaagggcggaatgaacgatgacgaagacttctatgacgaggacatgggcgacggtggtggtggaagctaccggagtcgtgaccatgacaagccccaccagcagtcggacaagaaaggcaaagtcatttgcaagtacttcgtggaagggcgctgcacctggggagaccactgtaattttagccatgacatcgaactcccaaagaagcgagaactgtgcaagttttacatcactggattttgcgccagagctgagaactgcccttatatgcacggtgatttcccgtgtaagctgtaccacaccactgggaactgcatcaatggtgacgactgcatgttttcccacgaccctctgaccgaagagacgagggagctcttggataagatgttggccgatgatgcagaagcaggtgccgaggatgagaaggaggtggaggaactgaagaagcagggcatcaaccccctgcccaaaccgccccctggtgtgggcctcctgcccacccctcctcggccccctggcccgcaggctccaacctctcccaacggcaggcccatgcagggtggccccccgcccccgccccctccccctcccccaccgcccgggccccctcagatgcccatgccggtgcatgagccactgtccccgcagcagctgcagcagcaggacatgtacaacaagaagatcccctccttgtttgagatcgtggtgcggcccacgggacagctggctgagaagctgggtgtgaggttccctggacccggtggacccccagggccaatgggccctgggcccaacatgggacccccagggccaatgggcggtccaatgcatcctgacatgcaccccgacatgcacccggacatgcaccctgacatgcacgcagacatgcacgcagacatgccgatgggccctggcatgaatcctggcccacccatgggccctggcggccctccaatgatgccctacggccctggagactccccacattctggaatgatgccccctatcccgccagcccagaacttctatgaaaacttctaccagcagcaggagggcatggagatggagcccggactcctgggggatgcagaggactacgggcactacgaagagctgccaggggagcctggggagcacctcttccctgagcaccctctggagcccgacagcttctctgagggagggcccccaggccggccgaagccaggcgccggtgtccctgacttcctgccctcagcccagagggccctgtacctgaggatccagcagaagcagcaggaggaggaggagagagcgaggaggctggctgagagcagcaagcaggaccgggagaatgaggaaggtgacaccggaaactggtactcaagtgatgaggatgagggtggaagcagtgtcacctccatcctgaagaccttgaggcagcagacgtccagccgacccccggcttcagttggggagctgagcagcagtgggctgggggacccccgcctccagaagggacaccccacaggaagccggctggctgaccctcgcctcagccgggaccccagactcacccgccatgtggaggcttctggcgggtctggcccaggtgattcgggaccctccgatcctcggctggctcgcgccctgcccacctccaagcccgaaggcagccttcattccagccctgtgggccccagcagttccaaggggtctgggccgcccccaacggaggaggaggaaggggagcgggccctgcgggagaaggccgtgaacattcccctggacccactccccgggcaccctctgcgggacccacggtcacagctgcagcagttcagccacatcaagaaggacgtgaccctgagcaagcccagcttcgcccgcaccgtgctctggaatcccgaggacctgatccccctacccatccccaagcaggacgcagtgccccccgtgcccgcggccctgcaatccatgcccaccctggacccccggctgcaccgcgctgccacggcagggccccccaacgcccggcagcgcccgggcgcctccacggattccagcacacagggcgccaacctccccgactttgaacttctgtctcgcatcctcaagacagtcaatgccaccggctcctcggccgcccccggttccagcgacaaacccagtgacccccgggtgcggaaggcccccaccgaccctcggctgcagaaacccacagactctacggcctcctcccgggctgccaagcccggccctgctgaggcgccctctcccaccgccagcccgagtggggatgcctccccaccagccaccgctccctacgacccccgcgtgctggcggccggtggactgggccagggcggagggggcgggcagagcagtgtgctgagcggtatcagcctctacgacccgaggactcccaacgcggggggcaaagccacagagccggctgctgacacgggtgcccagcccaagggtgctgagggcaatggcaagagctcggcctccaaggctaaggagcccccgttcgtccgcaagtctgccctggaacagccagagacagggaaggccggtgctgatgggggcacccccacggacagatacaacagctacaaccggccccggcccaaggctgctgcagcccccgctgccaccaccgccaccccaccccccgagggtgccccaccccagcccggggtgcacaacctgcccgtgcccaccctcttcgggacggtgaagcagacacccaagacgggctcaggaagcccatttgctgggaacagtccggcccgcgagggtgagcaggatgcggcatccctgaaggatgtttttaaaggcttcgaccccacggcctcccccttttgccagtagtgtccagccagagctgcggctccagccacccttcctagggtggcattcagggcagcacccagggtagggaacttgggggcaaggggaggcaggctgggtgttccttttttcttttctttttcttttgctttccgtctcttttatttttttttaaagtagtactttctttgagatttgtaaattgtatataaccatcttaagttctggtcagtgtggcgggctcaggggctcctgctgagcaaaccgactcatgcccgcaaacctgtgaactttcgccagtgcctggcctcagactctgtgggctctgcgtggccgggccttgctggaggcccagtgggttttctgggcaaagcatggccccttttccccaggacaaagggaacagttggtgtctgggaaggtattgaacgctcctcaccctgtgcccgaagagacccggaaccaagaccatggcagggcctgcgtggaagcaggtccaggcgtttctagaaccctagggtgcaccatcactgtcttttcagtgcaggctgtaacaacccactcaggagacagtgagagtgaaaaggtattaaggaaaaagcccccagcggcactatgggggctccctggcgcatgcctgctcctgtccctggattaccacacgtgccctccctgccaccctccgtctagagcaagcggatgccccccagcctgcagcagaagcctccacagtgagaactggacccaaaggtagtgggggccggtgtggggcagagtcctgaagagccacctctaggaggcagcccctaggagcacgcacgttctgtcagtattaccccacctgtcctatcaggtgggccacaccctgcttgcccacaccagggtctgtcctggtcctcaagccacgcacccgctatgcctgcactgcagcccagccccggacagctccaggatccgtgcagtggctgcgccgccaggccccaacaatggggaccctggggtggctcctggccaagtgttctctgttttcctcgcacctccttacactgtgtgacctgcagggcatgaggtattgatgtgttcgggtttcctttcccaagccagcagatgcaggtgttccaaggtgtgttgctctgtgggatttgtggacacttaagaaacggactgagtgggaaccctgcagccaggggatggggagcctctgctccccccatgctcccaccctggctgagggccagcctcatctgcagagccctggaggaggcccacctatggacacagcccgagagatgggcgcaaggggtgctgggggaggcctgctatcctgcctctgggccacttgaggggcctcaggaagtgtgtgcttgtggctgcatctgcccgtctccctggcccaccatgtggctgcaggccaagctcttcattgctgaccatgaagagacctagttacctgccaagggattccccttccctcctcctcagggtggggtgaacaaggctcctatcccaccccaccccaaaaagagaaaaatgaaaaactcatagtttggagccaggaggcagggtgtcctacagggctgcacagccctgaggggtcagtgctgggatctggttggttggtttgtctttttgtctttttttttttttttttttttacacaatcattaatgagatttgtcttcagccaccagtgttggccttgaagcagagggcacagcccttggtgtttgtaaaataagtatgaatacacagtgtggcagtgttgtggtttttgttgttgtttttcctctccttttgagaattttcttttgtaaaagaaaaatattttttaaaccgaaatctgtggatgaaatagaagctggagccctcctcttggaatattcagcctaagaacctcataggactatgaattcacccgaaattctcatttgccatcaggccgagcttttaaagaaaaattgttctctaaccaggattgtaacaaaagtgtaaatactgtttcagagttgagagttggtggtgcaaatatgtatataatgaactgtatttttacaatgatcgccgcatgactatttcacaccctttttatactccatatctgtcttccagaaacgtcacctgcctttctcctgtggtctcttaatccagtaattgtattactgccattaaaggatgcagttattttaaaaaaaaaaaaaaaaa

SEQ ID NO: 336 - DNA, 2932 bp, HOMO SAPIENS
agcggcccgcggggcggggcttgtgagctggggctcccccggagcgggcgagttggtaaacagatccggagcgcgtggcgggcgtcagcgcggtggccagcgcgcagaggcgggcgcggaggcggctagaaggtgaccgcggatcccagcttcctgcagccagccctgaaggatggctgccatattgggagacaccatcatggtggctaaaggccttgtcaagctgacccaggcggccgtggaaacccacctgcagcacttgggcatcggaggggagctgatcatggcggccagggccctgcagtccacggctgtggagcagattggcatgttcttggggaaggtgcagggtcaggataaacatgaagaatattttgctgagaacttcggcggcccagaaggggagttccacttctcagtcccgcatgcagccggagcctccacagacttctcttcagcctccgctcccgaccagtcagcgcccccatccctgggtcatgcccacagcgagggcccagctcctgcctacgtggccagtggaccctttagagaagccgggttccccggccaggcctcctcccctctgggcagggccaacgggaggctctttgcaaaccccagagactcattctctgccatgggctttcagcgaaggttcttccaccaggaccaatcccctgttgggggcctcacagccgaggacattgagaaggcccggcaggctaaggctcgccccgagaacaagcagcacaaacagacgctcagcgagcatgcccgggagcggaaggtgcctgtgacgaggattggccggctggccaacttcggaggtctggccgtgggcctgggcttcggggcactggcagaggtcgccaagaagagcctgcgctccgaggacccctcagggaagaaggccgtgctgggttccagtcctttcctgtccgaggccaatgcagagcggatcgtgcgcacgctctgcaaggtgcgtggtgcggcactcaagctgggccagatgctgagcatccaggatgatgcctttatcaacccccacctggctaagatcttcgagcgggtgcggcagagcgcggacttcatgccactgaagcagatgatgaaaactctcaacaacgacctgggccccaactggcgggacaagttggaatacttcgaggagcggcccttcgccgccgcatccattgggcaggtgcacttggcccgaatgaagggcggccgcgaggtggccatgaagatccagtaccctggcgtggcccagagcatcaacagtgatgtcaacaacctcatggccgtgttgaacatgagcaacatgcttccagaaggcctgttccccgagcacctgatcgacgtgctgaggcgggagctggccctggagtgtgactaccagcgagaggccgcctgtgcccgcaagttcagggacctgctgaagggccaccccttcttctatgtgcctgagattgtggatgagctctgcagcccacatgtgctgaccacagagctggtgtctggcttccccctggaccaggccgaagggctcagccaggagattcggaacgagatctgctacaacatcctggttctgtgcctgagggagctgttcgagttccacttcatgcaaacagaccccaactggtccaacttcttctatgacccccagcagcacaaggtggctcttttggattttggggcaacgcgggaatatgacagatccttcaccgacctctacattcagatcatcagggctgctgccgacagggacagggagactgtgcgggcgaaatccatagagatgaagttcctcaccggctacgaggtcaaggtcatggaagacgcccacttggatgccatcctcatcctgggggaggccttcgcctctgatgagccttttgattttggcactcagagcaccaccgagaagatccacaacctgattcccgtcatgctgaggcaccgtctcgtccccccacccgaggaaacctactccctgcacaggaagatggggggctccttcctcatctgctccaagctgaaggcccgcttcccctgcaaggccatgttcgaggaggcctacagcaactactgcaagaggcaggcccagcagtagggctgcgggccacgcccaggccggctccgcgggaactctctccctcagacaggccaaaaaccagtagcgaggtcgtggtgatgctctttttaactcctttgcccaataaggggggtggctgcctggagccccgtagccagcgctttccacggtttctgttgctaaatggttgtagggtgagaagtgcaagaatgaagatgaagccccactgctcggtcagtctgcctccgtgtgtcctctgaaataagcagatgaagatgaaagggcaactttgttttcttctttttcctgatgtgaatgttaagcagaagggagagagtccttactcccttccaatctctgttcagtgcaaaacccagaaacatgaacagatacgattgtgggattttatcatctgtgtagtaggtgtgtgtatgtgtttctagagtgagatttgtgttttctgcccttttcctctccagccgatgggctggagctgggagaggtgctgagctaacagtgccaacaagtgctccttaagcctgcgaggcccaggcctgtggggctggttctcacctttgacagctgaatgttcctaaagaactgctgccccacagtgagggtgggagcagcggaacagggaatgccagacacaggctcgctgctgctggaaggcggggtgggacttccttcctctgtccggagaggcacaggtgtcaccagttccagccaaaggctcctcacaggcgctgtgaatttttgtacaagtcttgtaattatcgaatcaacaacttgtttcaatttaataaaaatgctcatgggaagtgctaaaaaaaa

SEQ ID NO: 337 - DNA, 6950 bp, HOMO SAPIENS
ggccaaaggtcaagatacttctctgggaaatgttgctgctgatgctgctttacaaagtcatacaatgagtgtttggtttaagaaagattttcatacttaaaagattttcatcttggaaatacatcaagtgaaaattaaattcttttgggaaacattttccttctgatatattatacttgtaatgggcgacatggcaaacaactcagttgcttacagtggtgtgaaaaactctttgaaggaagctaatcatgatggagactttggaattacgctcgcagagctgcgggctctcatggagctcaggtccacagatgcattacgaaaaatacaggaaagctatggagatgtctatggaatttgcaccaaattgaaaacatctcccaatgaaggtttaagtggaaaccctgcagatttagaaagaagagaagcagtgtttggaaagaattttatacctcctaaaaagccaaaaacctttcttcaattagtatgggaagcattacaagatgtcactttaattatattagaaattgcagccatagtatcattgggcctttctttttatcagcctccagaaggggataatgcactttgtggagaagtttctgttggggaggaagaaggtgaaggtgaaactggttggattgaaggagctgcaatcctcttgtctgtagtgtgtgtggtgttagtaacagctttcaatgactggagtaaggaaaaacagtttagaggtttgcagagccgaattgaacaagaacagaagttcactgtcatcaggggtggtcaggtcattcagatacctgtagctgacattactgttggagatattgctcaagtgaaatatggtgatcttcttccagctgacggcatacttattcaaggcaacgatcttaaaattgatgaaagctcattgactggtgaatcagatcatgttaaaaagtctttagataaggatcccttacttctatcaggtactcatgtaatggaaggctctggaagaatggtagttacagctgtaggtgtaaattctcaaactggaattatctttaccttacttggagctggaggtgaagaggaagagaagaaagatgagaagaaaaaggaaaagaaaaataagaaacaagatggagctattgagaatcgcaacaaagcaaaagcccaggatggtgcagccatggaaatgcagccattgaagagtgaagaaggtggagatggtgatgaaaaagataaaaagaaagcaaatttgccaaaaaaggaaaaatctgttttacaagggaaacttacaaaactggctgttcagattggcaaagcaggtctgttgatgtctgccatcacagttatcattctagtattatattttgtcattgacaccttctgggttcagaaaagaccatggcttgctgagtgcacaccaatttatatacaatactttgtgaagttcttcattattggagttacagttttagtggtcgcagtgccagaaggtcttccacttgcagtcacgatctcactggcttattcagtcaaaaaaatgatgaaagataataacttagtaaggcatctggatgcttgtgaaaccatgggaaatgctacagctatttgttcagataaaacaggaactttgacaatgaacagaatgacagtcgttcaagcttacataaatgaaaaacattataaaaaggttcctgaaccagaagctattccaccaaatattttgtcctatcttgtaacaggaatttctgtgaattgtgcttatacatcaaaaatattgccaccagagaaagagggtggattacctcgtcacgttggtaataaaactgaatgtgccttgttgggacttcttttggatttaaaacgggattatcaggatgttagaaatgaaataccagaagaagcactgtacaaagtctacaccttcaattctgttaggaagtccatgagtactgtcctgaaaaattcagatggaagttatcgaatattcagcaagggtgcatctgagataattctgaaaaagtgtttcaaaatcttgagtgctaatggtgaggcaaaagtattcagaccaagggaccgtgatgatattgtaaaaactgtgattgaaccgatggcatcagaaggcttgagaaccatatgtcttgcattcagagattttccagcaggagaaccagaaccagagtgggataatgaaaatgatattgtcaccggccttacatgcattgctgttgtggggattgaagatcctgtgagacctgaggtgccagatgcaattaaaaagtgtcagagggctggaattactgtgcggatggtcactggtgataatattaatactgctcgggccattgctaccaaatgtggtattttacatcctggggaagattttctgtgcctagaaggtaaagattttaacagaagaatacgaaatgaaaaaggagagattgagcaagagaggatagacaagatttggccaaaacttcgagtacttgcaagatcatctcctactgataagcatacactggttaaaggtataattgacagcactgtctcagaccaacgccaggttgtagctgtaactggtgatggtacaaatgatggcccagcactaaagaaagcagatgttggatttgcaatgggtattgctggaactgatgtagctaaagaagcatccgatattattctcacagatgacaactttacaagcattgttaaagcagttatgtggggacgaaatgtctatgacagcatctcaaaattccttcagttccaacttactgttaatgtagtagcagtgattgttgcttttacgggcgcctgcattactcaagactcaccgcttaaggctgtgcagatgctgtgggtaaacctcataatggatacactcgcttccctggctctggcaacggaaccacccactgagtctctcttgcttcggaaaccttatggtagaaataagcctctcatctcacgtacaatgatgaagaatattttgggtcatgcattctatcaacttgtagtagtctttacactcttatttgctggagaaaagttttttgacattgatagtggaagaaatgctcctttgcatgctcctccttcagaacattatactattgtttttaatacctttgtgctgatgcaacttttcaacgaaataaatgcccggaaaattcatggtgaaagaaatgtattcgaaggaatctttaacaatgccatcttctgcacaattgttttaggcacttttgtggtacagataataattgtgcagtttggtggaaaacctttcagttgttcagaactttcaatagaacagtggctatggtcaatattcctaggaatgggaacattactctggggccagcttatttcaacaattccaactagccgtttaaaattcctcaaagaagctggtcatggaacacaaaaggaagaaatacctgaggaggaattagcagaggatgttgaagagattgatcacgctgaaagggagttgcggcgtggccaaatcttgtggtttagaggtctgaacagaatccaaacacagatggatgtagtgaatgctttccagagtggaagttccattcagggggctctaaggcggcaaccctccatcgccagccagcatcatgatgtaacaaatatttctacccctacacatgtagtgttttcctcttctactgcttctactactgtggggtattcgagtggtgaatgcatttcgtagttctttatatgaagggttagaaaaaccggaatcaagaagttcgattcacaactttatgacacatcctgagtttaggatagaagattcagagcctcatatcccccttattgatgacactgatgccgaagatgatgctcctacaaaacgtaactccagtcctccaccctctcccaacaaaaataacaatgctgttgacagtggaattcaccttacaatagaaatgaacaagtctgctacctcttcatccccaggaagcccactacatagtttggaaacatcactctgattgtaagctgaatgttaacacactagctgcattgtaaagaaacaaattgaaactgggtcttttcacatattgtgatggacaagctagtattcttgtctttggacttcaacagaagacacacttgtacgaatgtagatttatttttttaaaaaaaaaaaagcaaagctttctgccagactgagggtgctttttggggggtgggagaaatgaactgacagataaacagtaactcagcgtaagtgacctgtggatcatcagtagtacccaagcatggtcctgaacagtgtattagcagagctttagtttatctcagtcctggatgggagagagagggaggagtaaaactgggcaagacaaagagccctggatcgttgaattgatagtttaatttctgctgttggctgttaataatttggattatttatgtttataaatgatacagatctgtttacaaggtttgtagatactttttttgttcctgttcatagatgggaagcttccttataactgatgcagagaaaaattagtccttcaaatactgctgtattttcaggaaaaaaaaaaaaaggggtgtttctattgaaactgtactaaatttttgcctacaatttaccttgttaaatattgtagataaattgctaatactaatagccaaatagataacactaatgctttgtttaaaaaaacgaaaaaaacaaaacaaaacaaaaaaacatgagcagtggtgttctaatgaagttatgacatctgtcctaattagtttcttaaatacatttactacttaatggttttgaagcaactgtttaatttttaaaatttttgaaaacttgctaataaccttttgttcagaatttagtagattgtttaatgcaggacatcaactacataatgaaagatgcttgaaatgcttttgttatttcaggcaaatcaaattaaatcagactatcaaactacaagagaaccttagtcttttttgtttttgtctaaacatgttagtttagtgatgtcttggtgaactgtgagtgaactgtattgatttttctaatctttagagaccttcacacagcatgagggctgttggcattttgaaaaaggttaataagtagaagcatacatgttttccttttgtttttgaaacttgtttgtaaacataaataaatatgcccttttattaaataaattcatggcaatgtttttttaaaagacatttcagcttctttactcagttctgcatatacagtgcatcagtctgttctctttgaccacaattggaatacatttcaagatggtaacagccccatgaagtaccgctttaattccttgctggtaatctaatagaatcagattaagaaaattaacacaattttaccatttgacatactcttcattgaatttagtttgtctaaaatagtctcacaggtaaaaaacataacaacaatgaccaccattgtctttgatacatttattttaattcttaagtggccaaataacagattaggtaaaatgagattacatgaaaaggttctaaaatgatatatttagatgcaataattaaccatatgctagaatgcccacctctaagccaattggattctttagctctctttttctttccttcatctaccttcttctcttttttgcctctgtctttaccctttagaaactggcatgtgttagggcccagatttcaccagatacacaatcctcaggctgacataaagtttacgaggactgctactataactgagagtgctgaccaagcaaagaaacatttagttgatggtgcttgatatttttggtgggtgggggaaatctttttctcaccatcaaatctttgcagtaatcctctgcaggtcttagaaacacattggctctgtcagcatttgtaattgtacatttattcatcaggtatttatagtgaatcatactgtaaaaaagaggtagcatgatatgctggaaagcatattagactaggagtcaagacctggtttctagtcttggttttgccattaatgtgctgcatgatcttgggaaaatcatttaccctaaataagggtggtggactatcttgaagaaccctttcaactctaaaaattgaccctatcaactggagagcccacaaggcatagggaatagagaaaagggaaatgttttcagttttcttttttattttggttatgcttaaatatgaatgtaattaccaaaagatttagaagtgcatgtgctttggaggatttgtattgagcttttacagtattcatttttcaactcaaggcaatggctttctacaccaactctaatccataaacgggtcttatgacatctatgaagtagtagcaagacatgcttagtgtgtatttctctctttgagacactgtaatttctaccagaaatttccagagcattatgtaggtagaaaaaaatgcaagcaagctgttaaagatcttggatcccattatatagtatgtatagctgaaatctgtaattcaatcactttttctcttttatcctctaaccaaaaaattgtttaattttgcatcccaaatgtttttaatctttgtatattttttaaaaatccttttctcctcatcattgccttttttgtggttgtaaatagacttacttgcactttgaagatgagttactccttgtcatcttacaaatatgtgatatggtaattttcataacagatgtcagttttgaaccaagaattggtgatttgtttataagaaaaaaactggcttcatttctgtgaaattgctctttgaaaatttctttttacacgtgtaagccaactgagataccgtgatggtgttgatttctttcaatgatgcttaccatctattttagccactgagccttttattatttgtctatttgtaaagtttatttgtcttaactcatttaataaatatactgtttatctgtttctgaaaaaaaaaaaaaaaaaaa

SEQ ID NO: 338 - DNA, 412 bp, HOMO SAPIENS
gtcactcttatgtgtcatcaccaaaaagcatcaccaaaaagcattaccctcttgaactgctcaagctgctctgtgagctcctccaccgcctgtgcgtgtttctgcctcatctcctggacctgagcctcatgggaccgcgtctcttcatccagggccttcttcagcaccgtcacctcctgctccctcttggcccttggtgggaggaacacagtgaatggcagttgggtggagacagagggtcatctcagtgccgtgcaaaagaatgagagctcttccaggacccagagctgcagtcctcatcaccacccctctctagctgtgtgaccttgggtcattcacctaacatctctggacctaaaatttcctcagctgcaaaatgtggagcatatcacctgcctaggacatctgtaat

SEQ ID NO: 339 - DNA, 2485 bp, HOMO SAPIENS
agtgcaacccagagggcaggatttcctgctggactttgaaatccaacccggtcacctacccgcgcgactgtgtccacggatggcacgaaagccaagcgagtccccctgccgagctactcgcgtccgcctcctcccaagctgagctctgctccgcccacctgagtccttcgccagttaggaggaaacacagccgcttaatgaactgctgcatcgggctgggagagaaagctcgcgggtcccaccgggcctcctacccaagtctcagcgcgcttttcaccgaggcctcaattctgggatttggcagctttgctgtgaaagcccaatggacagaggactgcagaaaatcaacctatcctccttcaggaccaactgtcttccctgctgttataaggtacagaggtgcagttccatggtacaccataaatcttgacttaccaccctacaaaagatggcatgaattgatgcttgacaaggcaccagtgcctggcctacttggcaactttcctggcccttttgaagaggaaatgaagggtattgccgctgttactgatatacctttaggagagattatttcattcaatattttttatgaattatttaccatttgtacttcaatagtagcagaagacaaaaaaggtcatctaatacatgggagaaacatggattttggagtatttcttgggtggaacataaataatgatacctgggtcataactgagcaactaaaacctttaacagtgaatttggatttccaaagaaacaacaaaactgtcttcaaggcttcaagctttgctggctatgtgggcatgttaacaggattcaaaccaggactgttcagtcttacactgaatgaacgtttcagtataaatggtggttatctgggtattctagaatggattctgggaaagaaagatgtcatgtggatagggttcctcactagaacagttctggaaaatagcacaagttatgaagaagccaagaatttattgaccaagaccaagatattggccccagcctactttatcctgggaggcaaccagtctggggaaggttgtgtgattacacgagacagaaaggaatcattggatgtatatgaactcgatgctaagcagggtagatggtatgtggtacaaacaaattatgaccgttggaaacatcccttcttccttgatgatcgcagaacgcctgcaaagatgtgtctgaaccgcaccagccaagagaatatctcatttgaaaccatgtatgatgtcctgtcaacaaaacctgtcctcaacaagctgaccgtatacacaaccttgatagatgttaccaaaggtcaattcgaaacttacctgcgggactgccctgacccttgtataggttggtgagcacacgtctggcctacagaatgcggcctctgagacatgaagacaccatctccatgtgaccgaacactgcagctgtctgaccttccaaagactaagactcgcggcaggttctctttgagtcaatagcttgtcttcgtccatctgttgacaaatgacagatcttttttttttccccctatcagttgatttttcttatttacagataacttctttaggggaagtaaaacagtcatctagaattcactgagttttgtttcactttgacatttggggatctggtgggcagtcgaaccatggtgaactccacctccgtggaataaatggagattcagcgtgggtgttgaatccagcacgtctgtgtgagtaacgggacagtaaacactccacattcttcagtttttcacttctacctacatatttgtatgtttttctgtataacagccttttccttctggttctaactgctgttaaaattaatatatcattatctttgctgttattgacagcgatataattttattacatatgattagagggatgagacagacattcacctgtatatttcttttaatgggcacaaaatgggcccttgcctctaaatagcactttttggggttcaagaagtaatcagtatgcaaagcaatcttttatacaataattgaagtgttccctttttcataattactctacttcccagtaaccctaaggaagttgctaacttaaaaaactgcatcccacgttctgttaatttagtaaataaacaagtcaaagacttgtggaaaataggaagtgaacccatattttaaattctcataagtagcattcatgtaataaacaggtttttagtttgttcttcagattgatagggagttttaaagaaattttagtagttactaaaattatgttactgtatttttcagaaatcaaactgcttatgaaaagtactaatagaacttgttaacctttctaaccttcacgattaactgtgaaatgtacgtcatttgtgcaagaccgtttgtccacttcattttgtataatcacagttgtgttcctgacactcaataaacagtcactggaaagagtgccagtcagcagtcatgcacgctgattgggtgtgt

SEQ ID NO: 340 - DNA, 491 bp, HOMO SAPIENS
tgtacatggtcctgtgataccctaccttgttttaacctgagtgactctctcctagcggagagagagccggacagactccattttagtttcttcacgtgcagccccctttaccttccacccttaattgcataactagtataaactgactcaaagcaggtccagaatgcacttactgataagatattgaggcaagctgcaccagctgctcctgggtacgcactcggtgaatgtcacgcaaaacccctgcatttctctctttgtgatagtttaagcccctgcacctggaactgtttatttgttttgtaactgctattgtaaccaattaatattttaactatttgccagctctgcttctgtaaaacttgtttcagctaaactcccccctcccctatttagaccacggtataaaaacaaaaccagccccttcctcggggccaagagaattttgagcattacatgcctctcggttgccggctaataaagcactcctt

SEQ ID NO: 341 - DNA, 2978 bp, HOMO SAPIENS
cgtcctatctgcagtcggctactttcagtggcagaagaggccacatctgcttcctgtaggccctctgggcagaagcatgcgctggtgtctcctcctgatctgggcccaggggctgaggcaggctcccctcgcctcaggaatgatgacaggcacaatagaaacaacggggaacatttctgcagagaaaggtggctctatcatcttacaatgtcacctctcctccaccacggcacaagtgacccaggtcaactgggagcagcaggaccagcttctggccatttgtaatgctgacttggggtggcacatctccccatccttcaaggatcgagtggccccaggtcccggcctgggcctcaccctccagtcgctgaccgtgaacgatacaggggagtacttctgcatctatcacacctaccctgatgggacgtacactgggagaatcttcctggaggtcctagaaagctcagtggctgagcacggtgccaggttccagattccattgcttggagccatggccgcgacgctggtggtcatctgcacagcagtcatcgtggtggtcgcgttgactagaaagaagaaagccctcagaatccattctgtggaaggtgacctcaggagaaaatcagctggacaggaggaatggagccccagtgctccctcacccccaggaagctgtgtccaggcagaagctgcacctgctgggctctgtggagagcagcggggagaggactgtgccgagctgcatgactacttcaatgtcctgagttacagaagcctgggtaactgcagcttcttcacagagactggttagcaaccagaggcatcttctggaagatacacttttgtctttgctattatagatgaatatataagcagctgtactctccatcagtgctgcgtgtgtgtgtgtgtgtgtatgtgtgtgtgtgttcagttgagtgaataaatgtcatcctcttctccatcttcatttccttggccttttcgttctattccattttgcattatggcaggcctagggtgagtaacgtggatcttgatcataaatgcaaaattaaaaaatatcttgacctggttttaaatctggcagtttgagcagatcctatgtctctgagagacacattcctcataatggccagcattttgggctacaaggttttgtggttgatgatgaggatggcatgactgcagagccatcctcatctcattttttcacgtcattttcagtaactttcactcattcaaaggcaggttataagtaagtcctggtagcagcctctatggggagatttgagagtgactaaatcttggtatctgccctcaagaacttacagttaaatggggagacaatgttgtcatgaaaaggtattatagtaaggagagaaggagacatacacaggccttcaggaagagacgacagtttggggtgaggtagttggcataggcttatctgtgatgaagtggcctgggagcaccaaggggatgttgaggctagtctgggaggagcaggagttttgtctagggaacttgtaggaaattcttggagctgaaagtcccacaaagaaggccctggcaccaagggagtcagcaaacttcagattttattctctgggcaggcatttcaagtttccttttgctgtgacatactcatccattagacagcctgatacaggcctgtagcctcttccggccgtgtgtgctggggaagccccaggaaacgcacatgcccacacagggagccaagtcgtagcatttgggccttgatctaccttttctgcatcaatacactcttgagcctttgaaaaaagaacgtttcccactaaaaagaaaatgtggatttttaaaatagggactcttcctaggggaaaaaggggggctgggagtgatagagggtttaaaaaataaacaccttcaaactaacttcttcgaacccttttattcactccctgacgactttgtgctggggttggggtaactgaaccgcttatttctgtttaattgcattcaggctggatcttagaagacttttatccttccaccatctctctcagaggaatgagcggggaggttggatttactggtgactgattttctttcatgggccaaggaactgaaagagaatgtgaagcaaggttgtgtcttgcgcatggttaaaaataaagcattgtcctgcttcctaagacttagactggggttgacaattgttttagcaacaagacaattcaactatttctcctaggatttttattattattattttttcacttttctaccaaatgggttacataggaagaatgaactgaaatctgtccagagctccaagtcctttggaagaaagattagatgaacgtaaaaatgttgttgtttgctgtggcagtttacagcatttttcttgcaaaattagtgcaaatctgttggaaatagaacacaattcacaaattggaagtgaactaaaatgtaatgacgaaaagggagtagtgttttgatttggaggaggtgtatattcggcagaggttggactgagagttgggtgttatttaacataattatggtaattgggaaacatttataaacactattgggatggtgataaaatacaaaagggcctatagatgttagaaatgggtcaggttactgaaatgggattcaatttgaaaaaaatttttttaaatagaactcactgaactagattctcctctgagaaccagagaagaccatttcatagttggattcctggagacatgcgctatccaccacgtagccactttccacatgtggccatcaaccacttaagatggggttagtttaaatcaagatgtgctgttataattggtataagcataaaatcacactagattctggagatttaatatgaataataagaatactatttcagtagttttggtatattgtgtgtcaaaaatgataatattttggatgtattgggtgaaataaaatattaacattaaaaaaaaaaa

SEQ ID NO: 342 - DNA, 1582 bp, HOMO SAPIENS
gcttaggctgagccgtggccgccacagcccatcgtaatgccgcatggtgcttggcactccagagagccaataggaatgaaagaattcatttgaatcggccaatgccggcgggttagggggcgggggttgaaaaccctataaaggcgtcgatcggccggacaggcggcagcggcggctcctgcagcggtggtcggctgttgggtgtggagtttcccagcgcccctcgggtccgaccctttgagcgttctgctccggcgccagcctacctcgctcctcggcgccatgaccacaaccaccaccttcaagggagtcgaccccaacagcaggaatagctcccgagttttgcggcctccaggtggtggatccaatttttcattaggttttgatgaaccaacagaacaacctgtgaggaagaacaaaatggcctctaatatctttgggacacctgaagaaaatcaagcttcttgggccaagtcagcaggtgccaagtctagtggtggcagggaagacttggagtcatctggactgcagagaaggaactcctctgaagcaagctccggagacttcttagatctgaagaaaatgtggacacagacttgccaggcagcctggggcagagtgaagagaagcccgtgcctgctgcgcctgtgcccagcccggtggccccggccccagtgccatccagaagaaatccccctggcggcaagtccagcctcgtcttgggttagctctgactgtcctgaacgctgtcgttctgtctgtttcctccatgcttgtgaactgcacaacttgagcctgactgtacatctcttggatttgtttcattaaaaagaagcactttatgtactgctgtcttttttttttttcttttgaagaacaggtttctctctgtccttgactcttgggtctgtgggccatggcatgagtgttttctagtagtagattggagggaaagctttgtgacacttagtactgtgtttttaagaagaaataatttggttccagatgtgttagaggatcttttgtactgaggtttttaacactttacttgggtttaccaagcctcaactggacagaccataaacagtccacaggcaccgttcctgccaggccccaacccacagggagtctctccgcagagccttcttggtgttgccctaacttgccagtggcctttgctcagagcctcctcctgtgacatgtgaacaatgaagaggcctgcgcctcctgccttgccgcctgcaaagcaaagaaactgccttttattttttaaccttaaaaagtagccagatagtaacaagactggctggctgatgagcaaagcctttgctctcacgcagaggaaggcttggatgtacaatgaaactgcctggaactaaaagcagtgaagcaagggaggcaatcacactgaagcgggtcttcctccaggaacggggtcccacaggcgtgttgttttaaataacctgatgctgtgtgcatgatgctggtgcttgaccatgaaaggaaagtctcatccttaaaatgtgttgtacttcacaatcctggactgttgcttcaagtaaacaatatccacattttgaaa

SEQ ID NO: 343 - DNA, 511 bp, HOMO SAPIENS
cactctgtatctatctgctctggtggggccttggagaacctttgtgtggatactctgtatctaatctgatggggacgtggagaacctttgtatccagctcagggattgtaaacgcaccaatcagcgccctgtcaaaacagaccactgggctgtaccaatcagccggacgtgggtggggccagataagagaatgaaaccagggcttgggacctgcagcccgccatgcctgagcctcccacaccccctccatgggctcctgtgcggcccgagcctcctcgacgagcgccaccccctgctccacggcacccagtcccatcagccctcactcactcttggcacctcctctgcccgggctcccactttggtggcacttgaggagcgcttcagcccaccgctgcactgtgggagcccctttctgggctggccaaggccagagccggctccctcagcttccacactgtggaagctttgttcttttgctctttgcaataaatcttgctactgctcaaaa

SEQ ID NO: 344 - DNA, 3766 bp, HOMO SAPIENS
ggcggtcgcgcgcaggactcgagggcttctagccaccgtccccgccagcgccgcgccccgccacagggcggcatgagcccacccgcggccgcagccctagcgccctgctcctccgcctgggcggcccggctgcggtgacggctctcgctgcccgactgggggccatgaagccgagtccggccgggacggcgaaggagctggagcctccggcgccggcccgaggcgagcagcgcacggcggagcccgaggggcgctggcgggagaagggcgaggcagacaccgagcggcagcgcacccgggagcggcaggaggccacgctggccgggctggcggagctggagtacctgcgccagcgccaagagctgctggtcaggggcgccctgcgcggcgccgggggtgcgggagccgctgcgccccgcgctggggagctactgggggaggcggcgcagcgcagtcgcctggaggagaagttcttggaggagaacatcttgctgctaagaaagcaattgaactgtttgaggcgaagagatgctggtttgttgaatcagttgcaagagcttgacaagcagataagtgacctgagactggatgtagaaaagacatctgaagagcacctggagacagacagtcggcctagctcagggttttatgagctgagtgatggggcttcaggatccctttccaattcctctaactcggtgttcagtgagtgtttatccagttgtcattccagcacctgcttttgcagccccttggaggcgaccttgagtctctcagatggttgccccaaatctgcagatgtgaatcccaagtaccagtgtgatctggtgtctaaaaacgggaatgatgtatatcgctatcccagtccacttcatgctgtggctgtgcagagcccaatgtttctcctttgtctgacgggcaaccctctgagggaagaggacaggcttggaaaccatgccagtgacatttgcggtggatctgagctagatgccgtcaaaacagacagttccttaccgtccccaagcagtctgtggtctgcttcccatccttcatccagcaagaaaatggatggctacattctgagcctggtccagaaaaaaacacaccctgtaaggaccaacaaaccaagaaccagcgtgaacgctgaccccacgaaagggcttctgaggaacgggagcgtttgtgtcagagccccgggcggtgtctcacagggcaacagtgtgaaccttaagaattcgaaacaggcgtgtctgccctctggcgggataccttctctgaacaatgggacattctccccaccgaagcagtggtcgaaagaatcaaaggccgaacaagccgaaagcaagagggtgcccctgccagagggctgcccctcaggcgctgcctccgaccttcagagtaagcacctgccaaaaacggccaagccagcctcgcaagaacatgctcggtgttccgccattgggacaggggagtcccctaaggaaagcgctcagctctcaggggcctctccaaaagagagtcctagcagaggccctgccccgccgcaggagaacaaagttgtacagcccctgaaaaagatgtcacagaaaaacagcctgcagggcgtccccccggccactcctcccctgctgtctacagctttccccgtggaagagaggcctgccttggatttcaagagcgagggctcttcccaaagcctggaggaagcgcacctggtcaaggcccagtttatcccggggcagcagcccagtgtcaggctccaccggggccacaggaacatgggcgtcgtgaagaactccagcctgaagcaccgcggcccagccctccaggggctggagaacggcttgcccaccgtcagggagaaaacgcgggccgggagcaagaagtgtcgcttcccagatgacttggatacaaataagaaactcaagaaagcctcctccaaggggaggaagagtgggggcgggcccgaggctggtgttcccggcaggcccgcgggcgggggccacagggcggggagcagggcgcatggccacggacgggaggcggtggtggccaaacctaagcacaagcgaactgactaccggcggtggaagtcctcggccgagatttcctacgaagaggccctgaggagggcccggcgcggtcgccgggagaatgtggggctgtaccccgcgcctgtgcctctgccctacgccagcccctacgcctacgtggctagcgactccgagtactcggccgagtgcgagtccctgttccactccaccgtggtggacaccagtgaggacgagcagagcaattacaccaccaactgcttcggggacagcgagtcgagtgtgagcgagggcgagttcgtgggggagagcacaaccaccagcgactctgaagaaagcgggggcttaatttggtcccagtttgtccagactctgcccattcaaacggtaacggccccagaccttcacaaccaccccgcaaaaacctttgtcaaaattaaggcctcacataacctcaagaagaagatcctccgctttcggtctggctctttgaaactgatgacgacggtttgagtgacatcattggtgtagaaagtttgtgtgtttttttttcttctccctagttgccaaaattaaaaaggtggtgttttcatttttgtataatactttaatggaatgctttttaaaaaaatataaaaccaaggtaaattattgtttcatcttcacgtatggatgctagtgcctttaatggaaggtaaagaatgttttgctagttagaagtacatattgaggttttaatggtggtgatagtgagttttgtggcaccagctgttttttattttaaactttctgagcatccggcaaggtacaggttttgatgttcaagttttattgggataagatcttttgatcccaaggtcaggtggatggaatttttggatttatatttgttccttgagtcttcagggcagtgtctccatgagggttttcctgttgaggggcaccacatacaatagtgtgaagtaggtatgaggggcagtcattgtattctatagtttttttatgtagtctacatttctcagatgtatccccattcggttttattctcagaactgttactagactcatgacttggaggccaaaccttaaatccagagatagcagcctcgatagggaccttaaaaggattcacaaaaacttttgccacacttggtgcctaggccctgttcctaataaccccttctagggccgtttatccaacatttagatgccttcttttccctccctaatttgtagccagtccaacctttcattccttggaggatttagttttgggataaaattttggtccttgggcacagagacattcactattaatgaagtaacccttgggcatgactccaatcccagaattgctcactgagcgctatgccaccgaagcgttgacctgaacatattagtgcaatccagtccagattggacctttgatcctatgtggaagggctgttttttaagaaaaaatttttggtaaacagtattgtgtaaaattgctttttgtataccaatatatgcatgttttgtgcatgagtagtacttgtgttgatactcctgttgatgttaaattactatataatataaacagtatgtgtttttatatatcattgtgtaaatttaatataacatatgcagtaataaaccatttgttttactgctgttaagtttgttatttgggtataaaaccagatgtttacacctgtaaaaaaaaaaaaaaaaaa

SEQ ID NO: 345 - DNA, 2668 bp, HOMO SAPIENS
ctctctggataggaagaaatatagtagaaccctttgaaaatggatattttcacatattttcgttcagatacaaaagctggcagttactgaaataaggacttgaagttccttcctcttttttttatgtcttaagagcaggaaataaagagacagctgaaggtgtagccttgaccaactgaaagggaaatcttcatcctctgaaaaaacatatgtgattctcaaaaaacgcatctggaaaattgataaagaagcgattctgtagattctcccagcgctgttgggctctcaattccttctgtgaaggacaacatatggtgatggggaaatcagaagctttgagaccctctacacctggatatgaatcccccttctaatacttaccagaaatgaaggggatactcagggcagagttctgaatctcaaaacactctactctggcaaaggaatgaagttattggagtgatgacaggaacacgggagaacaatgctctgtttgggctggatatttctttggcttgttgcaggagagcgaattaaaggatttaatatttcaggttgttccacaaaaaaactcctttggacatattctacaaggagtgaagaggaatttgtcttattttgtgatttaccagagccacagaaatcacatttctgccacagaaatcgactctcaccaaaacaagtccctgagcacctgcccttcatgggtagtaacgacctatctgatgtccaatggtaccaacaaccttcgaatggagatccattagaggacattaggaaaagctatcctcacatcattcaggacaaatgtacccttcactttttgaccccaggggtgaataattctgggtcatatatttgtagacccaagatgattaagagcccctatgatgtagcctgttgtgtcaagatgattttagaagttaagccccagacaaatgcatcctgtgagtattccgcatcacataagcaagacctacttcttgggagcactggctctatttcttgccccagtctcagctgccaaagtgatgcacaaagtccagcggtaacctggtacaagaatggaaaactcctctctgtggaaaggagcaaccgaatcgtagtggatgaagtttatgactatcaccagggcacatatgtatgtgattacactcagtcggatactgtgagttcgtggacagtcagagctgttgttcaagtgagaaccattgtgggagacactaaactcaaaccagatattctggatcctgtcgaggacacactggaagtagaacttggaaagcctttaactattagctgcaaagcacgatttggctttgaaagggtctttaaccctgtcataaaatggtacatcaaagattctgacctagagtgggaagtctcagtacctgaggcgaaaagtattaaatccactttaaaggatgaaatcattgagcgtaatatcatcttggaaaaagtcactcagcgtgatcttcgcaggaagtttgtttgctttgtccagaactccattggaaacacaacccagtccgtccaactgaaagaaaagagaggagtggtgctcctgtacatcctgcttggcaccatcgggaccctggtggccgtgctggcggcgagtgccctcctctacaggcactggattgaaatagtgctgctgtaccggacctaccagagcaaggatcagacgcttggggataaaaaggattttgatgctttcgtatcctatgcaaaatggagctcttttccaagtgaggccacttcatctctgagtgaagaacacttggccctgagcctatttcctgatgttttagaaaacaaatatggatatagcctgtgtttgcttgaaagagatgtggctccaggaggagtgtatgcagaagacattgtgagcattattaagagaagcagaagaggaatatttatcttgagccccaactatgtcaatggacccagtatctttgaactacaagcagcagtgaatcttgccttggatgatcaaacactgaaactcattttaattaagttctgttacttccaagagccagagtctctacctcatctcgtgaaaaaagctctcagggttttgcccacagttacttggagaggcttaaaatcagttcctcccaattctaggttctgggccaaaatgcgctaccacatgcctgtgaaaaactctcagggattcacgtggaaccagctcagaattacctctaggatttttcagtggaaaggactcagtagaacagaaaccactgggaggagctcccagcctaaggaatggtgaaatgagccctggagccccctccagtccagtccctgggatagagatgttgctggacagaactcacagctctgtgtgtgtgtgttcaggctgataggaaattcaaagagtctcctgccagcaccaagcaagcttgatggacaatggagtgggattgagactgtggtttagagcctttgatttcctggactggactgacggcgagtgaattctctagaccttgggtactttcagtacacaacacccctaagatttcccagtggtccgagcagaatcagaaaatacagctacttctgccttatggctagggaactgtcatgtctaccatgtattgtacatatgactttatgtatacttgcaatcaaataaatattattttattagaaa

SEQ ID NO: 346 - DNA, 1017 bp, HOMO SAPIENS
cggcgtctgcgcagctgccagcgcctttaagcccgggctcgcgctctcggaccgtgctttcgccgcctgggagccgtccggcgcagcagtttctaggtccccactgtccccgccgtcccgccccttcgcgtcccgggaaccggctggcttccgagccgcactcgccgatcctccaggcatgccccgctacgagctggctttaatcctgaaagccatgcagcggccagagactgctgctactttgaaacgtacgatagaggccctgatggacagaggagcaatagtgagggacttggaaaacctgggtgaacgagcgcttccttataggatctctgcccacagtcagcagcacaacagaggcgggtatttcttggtggatttttatgcacccaccgcagctgttgaaagcatggtggagcacttgtctcgagatatagatgtgattagagggaatattgtcaaacaccctctgacccaggaactaaaagaatgtgaagggattgtcccagtcccactcgcagaaaaattatattccacaaagaagaggaagaagtgagaagattcgccagattttagccttatatgtaattccttcacatttgggcagcatggacgagaaggaagaatttgcaagtttggcctttatataagcatgtgttgcaggtgctgtttgatttttctaaggtatttttagcccttgatcccctttgcttgcgagaggtggggaactgctcactgacagcttctctgtaacctgcagtaccagtggatcgttcttgattttgttttcattagtgtcatttctttgtcattgaggacttttccccttacaacagtaacaccattttttgaagagcaaaacttataatacctcctgggattgtgagctagtcattcagcctgtgtaaccatgtggaaataaaaattgacgaccaatgtattatatggacaacttttgctttgagtaataaacttgattgtaggaatgtgaaaaaaaaaaaaaaaaaaaaaaaaaaa

SEQ ID NO: 347 - DNA, 2477 bp, HOMO SAPIENS
gcagaggtgcggccggggaggcgcgcggaggctggagctggaggcgcggcgccggtgagctgagaaccatgtgtgctcagtattgcatctcctttgctgatgttgaaaaagctcatatcaacattcgagattctatccacctcacaccagtgctaacaagctccattttgaatcaactaacagggcgcaatcttttcttcaaatgtgaactcttccagaaaacaggatcttttaagattcgtggtgctctcaatgccgtcagaagcttggttcctgatgctttagaaaggaagccgaaagctgttgttactcacagcagtggaaaccatggccaggctctcacctatgctgccaaattggaaggaattcctgcttatattgtggtgccccagacagctccagactgtaaaaaacttgcaatacaagcctacggagcgtcaattgtatactgtgaacctagtgatgagtccagagaaaatgttgcaaaaagagttacagaagaaacagaaggcatcatggtacatcccaaccaggagcctgcagtgatagctggacaagggacaattgccctggaagtgctgaaccaggttcctttggtggatgcactggtggtacctgtaggtggaggaggaatgcttgctggaatagcaattacagttaaggctctgaaacctagtgtgaaggtatatgctgctgaaccctcaaatgcagatgactgctaccagtccaagctgaaggggaaactgatgcccaatctttatcctccagaaaccatagcagatggtgtcaaatccagcattggcttgaacacctggcctattatcagggaccttgtggatgatatcttcactgtcacagaggatgaaattaagtgtgcaacccagctggtgtgggagaggatgaaactactcattgaacctacagctggtgttggagtggctgctgtgctgtctcaacattttcaaactgtttccccagaagtaaagaacatttgtattgtgctcagtggtggaaatgtagacttaacctcctccataacttgggtgaagcaggctgaaaggccagcttcttatcagtctgtttctgtttaatttacagaaaaggaaatggtgggaattcagtgtctttagatactgaagacattttgtttcctagtattgtcaactcttagttatcagattcttaatggagagtggctatttcattaagatttaatagttttttttggactaagtagtggaaaaacttttatacttaactgagacattttgtcaaggctaaaaaaaagtcttgcaaaatggggcagtggactgacaggctgacatagaaaataaactttgcccaatcacaacttgtgcctcccatccctggagtactgactggcaccggtaagacagaatctctctgaatccattactccatgcccccttgaggcactgttgaagaaatctcacttttcagccagggtactggttctggtacatatggatcataagtccatttggggaagactcgtttatacaggttcatcagtactgtgtcttgagattttagcttcccatcaaagctgcatttcatgtggccatgggtacctagaaagacatcagaacaagtcggtcaaattaaaagtagaaaattttaaagcaatgacttccaacccaacagtcatttagcaacactgcagaaatgcagacatggtctcaaatcccgtgtttccttacctaaaggttccttgatatgtcctctccggccccacttcgttctcagttccactggtttaaaccacagcacatcctcttagaatcaaacacattaaagaccaagatgaaacatttacccacaaaatgtaaacccaacctttataccacaaaggcaatcagatcccatcctcctccttcatacccacctctgttgaagaacatgtaacgtactactgccatcttagtaaaaattttgaaaggatgaccactcagaacaactctcttgatgaccattctgtctggatctactgacataagatggcctgtagcaatgaggctgtgcattcctaaaggacaaaagcaaagaagctatttaggaatttacaggccaaagtcttcatttattgcccagtccatttaaagacccatgcaagagcctggtttgtcatccctgccctagcccaatctgaggctaagattggtaaactgtaagcccacacttaaccttgtcaataggttcttgaaaacttgtacttcaagagaaatgatgtataacaaaaccatactttttctcatcagttgttacaaggaaaggatgttgaacaaaaggcagttatttgaggactggctatacactgtttcacgtaaaagttggagttttcattgttctattaacaatgttaaatgaagacttactgtattttgaaaaccatcattaccttctccataccatttggctcccaaatttaaataaacaagagaaaacggtgttcatct

SEQ ID NO: 348 - DNA, 2300 bp, HOMO SAPIENS
cacttccgggacggtgttccggcccattccggcccatttccacccccggagctctcacccctccagtgccgacggtagcgaaagactttcctccaggggcttcctcactggggaattgccggaaagagcaaacaaaaaaggcgctggtgtaggctccaaaataaacacatctgaattcatgatggcatcgacagaggctcttattggattaaaagtttcaaaacaaacaataacgctttggaaaaagcagggttgaatgcaccctcaggcacgaccatggagaaaggtgggaacatacaattggagattcctgacttcagcaactctgtcctgagccatctaaaccagttgcgcatgcagggccgtctctgtgatattgtggtcaatgtgcaaggacaagcttttcgggctcacaaagtggtgctggctgccagctccccctatttccgggatcacatgtccttgaatgagatgagtacagtctccatttcagtcatcaagaaccctactgtttttgaacagctcctttctttctgttacacagggcggatatgcctgcaactggcagatatcatcagctacctaacagctgccagttttctgcaaatgcagcatattatagacaaatgtacacagatcctggagggcattcatttcaaaattaatgtggctgaggttgaagcagaattaagtcaaacaaggacaaagcatcaagagagacctccagagtctcacagggttacaccaaatctcaaccgctcccttagcccacgacataataccccaaagggaaaccggcgaggtcaggttagtgctgtgctggatatcagagagctaagtcctcctgaggagtccaccagccctcagatcattgaaccaagttctgatgtagagagccgggagcccattcttcggatcaaccgagcaggacagtggtatgtggagacaggagtggcggaccgtgggggtcggagtgatgatgaagttagagttcttggagcagtacacatcaaaactgaaaatctggaggagtggcttgggcctgagaatcagccttctggagaagatgggagtagtgcagaggaagtaacagccatggtgattgataccacaggccatggttctgtaggacaggaaaattatactttagggtcttcaggagccaaggtggctcggccaacaagcagtgaagttgacagatttagcccctccggcagtgttgttcccttgacagagagacacagagccagaagtgagtctcctgggagaatggatgagcctaagcaacccagctcccaggtagaagagtcagcaatgatgggagtaagtggctatgtggagtatctccgagagcaggaagtatctgagcggtggttccggtacaaccctcgtctcacctgcatctattgcgccaaatctttcaaccagaagggaagcctggaccgccacatgcgcctacacatggggatcacaccattcgtctgccgcatgtgtggcaagaagtatacccggaaagatcagctggagtatcatatccgcaagcacacaggcaacaagccctttcactgtcatgtctgtggcaaaagtttccccttccaggccatcttgaatcagcactttcgcaaaaaccaccctggctgtatacccctggaggggcctcacagcatctcccctgaaacaactgtcacatctcgaggacaagctgaggaagagtcaccttcacaggaagagacagttgctcctggggaagctgtccagggctctgtgtccaccactgggccagactgaaacatccagggggagggggctgaccctcttcccctatgagccataagcagccagcatcagagccatgggctgatacttagattcacaaaatgccacatcactaggccagaagatgctcccaagatgttgccaaactggaggatcagcaacttacacaaaagcactaaaggctcctcccttcttattgcccgcctcacactttggaaaataatcaagcaaatcaactttctaattcagggatcaacagccttggtttgttaactttataagaaaaaaggttttttaacaaaacgatgatgataaatggtcatttatctatcagtcatgtttgaacactgtactttggtccatatcatcttggtggctataattgcccggatctaaaaaatgcagcaggagcctcaaccatccgaagcagccaaccgcaagagaggaggtagtcatgatggtgatgaggaggagaaatttctcctcttccttccctggcataacatgcatttttgtgtttcaag

SEQ ID NO: 349 - DNA, 7802 bp, HOMO SAPIENS
ctccccgccagtccgggcgaacgcggccgggcccttggggaccgagtctcggcgccgccggggaacgggcgcgggccgcgccacagccggagcggggcagggccccgccaccgccttcttccgccggccccgccgccggccatgcattcttccggctcctctgactcccaaagccccggctggggcccggccagcccgagaaagacaggacggagtccagtgtgagaatggctataactttggaagaagctccgtggctgggctggctcttggtgaaagcactgatgaggtttgccttcatggtcgtcaacaacctggttgctattccatcctacatctgctatgtaattatacttcagccccttcgagtgctggacagtaagcggttctggtatatcgaaggaatcatgtataaatggcttttaggaatggtagcttcctggggatggtatgctggatatacagtgatggaatggggagaagatattaaagcagtttcaaaagatgaagcagtgatgttggtgaatcatcaggcaacaggagatgtgtgcacactgatgatgtgcctccaggacaaaggactggttgttgctcagatgatgtggttgatggatcatatttttaagtacacaaactttggaattgtttctctagttcatggagacttctttataagacagggaagatcttatcgtgaccaacagctgctgcttctcaagaagcacttagaaaataattacaggagcagagatcgaaaatggattgttttgtttccagaagggggcttcctcaggaagaggcgagaaacaagtcaggcatttgccaagaaaaataacttgccatttcttacaaatgttactctgccaaggtctggggcaacaaaaattattttgaatgcacttgtagcacaacagaaaaatggaagtccagcaggaggagatgctaaagaattagacagcaaatcaaaaggcctccagtggataatagatacaacgatagcttatcccaaagctgaacctatagatattcaaacctggatccttggatacaggaaaccaacagtcacacatgtacattacaggatctttccaattaaagatgtacccctggagactgatgaccttaccacttggctctatcagcggtttgttgaaaaagaagacctcttatcacatttttatgaaacaggagcttttccaccttccaagggccataaggaagctgtttccagggagatgaccctcagcaacttgtggatatttctcatacagtcttttgcatttttgtcaggctatatgtggtacaacatcattcagtatttttaccattgcctgttttaggaattgacgtggacttgtcaaggtcaccgtaggagttcagactttctttcataagtgtgcattattttacatgtgcaaatcagaatatatttaaaaaaaagcaaaagaaattcaatggatggattaatatttatccccctttgggatattttaaaatctactaaaatgaggattagtaatataatgacctgctaatatattttaagaacatgttttaaaaagatacactctatcacatatttaagcaaacatcacatttggagaagaggaaatcataaaatcatcctagaagactatctgagagaaattctgttgccaccagttatacttgacaatttagttgaagctcagaaagttatattcatccctcttagctgtagtctatattagggcagttctctagaacgcccacatttccaccaactcagtaaacttgaggggagctggttggcacctcgtgaagaactctttccctgtcgtttgcagtaacaaactccagtctgttgcagtaacaaactccagtctgttgcagtaacaaactctagaatattgacattctctgtgggggaaaagcagtgtccactggaccccttctggtactggatgtgttctttacaaaggctagctcagtccaacactgtgtttacatacactcgtgcttttccttatctgacttctcattttgtatcagaggcatatcataaattgataattttgcaaaatgcacttttttgagatgcagatatagcaaaggattagtaatatagcctgaaaacaaatgggagcatagcagtgtgtgaggttctcgagaactgtcttgtctctgtgtgtttatttgcctgccagtgctctccagcgccatcctgccctggacaccaccctgacgtgatgcctctattgcagctcagaggctttattttttccattttgacattggcactaaatgcatttggggatggttaaaacaaattactatagaacatttaaatgatcagtttaaggggaaataggctagtttatagaaaaataagagctagtggcttataatggtgacaggttctcatgtggcacccctaggacctgtgcagacagtagtctgttgaatcattacatcaaggagctgcccctgtcagggtgagtgtaattaggaacgataccagcacataaggctccccccaatctcttccagttgctttttcttttttcttttttttttagacaggtcttactctgtcacccaggctgtagtgcagtggcataatctcagctcactgcagtctctgcctcccgggttcgagcgattctcctgcctcagcctcccgagtagctgggactacaggcacccaccatcatgcttggctaatttttgtatttttagtagagatggggtttcaccatgttggccaggctggcctcgaactcctgacctcaggtgatctgcccacctcggcttcctaaagtgctgggattgcaggcgtgagccaccacgcccggcctccagttgcttttgaagagggtaaagtcaagtttctatttctagaaaacattttttagaaatttgttgcgatgtttgtacaatttacctcataagagaaccacacccttctccaaaagtgctggtactgcatcagtgagatgagtagggtttttgtttgggattgtaagactattaagatcctagtaagtcagtggtagtttactgtgatgtgagcattgtagattcccccgttgtcactaatcacacaacaattttgagaagtaggctataaaacaaaaaaaggttgctgttttctatttttaaataaaccaaaaaaaaacagaaaagatgtgaattttccccagttatgtgggaaaggtaaagcaacaccaaataaaagcccacagcagcttcatctttacgataactcagtgcatatgtgaaagagaatgatgcattaactgaaatacctcattgaatattatactactactggtaaaatgcagaagacagtgttaatgtgtttggtttggggactggttgttataaaatgcaatttttttttaaatctaagcatttcattatgtgttctacagtgtcggtgaataaatgaaaccaatctcaatttagaggtatggatgatgacagaaagcccaatagaagcttaatgatgcttctgtttgaggcccagcaagcaccactaaattactggatgaaatgaaattgttcacttgagggattagtcaaccatctgggggagaagttgctcactgtcaaatacagcatgcacggtcctagctgatagaccttttcctcattgctacagcaagccacagggtagagtgaccagttctcctatccaaaaataaatgcgaacatgcatacataaatgtggctgagggccacttttgccatcactgtgctccaaaggaacatgatattgttaaatatactgtacacattaaactattctataagatgctttacttttcaagtacggtgtcattttcacagtctccagggtgacaaatgccaatagatatgtgagttaatttttttaaatatctccgtgagttgtaaatagatgtgtatttgatctgccctatccttctttgattctttaacatgttctctctcttctgtttgcaaaatatgtttgaaagcattggtagtgctttccttatcagtaactggagttctcctgcttgcactagagaaggtaaagagagaatcagtattcttatatggcaatctggggaagcagcaatatgccactgtacaaaactgaagaaaagttcctaatttgtactttgtgaagggagatgaaaggacgtttaaagtatatatattttgtcaagaggaaagaagataaaactatgccagttttatatcaatagcttgtagaagctcagctcttcttggtcttggctagactgcctagattcccacagcagacaaggttgagaatccattgctggaatcttggtattgatgagttacagtgatggaacatgtgcttggccacaggcaggtccagtcactgcaaaagtgaccaagccagcaggtcacccttaacttcagaaacaattattggtggtgaactgtacttaaattgcagagaaacctgtaagtaatggaaggtaaagaaaaattacagaatggaaaataatattttgggcaagcaaacaaattcactgagaattccaaaagtatattaaaaaagaagatagctatgagttcagatctatcttattggtctttaatattacaaccaatccttaactttccactataaaggaaggattactagattgattactttctggatagataatctggtaataaatgataggtaaatcaaaaattacttttatttaggagtttgaattcttactctcatcagacattttttttctagggacgcttactaattaaatgatttaagttgtttcttaggggttttttgcctatatatttatgactgtgttaatgagtagtgaaatgatgcggaaagacagctatcaggaagaggaaatacagaagcctgaataatctatgggttagaaaagcatccctgaataatcaaaaattggcagtattggcattgttctcaagcctttttatgaaaatgaaatctgaaatcaccaaatgtaaacctgggaacattattctagtgttgctgtcttggattcatgttaagaagcgtcttcattctttgctcatgttgcccacttcttgtggatttgtctgagtgttttttgacaatcacttccttaaagactcttctgaactagttggacctggttaatcatagagagtagcctttaatcatggatagtcttcttggattatttttatatttgaaaagaaaatgttttatttgcactactgagtaggaagagttaattgttttctttgttctttttttgaagtcattacacaggacttcactccagagttaccattatgagtgtgttcagctctggtccacagaggatggataaaaatggtttgttatgtttttttgctctgcagtgctatgagccttatatctgttaatatgaaggacaaagtcaaaagcagcagtggatagcaggaagggtagagactaatatgtttgggaccaaaaccatctaagttagagatttccagatcacagaggggctgggcattctctggagcagtcattggttggtgctttattgtaatcattttgcgccaatccccaacaattaggaactggaccctgggaataagctgagggtgctgaactgttggggaagggtgactgtagccacatggaagataaaatatgggtttttctgcaaaatttccatctgagggtttttacatttaatatttttttaagacagtttaaagagcaaacgttttttaagtgtattctagttgcaaagtatgcacacatatcttgaatggctttatttttattgtgtaaaactgttgaacacatgactgtgatgcacaaattctttacgtgtaaggagtctatgcattttacagtaacttattttatgatcgggtgatgagacagttatactttcaactgccattatttttattaagtgctttcattttctttacagttattataaaattgtatttattttatacagatgggttttcattttcctgatgctgtaatgtttacttcagcttgttgacctttctttgtgttatctgcatgttgtaacgtgtgataagaatgaatgtaaaggctgtggcaactgtaattaatttttgtaaagggctggtcacacgtggatctggtttatgaatgcatttgggatgattttggtaaccagatcaccttttcagaaatttagatgtgaacaccaaaagaagcattttctcaacaaaaattaatagctggttctattttttttaaacctagaaaaaataaagttgatttttttcaattaaagtgcttttaattcttagcagtggggatggggcatgtgtgttttaccagagctatttgggcattaatatctgcaggcaagtacttaaagcacactgtggcagttggatgctgaaggcaaactgaaaaaccaaatgaaaaaacatcagacttccttctttggtttaaaaatatttccccctttctccccattctcccaatccagtggtgtgctggtaaatgtttagcagttcactcttctgggagaaaattatgtattcaactatacatgtttgttataaattttgctgatagcaagaacatataacacaattaacaaataataagatacaaatactttattgtaaatcccatatagccagttgattctcacagtatacttagttgctcaggaaagaactaaaatgcttttttaaaaggatacttaattgctttttgctcaactcctacagtcaacctatgattgattgtctttcaactgtgatttgaaaaatggcagactgtccaaatctaactcatttcccaataaatttattatcattcaatctgatacgtgatctactgttaaaactgtttcttaccatggtacatattagactcattaagccgaaaccacttttagctttaacattaattgtaaatttatatgattcaattttcataaccaatgcttaacaactgcaggcaaaattctaaaatgtgaccactgggtcttgggaatcagtaggggctgtatccagcacaccactgccccatcctttttttcttaactattagtgttgaataaacttctcatagttaatctacttgctgaactcaggaaattcctatcactgaccctggccagggctttaaagggtaggaaaagcattaatgtcagtcctacacagcgaacttttgatttagaagaatgtgacagaaagaaaacatttactgaaatacatgggaagcttgcatatttctaaagttgtctttatacttttcatttctcaaagctaagtaaactgtggtataggcatctctaagatgttagcatttaaaacatcaattgttttattgatgtttaaacaattgtttaaatcccactgaaaaatttaaatattaaaatatcttgcacagtctaccaaatgagttaaatcgttacagtcgtgtctacctcttatttttctatctgtatttaggctgctgttttggtgagattctaatttctttttcccctggaactactttctgtggaagacaaggaacagactggggacagaggcctgaaaacaaattggaagcactcagagatctattgctgaccagccctattcctcatgagttggcggggggaaagccattgtttttaatttccacttaatatgaaaatgcttgtttttaaaatgttttttcctgctgaacaaatgtatttttaaaaggaaaaaaattctcttttggctctaagaagtcagctgtatgagcaggcgtgaccatatcataacatgctgatatgatagaaatcaataaatttttacctctcaggaaaaaaaaaaaaaaaaaaaaa

SEQ ID NO: 350 - DNA, 2025 bp, HOMO SAPIENS
atccgccccctgcctcatccaggcttcgccccagtcagtctccggcagcttctcgcggcttcgcaagccccttcccgtgatgccccgcgcctggctgtcgcggttgccgggcaacgcgctgtccatgtcgcgggcctcgctgggactccctgggagatgaggccgcgaggtctcccgccgctcctggtggtgctcctgggctgctgggcctccgtgagcgcccagaccgatgccaccccggcggtgacgacagagggcctcaactccaccgaggcagccctggccaccttcggaactttcccgtcgaccaggccccccgggactcccagggctccagggccctcctccggccccaggcctaccccagtcacggacgttgctgttctctgtgtctgtgacttatccccagcacagtgtgacatcaactgctgctgtgatcccgactgcagctccgtggatttcagtgtcttttctgcctgctcagttccagttgtcacgggcgacagccagttttgtagtcaaaaagcagtcatctattcattgaattttacagcaaacccacctcaaagagtatttgaacttgttgaccagattaatccatctattttctgcattcatattacaaactataaacctgcattatcctttattaatccagaagtacctgatgaaaacaattttgatacattgatgaaaacatctgatggttttacattgaatgctgaatcatatgtttccttcacaaccaaactggatattcctactgctgctaaatatgagtatggggttcctctgcagacttcagattcgtttctgagatttccttcgtccctgacatcatctctgtgcactgataataaccctgcagcgtttctggtgaaccaggctgttaagtgcaccagaaaaataaatttagaacagtgtgaagaaattgaagccctcagcatggctttttacagcagcccggaaattctgagggtacctgattcaagaaaaaaggtccctatcactgttcagtccatcgtcattcagtctctaaataaaacgctcacccgacgggaggacactgatgtgctgcagccgactctcgtcaacgctggacactttagcctttgcgtgaatgttgttcttgaggtaaagtacagcctcacatacacagatgcaggtgaagtcaccaaagctgatctctcattcgttctggggacagttagcagcgtagtggtcccactgcagcaaaagtttgaaattcattttcttcaggaaaatacccagccagtccctctcagtggaaaccctggttatgtcgtggggctcccattagctgctggattccagcctcataaggggtctgggattattcagaccacaaatagatatggacagcttactattcttcatagcacaactgagcaagactgcttagcactggagggggtccggaccccagtattatttggttacactatgcaatctggctgtaaactaagactgactggagctctcccgtgtcagctcgtagcacagaaggtgaagagcctgctgtggggccagggcttcccagattacgtggccccttttggaaattcccaggcccaggacatgctggactgggtgcccatccacttcatcacccagtcattcaacaggaaggattcctgccagctcccaggggctttggttatagaagtgaagtggactaaatacggatccctgctgaatccacaggccaaaatagtcaatgtaactgcaaatctaatttcatcctcctttcctgaggccaactcaggaaatgaaaggacgattcttatttccactgcggttacttttgtggatgtgtctgcacctgcagaggcaggcttcagagctccaccagccatcaatgccaggctgccctttaacttcttcttcccgtttgtttgacaatgctcagatgcatcagttccttaatatacacgtgaaatttgaaaactgtacattcggtgagattaaattttatatacaactagcaaaaaaaaaaaaaaaaaa

SEQ ID NO: 351 - DNA, 786 bp, HOMO SAPIENS
acagaaggacgaaccagtgagctaagctgcggggcgcgggctcggccggggcaccggtgagtcgccggcgctgcagagggaggcggcactggtctcgacgtggggcggccagcgatgaagccgcccagttcaatacaaacaagttgtaaatttaaagatgttagaagaaatgtccaaaaagatacagaagaactaaagagctgtggtatacaagacatatttgttttctgcaccagaggggaactgtcaaaatatagagtcccaaaccttctggatctctaccagcaatgtggaattatcacccatcatcatccaatcgcagatggagggactcctgacatagccagctgctgtgaaataatggaagagcttacaacctgccttaaaaattaccgaaaaaccttaatacactgctatggaggacttgggagatcttgtcttgtagctgcttgtctcctactatacctgtctgacacaatatcaccagagcaagccatagacagcctgcgagacctaagaggatccggggcaatacagaccatcaagcaatacaattatcttcatgagtttcgggacaaattagctgcacatctatcatcaagagattcacaatcaagatctgtatcaagataaaggaattcaaatagcatatatatgaccatgtctgaaatgtcagttctctagcataatttgtattgaaatgaaaccaccagtgttatcaacttgaatgtaaatgtacatgtgcagatattcctaaagttttattgacaaaaaaaaaaaaaaaaa

SEQ ID NO: 352 - DNA, 311 bp, HOMO SAPIENS
ggatttccttgccatttggctttcaaatgtgctcagccaatgacaggctggaaagaaattgacagctgggaaaagaggaagatttgtgtacaagatcccttccactcccatctcattacctgccatggtcctagcagtggctgttcttattatggccacaactactcttggacaggccaacatccacaactccatccttcaactaggcttcattaacactgtccctcacccttatctctttctgggtaggggtgataaaggtttcctgacatcagagttcctgagtgcctcatatattcttgttggtccct

SEQ ID NO: 353 - DNA, 4264 bp, HOMO SAPIENS
gagtgtcggccccgcccccgcagaggggagcgagcgctcgcgggccggggcggagggttcggctgcgcggcggggctgaggcggccgcggggcccgagcgcagggagtggagcttggtttcgggatctcggtgctgcagacggcgagacctcctgcacagggtgtacagcaagctgtgattcctgggaaaactaaaaaagctctctgaacaacggggcccagagctgatggcagacaatgtcagccactaacaacatagcccaggcccggaagctggtggaacagctacgcatagaagccgggattgagcgcatcaaggtctccaaagcggcgtctgacctcatgagctactgtgagcaacatgcccggaacgaccccctgctggtcggagtccctgcctcggagaacccctttaaggacaagaaaccttgtattattttataactgtgttctcatatgttctctctctctctctctctttctctctctctctctctgtctctgtctctgtctcaggcagggcatcattcagtaattagctcaaacaaaacatctcaagtccccaaaacctttaattccaaaagaaatcccccctctccccgccaaaaaaggcgttcccaccgcccggatggggtagaatggaccttgtaggtggagatgaattttcaggtccgaccccatggccctctcagtttgggccaaaagggatggaggctttacggccacttcccgttcggaataactgaaatcccccagcgatggggtaacaattttttaaaactctcgattgccgtttcaattgtggaccggcgccgagggggaaagggaggtgacttcgcccggtggcaatagttccgggagaattggccattggtaaaaagacttcatagggtcactggaatgctttgtgttgtttttaagtagaggtaaaattgagatggggggcgggaggtgacatcatgaagttttttggaaatatctctttatttaaaaaattgttactccatacggctaaactcggattgtgatggttgaacccgtcgctaaactgcacgatcctgcaatgaatgcacgatggagtgtgggggtctggagggggcttcgtctatgaaaagttgccaagtgtgactcccctgcatgatgttagccatgggtcctttctgcagggtcccctctgtgccagaaatgggttttcgggacttgccccagggaagccgtcaccggcccggcccatcatgtttttggattttttttttttttctttttttgagatggagtttcattcttgttacccaggctggagtgcagctgcatgatttcagctcaccgcaacctctgcctccccggttcaagcgattctcctgcctcagcctcccgagtagctgagactacaggcgtgtgccactacgcccggctaattgttgtatttttagtagagacggggtttcaccgtattggccaggccgctctcaaactcctgacctcgggatccgcccacctcggcctcccaaagtgctgggattacaggcatgagccaccgcgcccagtgtgttttaagcatgaggcatccgcgtggctgggagaggctttgaccatccttggctcttccaggttgtcctaccctctggcatccaccatagacgtttttcaaacagaaaatgcaggctggggagccgcggcagggcgggtggggctaccctgtgctgctgtgtgtacaaaattgttccatgatcttggagtgactctgaaggactctgggaggtgagacgttgtcccggagatcaaaacgtccgctcaaaacgttaccctgtcgctcgaacccgatctttttgcttttccacccccgtgcaacccaggacggctgtctgaggccgggagatgccttagacgcaggatgggccactcctcccagcggcaagtggaaatcgaagatgtcatggggtcggggggaggcttctgaaagatgactgcgtcctcctctgcggcacggacgggagcaggtgcagccacatcttccagggcctgccggcatcacctgcggccacacctgagatggaccccacgcagccctgatcgcaggaggcctggccgccccgaccccctccacggggctggcctagaagcaagtagtagaataaaactagcctagtcctgtccctccggccccagtggagacaggcgtctaagaacccgtgccgagagggttcctggacggccgcccaggtcctccgtgcaggcccgtgaggcggggatccctgcttggctcacttcctgagctggtgactgccagggttcccacctcgccaaggctagagggctccgggtgtgtgtgcaggtgtcgggggagtgacctccactcctcaacctcgggcagctcccacaggccacagccgggctccccacccccggcacccagctctctacggcaggtccgggagggctggggcttcggggagccctacccgccaaacctgctgttggcccgggagagccccagaggctcccggagactgcagcctcctgtggttgggctgggagccggcagggtttggggtgtgggcgtccccaccacgcatagcaggaatggcaggaagggacaaaagcctgttccagagaccctgggaggaccccaggcagggagagcccgcctgcctccaccctttccaacaagccatcttggtaactgggaacaaacacaccccaccccgtttttccttaaaagaggccttaatccccgagcccccgctgccagggcagagggaggagggggcacagctgtgccaagcccggccccactggtgtgtcctcacaatgtgaccccagaaatgccagcagggaacggaggctgctgcagagacgcagccccaggcagccggggctcctaggctggtgcagatggtggggttaaacgggctgagcgttccaggtaaactgaggctcggggaggggaaggacaggctggcctctccttcactgtccacagggccttgggttccctgagctgtccagaccccaccatctcccggaccccagggaggtggccattgccagaagcctgtgggtttctttctagcttgggggattaaaaaaaaaattctccacttttttttttcttgagtagacttcagtgaccacactgtggaaaatacctttgcagacgtggcacccgagtgcacacaccgaccgccacatgtgcttttctgccgggaatccctggggtgaacgcatgttttatgggcgtttccaggagcgcgcgtgcacctccagacggggagctggcgggcgggggtggcagcagcagctctagccttggggggacaagcctctctcagctacgccaggggaaaagagagttaaggacactcacccccacccacgcacacacacaaggcagcgtcgggtgggagagagaaggccgtttctccttctgtagcctgggtctcccacgggccttccccgctgctgagcgagacaccagtagccaggtgaagggccacagcgggccaggccccgaccctgttgtgacccacctgggcaccttcccggaccagctccgcctcccctgccctcctctctccaggaaggagccagaaccctcacccctctcccaccctccccaggggtaaccccaggccaagcacagatagctcagctgcgacctctggcctctggggacataaacggggcggctgggccagggcggaaggtgctcctgtttccctccttctgcgtggtccctttgacgggccggccaccgtgtccgaggcgcaacgctaggcctccaggccacgcatccatctccaagttaacagcccgtcctgcccaagttctggggcaggtaggagagggccgtcacacacctgtccgcccgtgagtgacccgggggggcttccgggtggaggtggagccaccacgcccttcctcaaggggtcacttattaaaaagtccacggcctgaggccaggccctctgcacagaagccatatgccggccagccgcgcctcctcctctgtccacggaaccgctgcccatctaaccttcgtaaagacctgtctcctgtttccagccgccgcctgtggttctagcaggttctatgccatctgcattgggatgtctggttgtttttatttctgacttttttaaaattccaggtgtgccgcacccactttctcgcagtgttttaatattgtgtggagttgtcgataccacgtgaattcatacacaataaaaagcctcactctccctttaaaaaaaaaaaaaaaaaa

SEQ ID NO: 354 - DNA, 2755 bp, HOMO SAPIENS
cctacccgcgcgcaggccaagttgctgaatcaatggagccctccccaacccgggcgttccccagcgaggcttccttcccatcctcctgaccaccggggcttttcgtgagctcgtctctgatctcgcgcaagagtgacacacaggtgttcaaagacgcttctggggagtgagggaagcggtttacgagtgacttggctggagcctcaggggcgggcactggcacggaacacaccctgaggccagccctggctgcccaggcggagctgcctcttctcccgcgggttggtggacccgctcagtacggagttggggaagctctttcacttcggaggattgctcaacaaccatgctgggcatctggaccctcctacctctggttcttacgtctgttgctagattatcgtccaaaagtgttaatgcccaagtgactgacatcaactccaagggattggaattgaggaagactgttactacagttgagactcagaacttggaaggcctgcatcatgatggccaattctgccataagccctgtcctccaggtgaaaggaaagctagggactgcacagtcaatggggatgaaccagactgcgtgccctgccaagaagggaaggagtacacagacaaagcccatttttcttccaaatgcagaagatgtagattgtgtgatgaaggacatggcttagaagtggaaataaactgcacccggacccagaataccaagtgcagatgtaaaccaaactttttttgtaactctactgtatgtgaacactgtgacccttgcaccaaatgtgaacatggaatcatcaaggaatgcacactcaccagcaacaccaagtgcaaagaggaaggatccagatctaacttggggtggctttgtcttcttcttttgccaattccactaattgtttgggtgaagagaaaggaagtacagaaaacatgcagaaagcacagaaaggaaaaccaaggttctcatgaatctccaaccttaaatcctgaaacagtggcaataaatttatctgatgttgacttgagtaaatatatcaccactattgctggagtcatgacactaagtcaagttaaaggctttgttcgaaagaatggtgtcaatgaagccaaaatagatgagatcaagaatgacaatgtccaagacacagcagaacagaaagttcaactgcttcgtaattggcatcaacttcatggaaagaaagaagcgtatgacacattgattaaagatctcaaaaaagccaatctttgtactcttgcagagaaaattcagactatcatcctcaaggacattactagtgactcagaaaattcaaacttcagaaatgaaatccaaagcttggtctagagtgaaaaacaacaaattcagttctgagtatatgcaattagtgtttgaaaagattcttaatagctggctgtaaatactgcttggttttttactgggtacattttatcatttattagcgctgaagagccaacatatttgtagatttttaatatctcatgattctgcctccaaggatgtttaaaatctagttgggaaaacaaacttcatcaagagtaaatgcagtggcatgctaagtacccaaataggagtgtatgcagaggatgaaagattaagattatgctctggcatctaacatatgattctgtagtatgaatgtaatcagtgtatgttagtacaaatgtctatccacaggctaaccccactctatgaatcaatagaagaagctatgaccttttgctgaaatatcagttactgaacaggcaggccactttgcctctaaattacctctgataattctagagattttaccatatttctaaactttgtttataactctgagaagatcatatttatgtaaagtatatgtatttgagtgcagaatttaaataaggctctacctcaaagacctttgcacagtttattggtgtcatattatacaatatttcaattgtgaattcacatagaaaacattaaattataatgtttgactattatatatgtgtatgcattttactggctcaaaactacctacttctttctcaggcatcaaaagcattttgagcaggagagtattactagagctttgccacctctccatttttgccttggtgctcatcttaatggcctaatgcacccccaaacatggaaatatcaccaaaaaatacttaatagtccaccaaaaggcaagactgcccttagaaattctagcctggtttggagatactaactgctctcagagaaagtagctttgtgacatgtcatgaacccatgtttgcaatcaaagatgataaaatagattcttatttttcccccacccccgaaaatgttcaataatgtcccatgtaaaacctgctacaaatggcagcttatacatagcaatggtaaaatcatcatctggatttaggaattgctcttgtcatacccccaagtttctaagatttaagattctccttactactatcctacgtttaaatatctttgaaagtttgtattaaatgtgaattttaagaaataatatttatatttctgtaaatgtaaactgtgaagatagttataaactgaagcagatacctggaaccacctaaagaacttccatttatggaggatttttttgccccttgtgtttggaattataaaatataggtaaaagtacgtaattaaataatgtttttggtaaaaaaaaaaaaaaaaaaaaaaaaaaaaaaaaaaaaaaaaaaaaaaaaaaaaaaaaaaaaaaaaaaa

SEQ ID NO: 355 - DNA, 4336 bp, HOMO SAPIENS; identical to SEQ ID NO: 166

SEQ ID NO: 356 - DNA, 2276 bp, HOMO SAPIENS
gaacgtggtataaaaggggcgggaggccaggctcgtgccgttttgcagacgccaccgccgaggaaaaccgtgtactattagccatggtcaaccccaccgtgttcttcgacattgccgtcgacggcgagcccttgggccgcgtctcctttgagctgtttgcagacaaggtcccaaagacagcagaaaattttcgtgctctgagcactggagagaaaggatttggttataagggttcctgctttcacagaattattccagggtttatgtgtcagggtggtgacttcacacgccataatggcactggtggcaagtccatctatggggagaaatttgaagatgagaacttcatcctaaagcatacgggtcctggcatcttgtccatggcaaatgctggacccaacacaaatggttcccagtttttcatctgcactgccaagactgagtggttggatggcaagcatgtggtgtttggcaaagtgaaagaaggcatgaatattgtggaggccatggagcgctttgggtccaggaatggcaagaccagcaagaagatcaccattgctgactgtggacaactcgaataagtttgacttgtgttttatcttaaccaccagatcattccttctgtagctcaggagagcacccctccaccccatttgctcgcagtatcctagaatctttgtgctctcgctgcagttccctttgggttccatgttttccttgttccctcccatgcctagctggattgcagagttaagtttatgattatgaaataaaaactaaataacaattgtcctcgtttgagttaagagtgttgatgtaggctttattttaagcagtaatgggttacttctgaaacatcacttgtttgcttaattctacacagtacttagattttttttactttccagtcccaggaagtgtcaatgtttgttgagtggaatattgaaaatgtaggcagcaactgggcatggtggctcactgtctgtaatgtattacctgaggcagaagaccacctgagggtaggagtcaagatcagcctgggcaacatagtgagacgctgtctctacaaaaaataattagcctggcctggtggtgcatgcctagtcctagctgatctggaggctgacgtgggaggattgcttgagcctagagtgagctattatcatgccactgtacagcctgggtgttcacagatcttgtgtctcaaaggtaggcagaggcaggaaaagcaaggagccagaattaagaggttgggtcagtctgcagtgagttcatgcatttagaggtgttcttcaagatgactaatgtcaaaaattgagacatctgttgcggttttttttttttttttttcccctggaatgcagtggcgtgatctcagctcactgcagcctccgcctcctgggttcaagtgattctagtgcctcagcctcctgagtagctgggataatgggcgtgtgccaccatgcccagctaatttttgtatttttagtatagatggggtttcatcattttgaccaggctggtctcaaactcttgacctcagctgatgcgcctgccttggcctcccaaactgctgagattacagatgtgagccaccgcaccctacctcattttctgtaacaaagctaagcttgaacactgttgatgttcttgagggaagcatattgggctttaggctgtaggtcaagtttatacatcttaattatggtggaattcctatgtagagtctaaaaagccaggtacttggtgctacagtcagtctccctgcagagggttaaggcgcagactacctgcagtgaggaggtactgcttgtagcatatagagcctctccctagctttggttatggaggctttgaggttttgcaaacctgaccaatttaagccataagatctggtcaaagggatacccttcccactaaggacttggtttctcaggaaattatatgtacagtgcttgctggcagttagatgtcaggacaatctaagctgagaaaaccccttctctgcccaccttaacagacctctagggttcttaacccagcaatcaagtttgcctatcctagaggtggcggatttgatcatttggtgtgttgggcaatttttgttttactgtctggttccttctgcgtgaattaccaccaccaccacttgtgcatctcagtcttgtgtgttgtctggttacgtattccctgggtgataccattcaatgtcttaatgtacttgtggctcagacctgagtgcaaggtggaaataaacatcaaacatcttttcatta

SEQ ID NO: 357 - DNA, 267 bp, HOMO SAPIENS
tactgaatgggaatcacctttgaccatcttgaagttgcaaaatcctaaactgaaccattgtaagtcaggcaccatctgtaaatgtctcatatttcctactgggaataaagtttaaaatgaaataactgattttctgaaactggcactcaatttaagtcaaaaatagtttaacagtaaggcttgcattgctaggacttacagctttagtgggcagaagtatcatcaggggagcgtgttaaaatgcatattctcctgagacgagattgc

SEQ ID NO: 358 - DNA, 364 bp, HOMO SAPIENS
  misc_feature (329)..(329): n is a, c, g, or t
gaattgttcaagtgtccatatactaagaattacatcagcgatgtggaactatggataggcttccttgggttcctggctccacactataaccaccgccccccaccccttaaatttctgtatagcagacttaagagtgaatatcaccatatgcagttgttcatgtacttcttcccctttctcttctagctcttgacaaaattctcagggaaaactcttcagctctggatgtctccctttttgtggatcaaacacaaagggcatcattctaaaatatatacagaaccataaaagccccaaatagccaaagcaaccctgagcaaaaagaacanggctggaagcatcacactaccagacttcaaaattt

SEQ ID NO: 359 - DNA, 470 bp, HOMO SAPIENS
  misc_feature (49)..(49): n is a, c, g, or t
  misc_feature (55)..(55): n is a, c, g, or t
  misc_feature (64)..(64): n is a, c, g, or t
  misc_feature (67)..(67): n is a, c, g, or t
  misc_feature (72)..(72): n is a, c, g, or t
  misc_feature (75)..(75): n is a, c, g, or t
  misc_feature (81)..(81): n is a, c, g, or t
  misc_feature (87)..(87): n is a, c, g, or t
  misc_feature (93)..(93): n is a, c, g, or t
  misc_feature (109)..(109): n is a, c, g, or t
  misc_feature (130)..(130): n is a, c, g, or t
gagagctgccaccagtaaagacacagaagtgcaagacattaaaaagctnttctanccagtaggntanagtanaancaaggnctttgnggtcanatgtgggtttgtttcntggctagtggtttgtaacccntaggcaagttacttaatcttgctaagtaaaccttagtttcctcatctgtaaagccaggatgataataacacctccctcaaagttgttaattcattttgcaattcacgtgttgagtactttttaagggactgggaatacagcaatgaacagcacaggtctgaatgaggaaggtaggaccgggtcacgaaggtatgccaccagttaacaaagacactctcaaaacaggaaggatggcaagtcgttaaaataacatccagggctccatttttacctgaagaagaatagatgataagaattattttaggtgattaggttaagaatgagtttgcgctggtccgag

SEQ ID NO: 360 - DNA, 3581 bp, HOMO SAPIENS
cgagaagtgcttccaagcgtccattttgagccttggaaactacgacgaccaaagggccacgggttcatgggtcgtttctcatttccgtcgagttaaacgtctggggctgcttctgaggaatcagcttgactggccagcaagttcagctccggcaagtcatttgattcacccggtgatgaaatgggggtcaaccagtctgtgggctttccacctgtcacaggaccccacctcgtaggctgtggggatgtgatggagggtcagaatctccaggggagcttctttcgactcttctacccctgccaaaaggcagaggagaccatggagcagcccctgtggattccccgctatgagtactgcactggcctggccgagtacctgcagtttaataagcgctgcgggggcttgctgttcaacctggcggtgggatcttgtcgcctgcctgttagctggaatggcccctttaagacaaaggactctggataccccttgatcatcttctcccatggcctaggagccttcaggactttgtattcagccttctgcatggagctggcctcacgtggctttgtggttgctgtgccagagcacagggaccggtcagcggcaaccacctatttctgcaagcaggccccagaagagaaccagcccaccaatgaatcgctgcaggaggaatggatccctttccgtcgagttgaggaaggggagaaggaatttcatgttcggaatccccaggtgcatcagcgggtaagcgagtgtttacgggtgttgaagatcctgcaagaggtcactgctgggcagactgtcttcaacatcttgcctggtggcttggatctgatgactttgaagggcaacattgacatgagccgtgtggctgtgatgggacattcatttggaggggccacagctattctggctttggccaaggagacccaatttcggtgtgcggtggctctggatgcttggatgtttcctctggaacgtgacttttaccccaaggcccgaggacctgtgttctttatcaatactgagaaattccagacaatggagagtgtcaatttgatgaagaagatatgtgcccagcatgaacagtctaggatcataaccgttcttggttctgttcatcggagtcaaactgactttgcttttgtgactggcaacttgattggtaaattcttctccactgaaacccgtgggagcctggacccctatgaagggcaggaggttatggtacgggccatgttggccttcctgcagaagcacctcgacctgaaagaagactataatcaatggaacaaccttattgaaggcattggaccgtcgctcaccccaggggccccccaccatctgtccagcctgtaggcacaactggccatttgtaaagtcacttcagccaagttttcatttgggagctacccaagggcacccatgagctcctatcaagaagtgatcaacgtgaccccttttcacagattgaaaggtgtaatcacactgctgcttggataactgggtactttgatcttagatttgatcttaaaatcactttgggactgggatcccttgctgattgacaaacagactttctgggaccttgatggagtggggaacaagcagtagagtgggactgggggagacccaggccccgggctgagcactgtgaggcctggatgtgaagactcagcccagcgaagctcattcccttacccccggccagtgctgctgcttcagtggaagagatgaagccaaaggacagaatgaaaatccctaccttcagagactctagcccagcccaacaccatctcttcctacctctcagccttctccctccccagggccacttgttgaagtctgagcactttatgtaaatttctaggtgtgagccgtgatcacattttctatttatttccaagtcttctcattgtatggaacatagtactacttatacttacagtagtaagttatacttgtgagcccacagagtggcagacagcatggctctcacagcacagggagaaaaactgaggtacacagaggtacctcagaagctctggatgtctttgggggttttgctaagtgtatcttgataggaaacaacaaaagcaggttgagatggggaagatgacagaacaacagtgttaaatggccatttgcacaggcctttgccacaacagagaagtagtttggtcagctaaaactcagctgcagcctggacagtagagcgagaccccatcttaaaaataaagaaggctgggcgtggtggctcatgcctgtaatcccaacactttgggaggccaaggcaggcagatcacttaaggccaggagttcaagaccacctggccaacatggtgaaaccccgtctctactaaaaatacaaaaaattagcctggcgtaatggcaggcgcctataatcccagctactcaggaggctgaagcagaagaatcacttgaacctaggaggcggaggttgcagtgagtcaagatcgcgccactgcactccagcctgggtgacagagcaagactctgtcttaaaaaaaaaaaaaagaaaaagaaaaatttaaaataaataaaatttaaaaacgcagaaggccactcccagagaggcctaggagtaccttggtcattttttcttgcctcaaatattataaacctccaacttgctcagaatcagggtgcttttattgtctgttttctggctctgaggcccttgccccaaatttaagtcagatacagactgaatttccattctgttctgtttataatatgaatgatattaatactcttgtttgcttaatgttatgttggaattttctgtttaatctgcagtagagcaagatggagagccatctggaattgacttccttctgtctttcttctgtgttcgcttactacttgggcccatgtgggaaaaaaactttaaaaggaaggaagtcttcttagggatccagttcaaagctatttgggggcatcaaactgaaactctcttctccactactcaagacttcgtgcctcagtccaagtaggtaagagcaaaagggaaatgcatctctacacaatggcccatggtcagggccaccagagcaagctgggcctagatctccacctgtcagtgactggccattctaagaggtgaaacagcagatcgttgaggctgtgagggaggatctttgaattcccatgagacatagcataagaagggtatcattaaagccctgggctctaaagttacagagcctggttttgagtcctggctccaccactgccaactgggtaaatttgagcaaatggtattctctttcttatctcagctcctgcgtttctaaaatgagggtctgcgttatgaatagttaggaggattaagtgagaggatgtataacccatgggttacttaaaagtatatttcctaccttccaaacatgagatttttctagttatagtttcttttctagcttgattgctttgtggtcagagaaaatgacccatatggtttccatccttcaaaatttgttgaaacttggttgttggcctagtatgagatcaatgttgtaaatgtgccatgtatgtttaaaaagactatatattctgaa

SEQ ID NO: 361 - DNA, 1936 bp, HOMO SAPIENS; identical to SEQ ID NO: 10

SEQ ID NO: 362 - DNA, 4919 bp, HOMO SAPIENS
acttcgctccgcgcagccgcctggtctgcagtttgttggagctctgcgtccagcgccgctgccgctgccgccgccgccgccgccgccgccgccgccgccgccgccgccactaccaccacttgattcttgcagccaccctgcgaaccctgccacactgcgatcgcatcatcgcggtattcggttcgctgcgttcccgccgccaccgcctcggcgccctttcttggcccttgttcccccaaatgtctgactctgactctcggactgagaaacgcaagaaaaaaagaccaaatggcaaagcaaccttctgatgtaagttctgagtgtgaccgagaaggtagacaattgcagcctgcggagaggcctccccagctcagacctggggcccctacctccctacagacagagccacaagacaggagcccagcacccatgagttgtgacaaatcaacacaaaccccaagtcctccttgccaggccttcaaccactatctcagtgcaatggcttccatgaggcaggctgaacctgcagatatgcgcccagagatatggatcgcccaagagttgcggcgtattggagacgagtttaacgcttactatgcaaggagggtatttttgaataattaccaagcagccgaagaccacccacgaatggttatcttacgactgttacgttacattgtccgcctggtgtggagaatgcattgacaggttctttgcggagccgagataccatgcagacattttgcttgttcaaaccaacaagacccagcaccgcggtctcctggtgccattattatgcagccagcggttctcttgtggagggggcaggtgacgtttcagaagacaccgagctggatgggactacctttctgttcatcaccacacagcagaatttctaatggaagtttgttgtgaatgtaaaggagggagcattctttgctttttaatatacaaaccatggttttttggagcaggattttgtgtaagaatggtgtttacatgcagtgtgttttccccctcaccttcaataaggtttttcaaaaaggaaatggaaactttttaaccaatttgtgaataacttttgtattaaaattttaagaacctacggcctattctcagaggattatgtaacccctgcagtggaaactgagccagctaacttaaaaagctgccttagtttatttttagagattacagaatttttaaacagggagacgtgtgatatactccctcccttccctactattgcctctctgacctttttaaattatttttaataccaaaagagttcttttgaaatggaactgattaaaagggcagagggtctgttgccagcctgcattgatataccagtcccatttgtaaatatttacgtacctttataaattcagttgcatctgtggcaaaatttcagactatttttgcgtctttcctcatcactttttgtgatgcaactccagtctggactcagatgcatagatttggtccagtgtattttcatgataaagtgaaattgagtcagaacaagagttaatatctgcctgtatcttgcacagttcgagcgatctgttattaactgggaagcatttggtgttggttttcattccatttcgacgagcatgttattgggaagtattctgaagaggcaatagcagtaataacaacagacttaagtgctacgcccctttgtgctgctggcttttctggttgcaggctttcccatggtcacaggatgcactgtcagcatcaggtcccagagggccaccgtgtccattacagcagagtccagctgcagcatccagctcacgccctcatgggaattggcacaggcctggggcagggcttctgatggccatttgcttggcctcctgcattttagtccaactcacagtccactagcttcactcctttaaattcactttgaaacaggcctcatcccacttccaccagcaccatagaagaataattctgggcagaagtctgttttttttcatttttccaggacagttggatattgtcaggccacttgtgaccccagccatgtagtgagggtgctctttctctgtgcctgctccttatgagtgcagtggaaggaagccacacactggtcagtcatttcagaggcagcagatgcccagggagacccaagaaagagtcaggttagggagcagtgaaagtgaggagggaagacaattctgtgaactctgtaactcttaaaatttttgaaaactccatcgttaaacaacttttaaaagaaataactaaattttcaaatgagtaagcagtgccaccaactagtgttttgcccgatagaagagccagcatgttcacgttatttaaattaggtggaaaaatctaaacatttttatcttcataatttaaaaaatatatatgtatatattgcatattcactttttcctttaggtagagatgatttcaatccaaatactcttactttaaaaaatttcctttccccaagaatctccttgggactttgacttatttttaaagctgtgttggagctcatcttgttccctgatgtgtctcgagcccattggtagggtcatacaaagcccacggttacaagcagtggtaggattgcagccgtgggcctgctggacacacacatacaccaaagatgtatttggatctgggcaccccctcccaggatccctgtactcacgtgccagtctcctgactagagcactttactctgtttcctcagccctgcagcccctgggagcacacactgggtgcagccctgggccaggcacgggaggccctgccctgtgctgcccaggggctgtgtgcaccacatgagcacatttccctctggcctggcggcctccaggctggctgtggaaacagttcctgaggaaattagagattctatgaattgtaggagtattaaagaccaggctgttggcaccagaacttaaagcgatgactggatgtctctgtactgtatgtatctggttatcaagatgcctctgtgcagaaagtatgcctcccgtgggtatacgtttttaccttttttaaaaaacatttttgtagaaaaaataattaaatcccctttttggaaacttactgcaggttttgtgccttgacaacctctccctatgtgaggtttgtaaaaagtgtcctgtgacttaacacagaaacgcaataaacacacacaaaatagtttcatgagtgattcttcagatgcccttcccaactggttagttgatcaagaattttgggggtgggggttgcggagaaatcaagtttaaaattccttctgattaaaaaaatatagtggaatacaattgtctgccgtttccccttcttaatgtatatattgtgagtatttattagattcgtaggtcatattacttatcaactgagccaaatgtctgtgtgcaattgtgtttcctttaccttgtaaaattttgtacagcataaataagtaaaaaaatcactgtttttctcaactttttcaaaatcaaggattgtaaatattgtagattctttttctgtgtgatgtgtcctactgtttcataatgctgtaacttgtagaaatattgtatatttattttctgcttatttaatgtcttaatttctgaaaagtattaacatccctgtctcccactcccctgccgtcccatgaagttaactcctgagagttgtcgggggtgactggagagctcattgcagaccacgtggtcctccagggtggctctccaccttcgggtcctggtatttccagtcaagtgggtttcaattcttgggctttgccgcccttatgatgaagtgtgtgtttgatgccagtgagaaactcagtctggcaggctacaaaattctactccaagaaatacccagcaaccttctgtttgttccaaagcaactagcttatcatgcaagcaaattttgctgactccaggctttatctttaggaaaacaaaaaaaccaaagtattatcagcaggtgggaaagatttttctattgaaaatttatccctgacaactcagcgtttagaaaagaaataaaatgtgccacttccagaggtgctgcattgcagttgttcagggctagggccaggcaggacaagtgaatgggtgggacaggtggctcctgcctaaggaccacctcaggccactaaccccttgtggacaactgtgagtagctgggttttcccccacctgctgtgcaacttcctgtgctttgaggttggactaacttgtcttcaggagctaattaactgtacagccctccccacgccccacccatacggtcactgcatttggtcagcctgcttcttcaggtcgatgccctccttctgatactccatctccttcaggggaggttggggccccactggactgggtgtcaagatgtgaaagcttatgggagctttaaggagacttcatggtggttccatgcaggtggttctgccatccctgctgatttagcctggtgcctgtgtgtgtccactcacgtacacgtggggtgggggaaacgtgtctacagatgacgctaaatcagttggggtctactctaaacagcattgtgtgtaagaagcatcctcaagctcccagttaagtaacttgactacttttatttgggaatttcagactatagaagctctcttatgttttatgtccagattctgtgaccactagttactgtatcagaactcatcaggtacccacttataaatagcactgatctggctgtatactgatccatcactaacctgttttctaggacccagcgtatgtagcatttgtattgcagtttccctggcttacttgtgttttgcactgatgaattttgacagggtaattgccactttacttgtgcaatactgctgtaaataactgcagatttttaaacaatcttttatgttaattttataaaaataaaactttcaactagtt

SEQ ID NO: 363 - DNA, 5899 bp, HOMO SAPIENS
gggggtcacgtggtgcagagcacgcagagtccttctgtcggttggtcctggagcggcgcagccggagtggggccgtgaggagaataaaggcagccccgttgatgactgaaaatgacaaagcatccacctaacagacgaggaatcagctttgaagtgggagcccagttggaagcccgggaccgtttaaaaaactggtatccagctcacatagaagacattgactacgaggaaggaaaagtactcatccatttcaagcgttggaaccatcgttatgatgagtggttctgctgggacagtccttatttacgccctttagagaaaatacagctgaggaaagagggcttgcatgaagaggatggatcttctgaatttcaaataaatgagcaggtccttgcttgctggtctgattgtcgtttttacccggccaaagtcactgctgttaacaaggatggtacttacactgtgaaattttatgatggagtagttcagactgtcaaacatattcatgtcaaagctttttccaaagatcagaatattgtgggtaatgctaggcctaaagaaacagatcacaaaagtctttcatcatctcctgataaacgagagaagtttaaagaacagagaaaagcaacagtgaatgtgaagaaagacaaagaagataaacccttaaagacagaaaagcgacccaagcagcctgataaagaaggaaagttaatctgttctgaaaaggggaaagtgtcagagaaaagtcttcccaagaacgagaaggaagacaaggaaaacatttccgaaaatgacagagagtattctggagatgcccaagtggataagaaacctgaaaatgacattgtgaagagtccacaagaaaacttgagggaacccaaaagaaaacgaggcagacccccttccatagctcctactgctgtggattcaaactctcaaactttgcaaccaataacattggaactgagaagaaggaaaatatcaaaaggatgtgaagtcccattaaaacgtcctcggcttgacaaaaattcatcccaggaaaagtcaaaaaactactcggaaaacactgacaaagacttatcgaggagacgttcctccaggctgtccactaatgggacccatgagatcctagatcctgacttggttgtatcagatttggttgatacggatcctttgcaagacacgttgtctagtaccaaggaatctgaagaaggtcagttgaagtctgctttggaagctggccaggtctcatctgcactgacttgccactcctttggggatggatccggggctgcaggcttggagttgaactgcccatcaatgggagaaaacacgatgaaaacagaaccgacttctccccttgtggaattacaagagatttcgactgtggaagtaacaaatacttttaagaaaacagatgattttgggtcatctaatgcaccagctgtcgacctagaccataagtttagatgcaaagttgtggactgtttaaaatttttccgcaaagccaaactgttgcactatcacatgaagtatttccatggaatggagaagtcactggagccagaagagagcccgggaaagaggcatgtccaaaccaggggcccttcagcttcagacaagcccagccaggagaccctgaccaggaagcgggtctctgccagttccccaactacaaaagacaaggaaaagaataaagagaagaaattcaaggagtttgtgagagtgaagccaaagaagaaaaagaaaaagaaaaagaaaaccaaacctgaatgcccctgcagtgaggagatcagtgacacctcccaggaaccttctccacccaaggcatttgctgttaccaggtgtgggtcctcacacaagccaggggtccatatgagcccgcagcttcatggcccagaatctggacaccacaaagggaaagtgaaagcattggaggaggataatttgagtgagtcctcttctgagagctttctctggagtgatgatgagtatggccaagatgtggatgtgaccaccaacccagatgaggaacttgatggggatgaccgctatgacttcgaggtggtccgctgcatctgtgaggtccaggaggaaaatgacttcatgattcagtgtgaagagtgccagtgctggcagcatggggtctgcatgggattactggaagaaaatgtgcccgagaaatacacctgttatgtttgccaagaccctccaggtcagaggcctggcttcaagtactggtatgacaaggagtggctgagcaggggacatatgcatggcctggcatttctagaagagaactactcccatcagaatgccaagaagatcgtggccacccaccagcttcttggtgatgtgcagagagtgattgaggttctgcatggcctgcagctcaagatgagcatcttgcaaagccgggagcatcctgatctgccgctgtggtgccagccttggaaacagcactcaggggaggggagatctcatttcagaaacatccctgtcactgacaccaggagcaaggaggaagctccaagctatagaactttgaacggggcagtggagaagcccaggcccctggccctgcccctgccgcgttctgtggaggaatcctatatcaccagtgagcattgctaccagaagccccgcgcctattaccctgccgtggagcagaagctggtggtggagacgaggggctctgccctcgacgatgcggtcaaccccctccatgagaacggcgatgattccctttccccgcgcctgggctggcctctagaccaagacaggagcaagggggacagtgaccccaaacccggctccccaaaggtgaaggaatatgtctccaaaaaggccctaccagaagaagcccctgctcggaagctgctggacagaggtggagaggggctgctgagctcccagcaccagtggcagtttaacctgctgacccatgtggaatctcttcaggatgaagttacgcacaggatggactccattgagaaggagttggatgtgttggagagctggctggactacactggggaactggagccccctgagccgctggccaggcttccgcagctcaagcattgtatcaagcagctgctgatggacctgggcaaggtgcagcagatcgccctctgctgctcaacatgaaactgggcacccaaaactcatgggggcacaatcctggggcacctgcaggaggagcttcgcatatttaaataaataaacctagcatgctgaatgcacgtgacaccgactgacttcagggatctgggccaggagtgtggtggacattggacaaagaggccattttggctgcgggaggacactctgatctcgaagcctgccataaaggtagcaaatagactcttgggattcccctcttctgtgcacatcgttgaatgaagagagtctttttgcacaaacttcacttgaaattgtgccactgatgataaacggaatgagagccaaaaaagtttagttggagacagttgtaaattcaatttggagtttatttaattgacttttctatcacgttggggcacatgccaactccctggtttcttcctggcatggtgtttgggcagcaggcatcattttccttttctagcttcataggaatattgtgagctcaccatgctgtggaggttgggaaagagcagagtcttggctgccctgctttctccttaggactcttcacttttctcaccacatctcttgcatgacttcatggtactggggacaagtttgtatgccttcaccccagagctggctgggttatggcttttgtagcagagcccatacagcctatggaagaactagaatctcactcacagtaataagaatctaggaggaattccaaaccgaagcaggcagggtctggaacccaaaggacagcattttctacccacttcttaatattgacagcttccccgttctatttaatgtccaaaaatgtttcccaaaatttcaaactctttcactgtaaagatttgttacaaagaatgtggtttggggaattaccttattttatattgttgtaaacaaacttcaaattctacatgtgcgacttttctccttcctgaagggtgtttagtagtcagcgttttcagaattgttttgttactatactttaacattttacatttcctgtttgtattattttgtgagagcaaggtgatcatgctgcttaaggtccaggtacaacctatttgtaccttttgagacaatatttgtgttacttttgcaggttacggttccacatgtaattgctatattttgttttgtttttccttactaggcaaagttaaaatgttccatgctttgaggagtgacccatttcactactttgttttcttatcactaaaggcaaaaatcaaagcacagttgtccattaacacttataagttaattatgggtttatgagtctgtaatgttatatgctgcaaacatttactatgtaaacgtgaagtagccaataatatctcaatagtagtaacagtatctttagcgacctttggaatagttaagcacaggtcattgtggacatgaattcaggcctctgtactaaaatctatttcagggaatgttctgtctagtgatttgctcaccatttgatatataatgaattataggacaagtataagctgatctgctatagctgtccatcagagagaatacacgtggctataacatctataacaaaacgacgattcctctacaagaggctgtttctcactgctaacgttggtgtttctggcgtgggaagaaatgcacaggcgtgcatggcatgcacgttcagacagctgcattgtaagagttctgtcatgcagtctgaaaagggaagaaacaggatggctttctgtagccacacctgtgaggcgtgatgattgttgtattattagattactgatttttcttttctgaaaatacatttgagttttaatcacatctgtggaagctgtaacttttaaggtagtcaatttcatgtcttgttcaacgatgtaagcagaaactgaattgccctaattttgccaactggccattattgggattattgtttaaatttttggtaaaggaagtaatctcctttcattcattgtgacttttgttcttagggaagcagagaagactccccaagttcttataacctcattgtgcttccctaatttaaagccatgttgaggggctccattcccaattcctgggtcaaggtgaattaaccctatgttggagcactggaaaccgttatttgcaaacattgctgttaccatttagaaatatgtgcactatcagctgggtgcagtggctcacgtctgtaatcccagcactttgggaggccgaggcaggtggatcacctgaggtcaggagttcgagaccagcctggccaacagggtgaaaccccgtctctactaaaagtacaaaaattagctgggcgtggtggcggacgcctgtaatctcagctacttgggaggctgaagcaggagaggtgctggaacctgggaggcggaggttgaagtgagccgagattgcgctattgcactccagctcgggcgacaactgcaagactccatctcaaaaaaataaaaataaaagaaaagaaagaaatatgtgcactacctaagttttgtctttagaaaaactatccacctataaaaaattaccttgacaaaaatagttccggtttgactaatcattttgtttctttaagtggtaagtgtatgcaaggtggatccttgatgagccaacattgcactgtggatacatatctatgtttacgcgctattagaacagaaggcgctgtatatagaaatgttgctttgaagcaatatttgcaaaacacgcagacttctgtatctgtatttggaaaaaataaaacaggttcttgttaaaaaaaaaa

SEQ ID NO: 364 - DNA, 405 bp, HOMO SAPIENS
atacaagacactaatgctgctccccttcccttccaatactatgaaatcctctctaaaaatatcctcaaaatctttcttggtatagtgccctaggcagccattactaacgctgattggaattgactccgaaggtaaaacctatttggcacttttgctctaggcagtgttcaatttttttgtcagttttgtttagtttttggggtgttcctatgcctgagtgggattcttcttttggaaattggaaatagttgcatagtggtttttaacatgaattaaataggtgataattcacagagccccctttcccaacaaaataaacaaaaggtaggttagacggactattgggattaggatgttgttttaagctaggaggtggcagaccgcacaacctatgggccaaatcca

SEQ ID NO: 365 - DNA, 4154 bp, HOMO SAPIENS
agctgtgggtggagtcaccccgcggactggacgggaacctggcggggtcaggtcccgtcaagcagcctggctcatggctgtgtgcggcctggggagccgtcttggcctggggagccgtcttggcctgcgcgggtgcttcggcgccgccaggctcctgtatccccgtttccagagccgcggccctcagggcgtggaagacggggacaggccacagccttcctcgaagacacccaggatccccaagatttacaccaaaacgggagacaaagggttttctagtaccttcacaggagaaaggagacccaaagatgaccaagtgtttgaagccgtgggaactacagatgaattaagttcagctattgggtttgctctggaattagtcacagaaaagggccatacatttgccgaagagcttcagaaaatccagtgcacattgcaggacgtcggctcggccctggcgacaccatgctcctcggcccgggaggctcacttaaagtataccacgttcaaggcggggcccatcctggagctggagcagtggatcgacaagtacaccagccagctcccaccactcacggccttcatcctgccttcgggaggcaagatcagctcggcgctgcatttctgccgggccgtgtgccgccgggccgagagacgtgtggtgcctcttgtccagatgggagagaccgatgcgaacgtggccaagttcttaaacagactcagtgactatctcttcacgctagccagatatgcagccatgaaggaggggaatcaagagaaaatatacatgaaaaatgacccatcggccgagtctgagggactctgaaatcacagaaagtgggagcttggaggatccctccatggcgatggccgtggagagaggagcttgcccttctggggtcctggttcctgaagagctcacccagagaggctcaaagcagccttttgtcccagctcagctttgatctacacctcttgccaccttcctcaagggactgtgaccctttggggattctgtccctgaccctgcttccccaagctctcctgggtcttggagggatgtgggaatgaattggcattgcaggaaagacaggtaaagtgattgctgcaatgagaaggagctgtgcggaaaaggaataaaagttggaaaggctggagccgtgtgtgtgtgtgtgtgtgtgtgtgtgtgtgtgtgtgtgtgtgtgagagagagccctcccactgccagctcaggttgttcacagatttggaatgggaccagaggcccttgaaaatgtaattgtgatttacctgtgccaaaggtgctttaaatgtcacatttgtaaaggggaaggcggacaagatttggaagtttagtcacctctgagccacccatcaccgccaaagtgtgggggaaggatagctgcagattgacaggcgaggctcagaaactcctggcttagattgaagtgtgtgtgatgggggtgcagcttagaggaccccctctgaaagggatggagatgctgatgagaacaacactaccacttgaaggtgaacattccctgtctggttggactgagtcaagggtctgcggtgcagcatcttcagcttgagaaaatgaggttgtcagtttccagcaaggctgacatccaccagactgatttctccgatgttgcacttggctggcttatgcctctgagatcggtgccacggctgtatttatttcagttgtcactgctgctccctcctgctatgaaacgacactgccagtgccagcagtgtccttgggaaaggcaatatttatgaagggcagaagaggcagccccaagaacctaaagactgcaggctgctaattgcaggaaatgactttggaagggcaggctcttgtccagtttcagggctgaaatgcctggcgaactccattcagccatcacatattgactgagtggctgcttagcatgggccaccgcgctaggctcgggacagctggtctttccggccatctttcttgctggcaagtcagcaaacattaccttcttagtcacgtgcatatttttgccttcattcttaccacctggcctgcaaagtttgcaggagggccaggtatattcacttgtgtcttctgggtcctttcattgctgacaggctgtgatggccctcttgagccttgggcagggtgggtgaggtgcagatgaccaggagtgtgtgaatgccttccaggaggtggctttgttccgtgcctccctgcccccatcgtcactaccaggtctggtacggagtcggtgctcagtgtttgcaaaacagagctgaaaacggactttgggaggccgaggcaggcagatcacctgaggtcaggagtttgagaccagcctggtcaacatggtaaaaccccatttctgctaaaaaaaaaaaaaaaaaaaaaaaattagctgggcatggtggcgggtgcctgtaatcccagctattcaggaggctgaggcaggagaatcacttgaacctacgaggcagaggctgcagtgagccaagatcgtgacacgacactccagcctggctgatagagtgagactccgtcacaaaaaaaaaaaaaaaaaaaaaaaaaccctgaaaacgcaatcactaaggctcggtcagggagtatgttcaaagagcttgcagcgaatcactcaattctgtctacacctcaaaatctcaaaatcttcctggaatatatatatatatataaaataacacagcagccctgcatgcctagccatgggaaagcacagcctccaaaggataaggaaagctttttgagtaaatacaacatcctaaagtgacaatctttgaaacaaggccgttcacctgttgccaagtcctgtccttccaggaccgggtgtcacagcctggatgttaacagtcgcgttctcagacccccgcctctgtatctgtctcccggttcaccagcaaacacttctctgagaaaccacctgggtgcagggcagatgccaccactcagcaggtgtttctctcctgtgctaccaacctgggaaaaatggagaaagcttgctttgggggctggaaggatggggtgtttaaaacatttgctcttctgcagtgcctttcaaaagctctatcaagagcccgaggcaaaagaaaagatgtgtacccctctgtacactgagcaaatgtcctcccatattttgaaccaggtgggaaaagttaatgaaagccctacagtcaggaaatgtgactgcgaagcccccgctgccccagtgtttgcacaccactggcaactctcagaaacaatcagtcccattgcacgggaacacggggttttgaaacaaacagcagcctgtttttatttaaagtcgtgatcccttgcttatcgtagatttttttcataatttgattttggaaaatattgcacacaaatactactcgatccctgagtttgtgggcacttccttacattttgcacccatgaaaatgcctcctccgcctccaggtcaggctccctggaatggggtgtttagtgtcatttccagagacaagctggcagttggctcttgtgtcagagagaagcccacagtcacagtgacaccagcccgcactgtggaagggcttgctatgtgcagtgccctgagccaagtgttccacagacattatctcatttgaaccccatagcagccctggaaggaggcattgggtggggaaccaagttgtcctggggagtcagtgccaagatgtgagccccggacgcggcctcgtcactcacagccccgtgctcctcagctcccacccactgccgcttgacagtcgttttaatcactacctgggctgtggcgaacaatgccaggctctgatagatcctgctgtctcatttctcaacctagtttcccttaactaatatttcatggctatcgttaatgtgcgtttttcatcgagtaatttccacagcccgaacttgtaacacatcccaatgacaaacgtccccagttcggaagcccccgtcagtggcaatgtcacccttgctgctgcctcgacaccttccgacagcccattcagttttatgatcgccctgtcccagtgatcactactgaacctttaagaatccagatgcatttcaagtttaattgaataaaattctttgtataataaattccgcatgaatgctacataaaaaaaaaaaaaaaaaa

SEQ ID NO: 366 - DNA, 3485 bp, HOMO SAPIENS
agtcgcccaggggagcccggagaagcaggctcaggagggagggagccagaggaaaagaagaggaggagaaggaggaggacccggggagggaggcgcggcgcgggaggaggaggggcgcagccgcggagccagtggccccgcttggacgcgctgctctccagatacccccggagctccagccgcgcggatcgcgcgctcccgccgctctgcccctaaacttctgccgtagctccctttcaagccagcgaatttattccttaaaaccagaaactgaacctcggcacgggaaaggagtccgcggaggagcaaaaccacagcagagcaagaagagcttcagagagcagccttcccggagcaccaactccgtgtcgggagtgcagaaaccaacaagtgagagggcgccgcgttcccggggcgcagctgcgggcggcgggagcaggcgcaggaggaggaagcgagcgcccccgagccccgagcccgagtccccgagcctgagccgcaatcgctgcggtactctgctccggattcgtgtgcgcgggctgcgccgagcgctgggcaggaggcttcgttttgccctggttgcaagcagcggctgggagcagccggtccctggggaatatgcggcgcgcgtggatcctgctcaccttgggcttggtggcctgcgtgtcggcggagtcgagagcagagctgacatctgataaagacatgtaccttgacaacagctccattgaagaagcttcaggagtgtatcctattgatgacgatgactacgcttctgcgtctggctcgggagctgatgaggatgtagagagtccagagctgacaacatctcgaccacttccaaagatactgttgactagtgctgctccaaaagtggaaaccacgacgctgaatatacagaacaagatacctgctcagacaaagtcacctgaagaaactgataaagagaaagttcacctctctgactcagaaaggaaaatggacccagccgaagaggatacaaatgtgtatactgagaaacactcagacagtctgtttaaacggacagaagtcctagcagctgtcattgctggtggagttattggctttctctttgcaatttttcttatcctgctgttggtgtatcgcatgagaaagaaggatgaaggaagctatgaccttggagaacgcaaaccatccagtgctgcttatcagaaggcacctactaaggagttttatgcgtaaaactccaacttagtgtctctatttatgagatcactgaacttttcaaaataaagcttttgcatagaataatgaagatctttgttttttgttttcattaaagagccattctggcactttaatgataaaatcccattgtatttaaaacatttcatgtatttctttagaacaacataaaattaaaatttaacatctgcagtgttctgtgaatagcagtggcaaaatattatgttatgaaaaccctcgatgttcatggaattggtttaaacttttatgcgcaaatacaaaatgattgtctttttcctatgactcaaagatgaaagctgtttcatttgtgtcagcatgtctcagattgaccttaccaagttggtcttactttgttaatttatctgttgtccccttcctctcctctgccctcccttcttgtgcccttaaaaccaaaccctatgccttttgtagctgtcatggtgcaatttgtctttggaaaattcagataatggtaatttagtgtatatgtgattttcaaatatgtaaactttaacttccactttgtataaatttttaagtgtcagactatccattttacacttgctttatttttcattacctgtagctttgggcagatttgcaacagcaaattaatgtgtaaaattggattattactacaaaaccgtttagtcatatctatctaatcagatcttcttttgggaggatttgatgtaagttactgacaagcctcagcaaacccaaagatgttaacagtattttaagaagttgctgcagattcctttggccactgtatttgttaatttcttgcaatttgaaggtacgagtagaggtttaaagaaaaatcagtttttgttcttaaaaatgcatttaagttgtaaacgtctttttaagcctttgaagtgcctctgattctatgtaacttgttgcagactggtgttaatgagtatatgtaacagtttaaaaaaaaagttggtattttataagcacagacaattctaatggtaacttttgtagtcttatgaatagacataaattgtaatttgggaacataaaaactactgaataaatcatgtggcctaatattgaaaatgtcactgttataaattttgtacatttttgatcaaatgtacatctcccctttgctaacggccgtctgctctcaaggatgacgtgggtttgatttctaagtgtttcacagtgtctgtaaatcaagaccaaagagcctgtcgatgagactgtttattaccagattcacttctgaattggccagaggaaatctgaatgtattatcctgtgtgtgtctaggtagagatattggaaggctgccaggggatttcgaagtttgcaacctttataggataactgatggcaatattaagacagacgcctgcttttgcaaataacttacaagactgtaaattccaaagatctgaatggggctttcctgatgttggtatctaaggcttaggcctatagattgatttacctttggaattgtgctccaaatgtctactgaagcttaaccgaagaactaataaatggactacagtagctcacgttacagggaaggagggtaggcagggaggctctgtgtgttaaaatgagggtctcactgctttaggattgaagtggctggaaagagtgatgcctggggaaggagatggagttatgagggtactgtggctggtactttctgtactaaacatttcctttttctattttaccactaattttgttttaaactgtgagccgtccaagtcagaagaagacagcaaaaaaagcaacttttccaacatacaatttacttttaataaagtatgaatatttcattttgagaacattccctggaattgccacataattcattaaaaacatttttttaagcaacacttggaacagtgtttactttaaatccttaatggccttaattaattctcagattcctgccccatcacttacagaaccaattcactttagagtgactaaaaggaaacgatagcctagctttctaaagccacgctgtgtccctcaattacagagggtaggaatgggtatacctctaactgtgcaaagcagagtgaaattcaattcatagaataacaactgctgggaatatccgtgccaggaaaagaaaaatttctggcaaatattttgtcactgctgtaaagcaaaatatttgtgaaagtgccaaaataaagtctgtcatgccaaaagtaaatcattgtatagactgacatccagttttcttcaactgt

SEQ ID NO: 367 - DNA, 2243 bp, HOMO SAPIENS
gggacactggggctgggggggtttgttgggctggtgagttttcgaggtgactgtgctgtgctcggtgaggggacgcccagagagccctgacccggggtcactccgtcgccgttctcctcttgtctacgtgctggacccggtgctacctttttacccacacttaagtgacgcaaaatgcccttcaatggcgagaagcagtgtgtgggagaggaccagccaagcgattctgattcttcccggttttccgaaagcatggcttcgctcagtgactatgaatgctccaggcagagctttgcaagtgactcctccagcaaatccagctctcctgcttcaacaagccctccaagggttgtaacatttgatgaagtgatggctacagcaaggaacttatcaaacttgactcttgctcatgagattgctgtaaatgagaactttcaattgaaacaagaggctctcccagaaaagagtttggctggtcgagtgaagcacattgttcaccaggccttctgggacgtcttggattcagaactaaatgctgaccctcctgagtttgaacatgccatcaaactgtttgaagaaatcagagagattcttctctcttttctcactcccggtggcaaccggcttcgcaaccaaatctgtgaagttttggacacagacctcattaggcagcaggctgagcacagtgctgttgacatccaaggcctggccaactatgtcatcagtacgatgggaaagctgtgtgctcccgtgcgagataatgatatcagagagttaaaggctactggcaacatcgtggaggtgctgagacaaatattccatgtcctggacctcatgcaaatggacatggccaattttacaattatgagtctcagaccgcaccttcaacgccagttggtggaatatgagagaaccaagttccaggaaattttggaagaaactccaagtgctcttgatcagactacagaatggataaaagaatctgtaaatgaagaattattttctctttctgagagtgctttaactcctggggccgaaaatacctccaagccaagcctgagccctactttggtgctaaataatagttacttgaaactgttacagtgggattatcagaaaaaagaattaccagagacacttatgacagatggagcacgtcttcaggaactaacagaaaagctgaatcaattgaaaattattgcctgcctgtccctaattaccaacaacatggtgggtgctattacaggaggcctgcctgagcttgcaagcaggttaacaaggatttcagctgttctacttgaaggcatgaacaaagagacctttaacttgaaggaagtcctgaattctattggtattcagacttgtgttgaggttaacaagaccctgatggaaagaggtttacccactttaaatgctgagattcaagctaatcttataggtcaattttcaagcattgaagaggaggacaatcctatctggtccttgattgataaacgaattaagctttacatgagaaggctactttgtcttccaagccctcaaaaatgcatgcctcctatgccaggaggcctagctgtcattcagcaggagctagaagccctaggctctcaatatgcaaacattgtgaatctcaacaaacaagtgtatggaccattttatgcaaatatacttcgaaagctgctcttcaatgaggaagccatggggaaggtagatgcttcacctcctactaactaaagaagaactgacattggacgagagattggaaatccagtactttggtatccagtccacttccattgatggcattagagatccagcacattctcagtactgtggtgcagtattagcccaaatctgtgtaatgggtaatattagcattacagaagacacacacatcacatagaccctcagaagacgtaaacatcacatagaccctatttgtgcatcattttcaagtttaaaacagatatttgtaatgaacagaaaacaatttgtaattaattatattacctatataatacttgtaaatgttttcttaaccatttatatttggcttatgacatttaacccctaaggagttgtttttctcacttgttattatcaaacctaatggtttttaattttggtacaactccttaaagggttgaaggttgtgacaataactgagggaactgatgttctgaataaatgatgtgaagtaaacacaattgtatttgaaaaaaaaaaaaaaaaaaaaaaaaaaa

SEQ ID NO: 368 - DNA, 278 bp, HOMO SAPIENS
aacataggttatctccacatttaatttaaaatgacattgctttttaaaacagtttttaggtctgaatacacatttctcaaaaaaagatataaaatggccaataagcatatgaaaagatgcttagggaattagtcattagggaaatacaaatcagaaccacaatgagacataatttcacatctaccaggatagcactagagtcaaaaaggcataataacaagtgctggcaaagagagaaattagaattctcaaaacgccactggtgggactgtgaaatg

SEQ ID NO: 369 - DNA, 1937 bp, HOMO SAPIENS
actggttccagttcactcggcagcggcgccgggcggagggggagagcgcgggccgcgcgggcgggaagcgaagaggcgggcgggccagcgaggagcgcggagagaaaaggcgcgagcggccaggagggctcaggccgagacaccttgcagctgccgccgccgccaccgagccgccgctgtgctcactgatccgcctccagggccaccgccatgtcgagccgcggtgggaagaagaagtccaccaagacgtccaggtctgccaaagcaggagtcatctttcccgtggggcggatgctgcggtacatcaagaaaggccaccccaagtacaggattggagtgggggcacccgtgtacatggccgccgtcctggaatacctgacagcggagattctggagctggctggcaatgcagcgagagacaacaagaagggacgggtcacaccccggcacatcctgctggctgtggccaatgatgaagagctgaatcagctgctaaaaggagtcaccatagccagtgggggtgtgttacccaacatccaccccgagttgctagcgaagaagcggggatccaaaggaaagttggaagccatcatcacaccacccccagccaaaaaggccaagtctccatcccagaagaagcctgtatctaaaaaagcaggaggcaagaaaggggcccggaaatccaagaagcagggtgaagtcagtaaggcagccagcgccgacagcacaaccgagggcacacctgccgacggcttcacagtcctctccaccaagagcctcttccttggccagaagctgaaccttattcacagtgaaatcagtaatttagccggctttgaggtggaggccataatcaatcctaccaatgctgacattgaccttaaagatgacctaggaaacacgctggagaagaaaggtggcaaggagtttgtggaagctgtcctggaactccggaaaaagaacgggcccttggaagtagctggagctgctgtcagcgcaggccatggcctgcctgccaagtttgtgatccactgtaatagtccagtttggggtgcagacaagtgtgaagaacttctggaaaagacagtgaaaaactgcttggccctggctgatgataagaagctgaaatccattgcatttccatccatcggcagcggcaggaacggttttccaaagcagacagcagctcagctgattctgaaggccatctccagttacttcgtgtctacaatgtcctcttccatcaaaacggtgtacttcgtgctttttgacagcgagagtataggcatctatgtgcaggaaatggccaagctggacgccaactaggctgagcaatgacagaaccagctgcaccatgtaccccaccttcagtttaaaagaaaaaaaaaatccccttcactcctactgggaggtgggacccctttcattttcagttttgctcatctagggaaaataaggctttggtttccagtttaattgtttttgaccttctaaaatgtttttatgttagcactgatagttggcattactgttgttaagcactgtgttccagaccgtgtctgacttagtgtaacctaggagattttatagttttattttaatgaaaccctgattgacgcacagcagtggggagaacagcgtcttttacctgtcaccgaagccaggaagccccgtttgtaagcgtgtgttgtggtgctttattgtacatcctccagtggcgttctttttactctaatgttcttttggtttcccccctcagaagaatcatgaatttgcaacagacctaatttttggttactttttgtcttattgatggatttgaaaatgaaagatttaataaggcaaagcagaatctgttgtccttaattatatttgcaatttggaatttgtgtgagttgatttagtaaaatgttaaaccgttaaaaaaaaaaaaaaaa

SEQ ID NO: 370 - DNA, 551 bp, HOMO SAPIENS
  misc_feature (34)..(34): n is a, c, g, or t
  misc_feature (72)..(72): n is a, c, g, or t
  misc_feature (75)..(75): n is a, c, g, or t
  misc_feature (79)..(79): n is a, c, g, or t
  misc_feature (121)..(121): n is a, c, g, or t
  misc_feature (277)..(277): n is a, c, g, or t
  misc_feature (439)..(439): n is a, c, g, or t
taaactcctgcctagattctgccaagctcttttnaagatctggttcaggatgagcctgaactgggtcctccntcntgtnactgcccctttttcacagacgggtggggcgctttggggcctnatgctttctgggaggagcttgagggtaggctggtacctggcaggtgaggagtggagtctacagctccaaatgtgaaaatgaaataagatcaaactcaaagaggggttgaggacaagtgagcaagtttgttgatgattaacttgcagatccttcccngtgtcccttaccctctggactggcctttgctgggtgagccttgcagtcaaagccggcagctaggatttggggtgcacatgtctctctgctagggctctgagggcatggggactctgttcttggagctgagaaaccttgcttctctttccttccagccttgcnggccttgcccgtgtgggactgcatcagagcgtactgaaatcactggccctcatctggtttcagagctgccagttaagctgttagattctcccacccctggtgacagtgatgc

SEQ ID NO: 371 - DNA, 212 bp, HOMO SAPIENS
ccaacatggcgcaggtacacatatgtaacaaacctgcatgttgtgcacatgtaccctaaaacttaaagtaaaataacaataaaatgaaaaaaaaaagaaaaaaaagaaatatttatgaatgtaaatgtttattgtccatttttaactaataagcaagcttactaaaaactgcacttcacacttagcttaatgtttgagggaattaacttcat

SEQ ID NO: 372 - DNA, 787 bp, HOMO SAPIENS
ctccgccccctcccactctctctttccggtgtggagtctggagacgacgtgcaggtaggaggcccgggcgcgacaatcggggggcatcctgcggcgaggggaccctgtggggcttgggacgagagacgggggtctttccgtgggaaccgagctaggtgccgggcaagagacgcgcggctggcccacctggatcctggccaactcgggattgagttcgttcctggtctcagaaggcccgttttgctttcagggaggagcttgtgaaaaatggcacctcgaaaggggaaggaaaagaaggaagaacaggtcatcagcctcggacctcaggtggctgaaggagagaatgtatttggtgtctgccatatctttgcatccttcaatgacacttttgtccatgtcactgatctttctggcaaggaaaccatctgccgtgtgactggtgggatgaaggtaaaggcagaccgagatgaatcctcaccatatgctgctatgttggctgcccaggatgtggcccagaggtgcaaggagctgggtatcaccgccctacacatcaaactccgggccacaggaggaaataggaccaagacccctggacctggggcccagtcggccctcagagcccttgcccgctcgggtatgaagatcgggcggattgaggatgtcacccccatcccctctgacagcactcgcaggaaggggggtcgccgtggtcgccgtctgtgaacaagattcctcaaaatattttctgttaataaattgccttcatgtaaactgtttcaaaaaaaaa

SEQ ID NO: 373 - DNA, 332 bp, HOMO SAPIENS
  misc_feature (148)..(148): n is a, c, g, or t
  misc_feature (165)..(165): n is a, c, g, or t
aagtgcatctttctgcctacaagaatcacatgacccctttcaataatttatgtagtagagaaaaacacactatttctcatagagttttcagtcatgtgctgtggtgtgattgtttctggacattcataaaattttatagttaactganttctcttttctgttttnttgctatttaacgtccattgaaaacatggctttcttttgcgcattctgttactttcagctgtactttctaataagaatggattgccctttttagcaatctttgattgaactggtacatttcagattacttaaatgtcatcaggccacacagcataccaggtaacaga

SEQ ID NO: 374 - DNA, 3693 bp, HOMO SAPIENS
gcttcatttccgggtgaaactggcattgagggtactggggcgtgcgtgaggcgtttactgatgcttcctggtccggtggcctcggtcccggtaagccaggcatgaagatcacaaggcagaaacatgccaagaagcatcttggcttcttccgcaacaacttcggagtccgcgagccgtaccagatcctgctggacggcaccttctgtcaggcggcgctgcggggccgcatccagctgcgggagcagctgccccgctacctcatgggggagacgcagctgtgcaccacaagatgtgtgttaaaagagctagaaacattgggaaaggacttatatggggcaaaactgattgcacaaaaatgccaagttcgaaattgtcctcatttcaagaatgcagtgagtggatcagaatgtctgctttccatggttgaagagggaaatcctcatcattattttgtggcaacacaggatcagaatttgtctgtgaaagtaaaaaagaagcctggagttcctctcatgtttattattcagaacactatggttttggacaaaccttctcccaaaacaattgcctttgtaaaagcagtggagtcaggtcagcttgtctcagtgcatgagaaagaaagtatcaaacatctcaaagaggaacagggtttagtgaaaaacactgaacagagtagaagaaaaaagcgcaagaaaataagtggtcccaatcctcttagttgtttgaagaaaaagaaaaaggcaccggacacacaatcatctgcttctgaaaagaaaagaaaaagaaaaagaattcggaacagatctaacccaaaagtactttctgagaagcagaatgcagaaggagaatgaatcctttggatactttcaaggacattcaaatgtgaaaatgaattttttacaactagaagtatttataataaaagaccaaacttatttttgtaaatgaacccatatgctttagctaaaattaattataaaataaaaacagtgaccagtctagccagcatggcaaaaccccatctctactaaaatacaaaaattagctgggcatgatggtgcacagttgtaattccagctactcaggaggctgaggcatgagaatcgcttgaacctgggaggcagagattgcagtgagcccagttcgtgtcacttcactccagcctgggcaacagagtgagaacatgtctcaaaaaaaaaataaaaacagtgaatgggtgtaggtgtgatggaattcactttacttactaaatggtttcgggaggttgtttctccaggtaaaattgtcgcctctctggtcccattcccaccttcaaacattatatgcaaacagttttaaaaaatcttacagttctaaaaggcttgtgacaaaaaaagaggcagtccctctttcacattgacagaagaaacttcctctttcaattctagtagttgaagaatttatatttccaaattgtatgattataccgctactttttgatacatcaattatttattgacttcctactagaaagagtgaaattttgcccatttatactgcaccatttttccagtatatgaatattttactctttgtacatcagaaactcagtattttcattattatgactagagtttttttgtttgtttgtttgagttctacttgtccaataaggatgatgattttcttttagatgtaaatgttaacttcaatagcaagaattcaaaaataatattctctttgagattgactgtgaatgttattgaaaagtgtctaaattagtctgaggatcaatgagggtcaattcagttaggaattgaataatgaaacgtgtctctctgaattcccccggcaattgttttagtcatttatcaggccaaaattaaaatgtttttgtactacaagatggaagtataaaattattggacaagtgaaatcgtatcagtagttcctgactgacagcttctggagccacactagagcagtgattctcagtctaacattaggttatcatgatgacgtatgagtaaattcttaatggttaaatgtgagacagttcacatttattcccatagaaatgtcattctcatttgaattcagagatacttctttgctggaagttggaattatagctttacaccaaggagtgacacgtagactaatctggcaagccaaggtagtgtttggattgcaatgtcatgattctattttaaattcttgatggtagaaacatttttaataaggaaggtaaaaatactggaaaaaagtgaatagtgtaggttttgtgaggaaagttaacatttgtcaatgacaagcattaaggccacctaataaagtgtagacaaagtgataaatgaaatatacactgatgatactcatttcaatatgctaaaatacattaaatttaggtattactcttaatctatttctacttagtcagtgctatctgattacctgttaatagcatctgaactggagagctggaaaaatccacttttttatgaagcagtaattatagaagtactaaaaattacaatgtattagtaagtttaatattttgacagggcatggtggctcacacctgtaatcccagcactttgggaggccgaggctggcagatcacaaaattaagagatcaagaccatcctggccaacatggtgaaaccctgtctgtactaaaaatacaaaaattagctgggtgtggtggtgtgcgcctgtagtcccagctactcgggaggctgaggcaggagaatcgcttgaacccaggaggcggaggttgcagtgagccaagatcatgccactgcactccagcctggtgagagagtgaaaccccgtctcaaaaataaataaataaataagtttactattttaaaactggttaatcatttatgtattttgccagtaaaattactttaaaagatattttaacaaaagtctcatatccttgtacttcagtttttttgtgtgtgaatactatccctataccactacccctaaaacctcagaattatttgctttattttttcatacaacttggggaagggaaccatgggagtatgcacatgggatcataatccattctgtggtttggaaaaagaaaatgttaacctctgctttagagggtagctactagctttgttggggataaaagtgtaatacatgcacttttgaactctgaaagtttgccaatctgaaaaggggtgtttctgaagaccactatcttttacgaacacttaaaaataagtgtttgcagttgtgtatgggcacgatactgtattctttacatttttatggccctacagctacttcttatccctgcaagtatataaattaaaaccaagtcactttagaacagctttgaaactagagtttcaaaggtaaaaggatctcatgtttctgaatctgcgtaaagcaagatggctgtgatttgacaggtttaattgctagttttttataggtggatagaaatgaatagtttggagtctttaaaatgttttaaaaaatgtttgcttactatctatatatatgacattattcccaattagttttatatctccaagatatatatatgtatataggtatatacacatatgtatatatacatagtctatatattctatataagaatatattccaataagaatatattccatacgggaatatattagtcattgatgtattttgccggtaaaattaaaagatattttaacaaaa

SEQ ID NO: 375 - DNA, 331 bp, HOMO SAPIENS
  misc_feature (50)..(50): n is a, c, g, or t
ccctccctagtggaagtgcttgcctactcccctaggacaggtaagtcctnggaaagtctaatcctcaatcttttgggcacaagttttataagggccaaccaagcatggagtcagggaaaaataggatcgagggccacaaaaaaagatggaagtggtaaaatagaagaaaacatcttaaccggaataaaggcttccattcaaaacccaagaagggtcctttgagggataaaaggtacaaaaataacagcaagacaagaggaataaaacccacatgaatcactgtggcatccagtttctattcacaaagaaaaagctccagtccatcttttaa

SEQ ID NO: 376 - DNA, 1849 bp, HOMO SAPIENS
gcagcggggctgccgctggttggtccgcacgtggaacctctcctggtcctgttgacccgggcccctcggaacctccagcttggtccggtctgggactggaagcctgccatggcggcttctgcggcggagacgcgcgtgtttctggaggtgcggggacagctgcagagcgcgcttctgatcctgggagaaccgaaagaaggaggtatgcccatgaatatttccataatgccatcttcactccagatgaaaacccctgaaggctgcacagaaatccagcttccagcagaggtcaggcttgtaccttcctcttgccgtgggctacagtttgttgttggagatggactgcacctgcgactgcagacgcaagcaaaattaggcacaaaactgatttcaatgtttaatcaaagctcgcaaacccaagaatgttgcacgttttattgccaatcctgcggtgaagtcataataaaagacaggaagctcctcagggtgctcccactgccgagtgagaactggggagctctagttggagaatggtgttgtcatcctgacccctttgctaataaatcacttcatccgcaagagaatgactgttttattggagactctttcttcttggtgaatttaagaaccagtttgtggcagcaaagacctgaactatccccagtggagatgtgctgtgtttcttctgacaaccattgtaaattggaaccaaaggcaaataccaaagtaatttgtaagcgttgcaaggtaatgttgggagagaccgtgtcatcagaaaccaccaagttttatatgacagagataattattcagtcatctgagaggagttttcctatcataccaaggtcttggtttgtccagagcgtgatcgcccagtgtctggtgcagctctcctctgctagaagcacttttagattcacgattcaaggtcaggatgacaaagtgtatatcttgctatggcttttaaattcagacagtttggtgattgaatctttgagaaattccaaatatatcaaaaaattccccttgttggaaaacacattcaaagccgattctagttctgcctggagtgctgtcaaggtcctctaccagccatgcatcaaaagcaggaatgaaaaacttgtcagcttgtgggaaagtgacatcagcgtccacccgctaaccctgccctctgcaacctgcttggagctgctgttgatattgtcaaagagtaatgccaatctgccttcatcccttcgccgtgtgaattcctttcaggtggcctttttgaagatgtaactattagagctgggcattctcctcccccggcagacagctctcaagcaggagcacaccgaggccagcagtcagctcaggaggcatcaattacaaagacaagaaccagagctatgggataagagcattgcattgaagttttaagtttacttgtttgcatgtattctctaagagaagagttaactttagatctttgaaaacccaggactgtgaagaaagtcatagtagcaggttgaggcaagtgtagaagttacatctctatttcccacagagaggaatattcacatatgtgcagtgtcagcaccacctggaaggttattacctaatagagatccatctgtcctgtgtggaatccagtgaggaattttattggtggaactgaatgttaactgctgtaaatcctaggaaataaacttttaaagagtttctcaggatgatttaaaacaaattttaaaaaagaaaagtagaaaacattttatactttattcagaggagatgctcaatagatgtttgttgaatgaatgattatcaaattaaaggatttcctatttatgcaaaaaaaaaaaaaaaaaaa

SEQ ID NO: 377 - DNA, 537 bp, HOMO SAPIENS
  misc_feature (129)..(129): n is a, c, g, or t
  misc_feature (140)..(140): n is a, c, g, or t
aacactagcagcctaatctctcagtagatctgcttgccagataacagctgtatggaaaaacacggggaccaattttacaatgtttttccccccaattcataccagccgtgaactgtgatgctccccccnattctacaatnggcagataatgagagttccttgccctccagttctccaagccgtttcgaagaagacctgctaattgaattcagttgtttgcagttttaaatgttcatgctttccacaaaacaagaatatattaaactcatttcatctgtcatccaagaagaattggagcctgcatttttattaccaactgacttgtgtgttcatctttatcccagattttttttgaaatgtttacaatgtaattaaaaacaatcaagtcaaatgatgtatttgaattgttccctttgggagaagataaaggagaaaatatagctacaattgcttcatttttgctgagtatttctgccttctcaacagaaatacatcatgtatctgctcacctagagcgttttgtaatgtcactggtga

SEQ ID NO: 378 - DNA, 14340 bp, HOMO SAPIENS
cccactcgctggctctctctccagctgcctcctctccaggtctctcctggctgcgcgcgctcctctccccgcttctccccctcccgcagcctcgccgccttggtgccttcctgcccggctcggccggcgctcgtccccggccccggccccgccagcccgggtctccgcgctcggagcagctcagccctgcagtggctcgggacccgatgctatgagagggaagcgagccgggcgcccagaccttcaggaggcgtcggatgcgcggcgggtcttgggaccgggctctctctccggctcgccttgccctcgggtgattatttggctccgctcatagccctgccttcctcggaggagccatcggtgtcgcgtgcgtgtggagtatctgcagacatgactgcgtggaggagattccagtcgctgctcctgcttctcgggctgctggtgctgtgcgcgaggctcctcactgcagcgaagggtcagaactgtggaggcttagtccagggtcccaatggcactattgagagcccagggtttcctcacgggtatccgaactatgccaactgcacctggatcatcatcacgggcgagcgcaataggatacagttgtccttccatacctttgctcttgaagaagattttgatattttatcagtttacgatggacagcctcaacaagggaatttaaaagtgagattatcgggatttcagctgccctcctctatagtgagtacaggatctatcctcactctgtggttcacgacagacttcgctgtgagtgcccaaggtttcaaagcattatatgaagttttacctagccacacttgtggaaatcctggagaaatcctgaaaggagttctgcatggaacgagattcaacataggagacaaaatccggtacagctgcctccctggctacatcttggaaggccacgccatcctgacctgcatcgtcagcccaggaaatggtgcatcgtgggacttcccagctcccttttgcagagctgagggagcctgcggaggaaccttacgcgggaccagcagctccatctccagcccgcacttcccttcagagtacgagaacaacgcggactgcacctggaccattctggctgagcccggggacaccattgcgctggtcttcactgactttcagctagaagaaggatatgatttcttagagatcagtggcacggaagctccatccatatggctaactggcatgaacctcccctctccagttatcagtagcaagaattggctacgactccatttcacctctgacagcaaccaccgacgcaaaggatttaacgctcagttccaagtgaaaaaggcgattgagttgaagtcaagaggagtcaagatgctgcccagcaaggatggaagccataaaaactctgtcttgagccaaggaggtgttgcattggtctctgacatgtgtccagatcctgggattccagaaaatggtagaagagcaggttccgacttcagggttggtgcaaatgtacagttttcatgtgaggacaattacgtgctccagggatctaaaagcatcacctgtcagagagttacagagacgctcgctgcttggagtgaccacaggcccatctgccgagcgagaacatgtggatccaatctgcgtgggcccagcggcgtcattacctcccctaattatccggttcagtatgaagataatgcacactgtgtgtgggtcatcaccaccaccgacccggacaaggtcatcaagcttgcctttgaagagtttgagctggagcgaggctatgacaccctgacggttggtgatgctgggaaggtgggagacaccagatcggtcttgtacgtgctcacgggatccagtgttcctgacctcattgtgagcatgagcaaccagatgtggctacatctgcagtcggatgatagcattggctcacctgggtttaaagctgtttaccaagaaattgaaaagggagggtgtggggatcctggaatccccgcctatgggaagcggacgggcagcagtttcctccatggagatacactcacctttgaatgcccggcggcctttgagctggtgggggagagagttatcacctgtcagcagaacaatcagtggtctggcaacaagcccagctgtgtattttcatgtttcttcaactttacggcatcatctgggattattctgtcaccaaattatccagaggaatatgggaacaacatgaactgtgtctggttgattatctcggagccaggaagtcgaattcacctaatctttaatgattttgatgttgagcctcagtttgactttctcgcggtcaaggatgatggcatttctgacataactgtcctgggtactttttctggcaatgaagtgccttcccagctggccagcagtgggcatatagttcgcttggaatttcagtctgaccattccactactggcagagggttcaacatcacttacaccacatttggtcagaatgagtgccatgatcctggcattcctataaacggacgacgttttggtgacaggtttctactcgggagctcggtttctttccactgtgatgatggctttgtcaagacccagggatccgagtccattacctgcatactgcaagacgggaacgtggtctggagctccaccgtgccccgctgtgaagctccatgtggtggacatctgacagcgtccagcggagtcattttgcctcctggatggccaggatattataaggattctttacattgtgaatggataattgaagcaaaaccaggccactctatcaaaataacttttgacagatttcagacagaggtcaattatgacaccttggaggtcagagatgggccagccagttcgtccccactgatcggcgagtaccacggcacccaggcaccccagttcctcatcagcaccgggaacttcatgtacctgctgttcaccactgacaacagccgctccagcatcggcttcctcatccactatgagagtgtgacgcttgagtcggattcctgcctggacccgggcatccctgtgaacggccatcgccacggtggagactttggcatcaggtccacagtgactttcagctgtgacccggggtacacactaagtgacgacgagcccctcgtctgtgagaggaaccaccagtggaaccacgccttgcccagctgcgacgctctatgtggaggctacatccaagggaagagtggaacagtcctttctcctgggtttccagatttttatccaaactctctaaactgcacgtggaccattgaagtgtctcatgggaaaggagttcaaatgatctttcacacctttcatcttgagagttcccacgactatttactgatcacagaggatggaagtttttccgagcccgttgccaggctcaccgggtcggtgttgcctcatacgatcaaggcaggcctgtttggaaacttcactgcccagcttcggtttatatcagacttctcaatttcgtacgagggcttcaatatcacattttcagaatatgacctggagccatgtgatgatcctggagtccctgccttcagccgaagaattggttttcactttggtgtgggagactctctgacgttttcctgcttcctgggatatcgtttagaaggtgccaccaagcttacctgcctgggtgggggccgccgtgtgtggagtgcacctctgccaaggtgtgtggccgaatgtggagcaagtgtcaaaggaaatgaaggaacattactgtctccaaattttccatccaattatgataataaccatgagtgtatctataaaatagaaacagaagccggcaagggcatccaccttagaacacgaagcttccagctgtttgaaggagatactctaaaggtatatgatggaaaagacagttcctcacgtccactgggcacgttcactaaaaatgaacttctggggctgatcctaaacagcacatccaatcacctgtggctagagttcaacaccaatggatctgacaccgaccaaggttttcaactcacctataccagttttgatctggtaaaatgtgaggatccgggcatccctaactacggctataggatccgtgatgaaggccactttaccgacactgtagttctgtacagttgcaacccggggtacgccatgcatggcagcaacaccctgacctgtttgagtggagacaggagagtgtgggacaaaccactaccttcgtgcatagcggaatgtggtggtcagatccatgcagccacatcaggacgaatattgtcccctggctatccagctccgtatgacaacaacctccactgcacctggattatagaggcagacccaggaaagaccattagcctccatttcattgttttcgacacggagatggctcacgacatcctcaaggtctgggacgggccggtggacagtgacatcctgctgaaggagtggagtggctccgcccttccggaggacatccacagcaccttcaactcactcaccctgcagttcgacagcgacttcttcatcagcaagtctggcttctccatccagttctccacctcaattgcagccacctgtaacgatccaggtatgccccaaaatggcacccgctatggagacagcagagaggctggagacaccgtcacattccagtgtgaccctggctatcagctccaaggacaagccaaaatcacctgtgtgcagctgaataaccggttcttttggcaaccagaccctcctacatgcatagctgcttgtggagggaatctgacgggcccagcaggtgttattttgtcacccaactacccacagccgtatcctcctgggaaggaatgtgactggagagtaaaagtgaacccggactttgtcatcgccttgatattcaaaagtttcaacatggagcccagctatgacttcctacacatctatgaaggggaagattccaacagccccctcattgggagttaccagggctctcaggccccagaaagaatagagagtagcggaaacagcctgtttctggcatttcggagtgatgcctccgtgggcctttcagggttcgccattgaatttaaagagaaaccacgggaagcttgttttgacccaggaaatataatgaatgggacaagagttggaacagacttcaagcttggctccaccatcacctaccagtgtgactctggctataagattcttgacccctcatccatcacctgtgtgattggggctgatgggaaaccctcctgggaccaagtgctgccctcctgcaatgctccctgtggaggccagtacacgggatcagaaggggtagttttatcaccaaactacccccataattacacagctggtcaaatatgcctctattccatcacggtaccaaaggaattcgtggtctttggacagtttgcctatttccagacagccctgaatgatttggcagaattatttgatggaacccatgcacaggccagacttctcagctcactctcggggtctcactcaggggaaacattgcccttggctacgtcaaatcaaattctgctccgattcagtgcaaagagcggtgcctctgcccgcggcttccacttcgtgtatcaagctgttcctcgtaccagtgacacccaatgcagctctgtccccgagcccagatacggaaggagaattggttctgagttttctgccggctccatcgtccgattcgagtgcaacccgggatacctgcttcagggttccacggcgctccactgccagtccgtgcccaacgccttggcacagtggaacgacacgatccccagctgtgtggtaccctgcagtggcaatttcactcaacgaagaggtacaatcctgtcccccggctaccctgagccatacggaaacaacttgaactgtatatggaagatcatagttacggagggctcgggaattcagatccaagtgatcagttttgccacggagcagaactgggactcccttgagatccacgatggtggggatgtgaccgcacccagactgggaagcttctcaggcaccacagtaccggcactgctgaacagtacttccaaccaactctacctgcatttccagtctgacattagtgtggcagctgctggtttccacctggaatacaaaactgtaggtcttgctgcatgccaagaaccagccctccccagcaacagcatcaaaatcggagatcggtacatggtgaacgacgtgctctccttccagtgcgagcccgggtacaccctgcagggccgttcccacatttcctgtatgccagggaccgttcgccgttggaactatccgtctcccctgtgcattgcaacctgtggagggacgctgagcaccttgggtggtgtgatcctgagccccggcttcccaggttcttaccccaacaacttagactgcacctggaggatctcattacccatcggctatggtgcacatattcagtttctgaatttttctaccgaagctaatcatgacttccttgaaattcaaaatggaccttaccacaccagccccatgattggacaatttagcggcacggatctccccgcggccctgctgagcacaacgcatgaaaccctcatccacttttatagtgaccattcgcaaaaccggcaaggatttaaacttgcttaccaagcctatgaattacagaactgtccagatccacccccatttcagaatgggtacatgatcaactcggattacagcgtggggcaatcagtatctttcgagtgttatcctgggtacattctaataggccatcctgtcctcacttgtcagcatgggatcaacagaaactggaactacccttttccaagatgtgatgccccttgtgggtacaacgtaacttctcagaacggcaccatctactcccctggctttcctgatgagtatccgatcctgaaggactgcatttggctcatcacggtgcctccagggcacggagtttacatcaacttcaccctgttacagacggaagctgtcaacgattacattgctgtttgggacggtcccgatcagaactcaccccagctgggagttttcagtggcaacacagccctcgaaacggcgtatagctccaccaaccaagtcctgctcaagttccacagcgacttttcaaatggaggcttctttgtcctcaatttccacgcatttcagctcaagaaatgtcaacctcccccagcggttccacaggcagaaatgcttactgaggatgatgatttcgaaataggagattttgtgaagtaccagtgccaccccgggtacaccttggtggggaccgacattctgacttgcaagctcagttcccagttgcagtttgagggttctctcccaacatgtgaagcacaatgcccagcaaatgaagtccggactggatcatcgggagtcattctcagtccagggtatccgggtaattattttaactcccagacttgctcttggagtattaaagtggaaccaaactacaacattaccatctttgtggacacatttcaaagtgaaaagcagtttgatgcactggaagtgtttgatggttcttctgggcaaagtcctctgctagtagtcttaagtgggaatcatactgaacaatcaaattttacaagcaggagtaatcagttatatctccgctggtccactgaccatgccaccagtaagaaaggattcaagattcgctatgcagcaccttactgcagtttgacccaccccctgaagaatgggggtattctaaacaggactgcaggagcggttggaagcaaagtgcattatttttgcaagcctggataccgaatggtcggccacagcaatgcaacctgtagacgaaacccacttggcatgtaccagtgggactccctcacgccactctgccaggctgtgtcctgtggaatcccagaatccccaggaaacggttcatttaccgggaacgagttcactttggacagtaaagtggtctatgaatgtcatgagggcttcaagcttgaatccagccagcaagcaacagccgtgtgtcaagaagatgggttgtggagtaacaaggggaagccgcccacgtgtaagccggtcgcttgccccagcattgaagctcagctctcagaacatgtcatctggaggctggtttcaggatccttgaatgagtacggtgctcaagtattgctgagctgcagtcctggttactacttagaaggctggaggctcctgcggtgccaggccaatgggacgtggaacataggagatgagaggccaagctgtcgagttatctcgtgtggaagcctttcctttcccccaaatggcaacaagattggaacgttgacagtttatggggccacagctatatttacgtgcaacaccggctacacgcttgtggggtctcatgtcagagagtgcttggcaaatgggctctggagcggcagcgaaactcgatgtctggctggccactgcggttccccagacccgattgtgaacggtcacattagtggagatggcttcagttacagagacacggtggtttaccagtgcaatcctggtttccggcttgtgggaacttccgtgaggatatgcctgcaagaccacaagtggtctggacaaacgcctgtctgtgtccccatcacatgtggtcaccctggaaaccctgcccacggattcactaatggcagtgagttcaacctgaatgatgtcgtgaatttcacctgcaacacgggctatttgctgcagggcgtgtctcgagcccagtgtcggagcaacggccagtggagtagccctctgcccacgtgtcgagtggtgaactgttctgatccaggctttgtggaaaatgccattcgtcacgggcaacagaacttccctgagagttttgagtatggaatgagtatcctgtaccattgcaagaagggattttacttgctgggatcttcagccttgacctgtatggcaaatggcttatgggaccgatccctgcccaagtgtttggctatatcgtgtggacacccaggggtccctgccaacgccgtcctcactggagagctgtttacctatggcgccgtcgtgcactactcctgcagagggagcgagagcctcataggcaacgacacgagagtgtgccaggaagacagtcactggagcggggcactgccccactgcacaggaaataatcctggattctgtggtgatccggggaccccagcacatgggtctcggcttggtgatgactttaagacaaagagtcttctccgcttctcctgtgaaatggggcaccagctgaggggctcccctgaacgcacgtgtttgctcaatgggtcatggtcaggactgcagccggtgtgtgaggccgtgtcctgtggcaaccctggcacacccaccaacggaatgattgtcagtagtgatggcattctgttctccagctcggtcatctatgcctgctgggaaggctacaagacctcagggctcatgacacggcattgcacagccaatgggacctggacaggcactgctcccgactgcacaattataagttgtggggatccaggcacactagcaaatggcatccagtttgggaccgacttcaccttcaacaagactgtgagctatcagtgtaacccaggctatgtcatggaagcagtcacatccgccactattcgctgtaccaaagacggcaggtggaatccgagcaaacctgtctgcaaagccgtgctgtgtcctcagccgccgccggtgcagaatggaacagtggagggaagtgatttccgctggggctccagcataagttacagctgcatggacggttaccagctctctcactccgccatcctctcctgtgaaggtcgcggggtgtggaaaggagagatcccccagtgtctccctgtgttctgcggagaccctggcatccccgcagaagggcgacttagtgggaaaagtttcacctataagtccgaagtcttcttccagtgcaaatctccatttatactcgtgggatcctccagaagagtctgccaagctgacggcacgtggagcggcatacaacccacctgcattgatcctgctcataacacctgcccagaccctggtacgccacactttggaatacagaatagctccagaggctatgaggttggaagcacggtttttttcaggtgcagaaaaggctaccatattcaaggttccacgactcgcacctgccttgccaatttaacatggagtgggatacagaccgaatgtatacctcatgcctgcagacagccagaaaccccggcacacgcggatgtgagagccatcgatcttcctactttcggctacaccttagtgtacacctgccatccaggctttttcctcgcagggggatctgagcacagaacatgtaaagcagacatgaaatggacaggaaagtcgcctgtgtgtaaaagtaaaggagtgagagaagttaatgaaacagttactaaaactccagttccttcagatgtctttttcgtcaattcactgtggaaggggtattatgaatatttagggaaaagacaacccgccactctaactgttgactggttcaatgcaacaagcagtaaggtgaatgccaccttcagcgaagcctcgccagtggagctgaagttgacaggcatttacaagaaggaggaggcccacttactcctgaaagcttttcaaattaaaggccaggcagatatttttgtaagcaagttcgaaaatgacaactggggactagatggttatgtgtcatctggacttgaaagaggaggatttacttttcaaggtgacattcatggaaaagactttggaaaatttaagctagaaaggcaagatcctttaaacccagatcaagactcttccagtcattaccacggcaccagcagtggctctgtggcggctgccattctggttcctttctttgctctaattttatcagggtttgcattttacctctacaaacacagaacgagaccaaaagttcaatacaatggctatgctgggcatgaaaacagcaatggacaagcatcgtttgaaaaccccatgtatgatacaaacttaaaacccacagaagccaaggctgtgaggtttgacacaactctgaacacagtctgtacagtggtatagccctcagtgccccaacaggactgattcatagccatacctctgatggacaagcagtgattcctttggtgccatataccactctcccttccactctggctttactgcagcgatcttcaaccttgtctactggcataagtgcagcggggatctctactcaaatgtgtcagggtcttctacggatcaaactacacatgcgttttcattccaaaagtgggttctaaatgcctggctgcatctgtatgaaatcaaggcacactccaggaagactgccacgtcgcgccaacacgtcatactcaatgcctcagactttcatatttctgtgttgctgagatgcctttcaatgcaatcgtctgggctcgtggatatgtccctcaggtgcggtgacagaatggtggcaccacgatatgtgttctcttgtgttgtttttcctttttaaacccccatgaacacgaatactctgaaaaaaataaaaagctttctggaagaagacacctttctgatagaggctcacacctacaaatgcttcactctgtccttccgagacctgacaagctttgaggacctcacagctcccctgtgtgttcatctctagggatgtttgcaatttcccagtcagctgttctgtcgcagaatgtttaatgcacaattttttgcactagtgtgttatgaatgactaagattctgataaaaaaaataaattatttacacagggtttatacacactatccattgtatataagcattatttcatattatcaagctaaacattcccccatcagcttagttggagtgttagggaaaagtattcctagatatggcacagattttaaaaggaaatacagtattgaagagatttattttattattgcttcaattagctccatttacgtgttgaattcattgaagaggtccaatgagaaaaaaacagaagcctccttatttcacacgttttcctcctttagtaccatcctcatccaattactgtctctctgatactacttaatagcagggggtttgcagaaatttctgtttgccatgtaaaactgtgaatagtaatttattttagatagtcgatgaacttgtgggttttagctcacaatgcagccttcccttttgcagtgttttttttttgtttttttttttttttgtcttttactgtgccatcgatctttgatattgcattgaaagacaatataccacagtagcaccttgaactcagtgaaaattgttcaggatcaaaataccaagtgttcttttagagggaaggaaaaagtacacacactctcctctcacaatgatatattttatacattcatttgttatttgtttcatgctttatgattccagatggaaaggtaatttcagtgacttttcaagtttaaattccattataggtaaatgataagttatgatgcaaataaaatctataagatccccagggcaaataaaaatcaaaacatgaagtagaagatgtggccgtgaggtagtttatgtaacaaattcaaagtgaaaatcatgtttacttttacttatacttatttgataaaaatatttttgaaacgatagtacttattttattatttgatatttcagttcctattcaattgtggcagattttctctgtttcacattttagattggcgttggtaatagaaatgtcagaatgttcaaattggccttcacgttgtcggagtgaacacattgacacctagctttaagactgatttatctgttggtgtactgaaggtttccatgtaggacttcaaatgtggaaaaggaaaagcagtcaggaaaatggggcattctttggagagtcacgcgttttgattcggacatttccgtagagctcggctcccagtgttgtgttcctcggtcgaaagggtctctgctgtttggggactcactggcctctcctagggactcctttgtcttgtgaaccccacgctgttggattctgtatcattatgctgaattctctgcacagttttccctggccaacctgcccacatccttggagatttgctttgccagtgggaatccttacattgctgtttcacagtagacgggacgaggtcagcgggagtcgtgctcctaacacacacattgaacgaaacagaagatgattgaaagtgtgaggaggctcgtgtgcaagggagaacagggttactatacatattagtgtatatatatacatacatatatatatatatatattgtacatatctaagtttgagtcattcaaactaggtgcaaaatgctgacttcagagtctgaattaacatctctgttcccatatccctgacctgctccctggtcaacgatgctatgaaatcctgaaatgacaggacatacatacatacaagaaaccacatatcaaattagatatgattttcctttgtgtgcaaagtcaaactgtcctagggttgccagtttgaagcatgttatttaaatgaaaaaaaaaatcagtgaaattctcgtgtgagaattctgcctagtttcttcctaaggttgtgtgcagtgttgaacggcgtctccgcaaggtgttggaggatctcattttagggcagtcaggagctgtgcttgctgagttaggtctagaagactcttccctgaaggcaacgggaacacgcgtgagggacgcgaccacacactaacagaggacacgtgcttcagagctgtttaaaactgctgcttgttttacacacacatcttgccttttttcaggctagctgcaataatttttttcttctgtaaaatattttgtaaacaacaacaaaaagctattataaaaagggggtaaaaaaaagaacgctggcattatgatcaggaaaacccattgtcatcgccgaccctccctcccgtcccaccacacgctgctgtcacgacgtaggtgcgaaagacctttttgtacagagatatattttttatgaagaatttgtaaaattattaaatatgctgtaattttttgattaatgtaggtacattgttaaaaaataaatgtttttacaatacagaactgtaattttcccaataatgtaaaatgtaccatctctagctgattttcagttccaatcctattacacatgtattaatattaaagtggcctgttaaaatgaacagtatcttttttttgtcaaaaaaattataaagagggtgtaatatagcctgtgcaatgccaccaatctttaaagcaaatcagagttctaattaaatatttaattttagatttctaaaaaaaaaaaaaaaaaaaaaaaa

SEQ ID NO: 379 - DNA, 1970 bp, HOMO SAPIENS
ctcagcttctgttcctcaaccacggccgccgcgtggatgccgctgcattcggagtcgttttgccacttggtcccagcgccaggcttctcggtcgggagttgacctcagcctttctgtgacccagttcctggcacccagcaggcgctcggtggacggatgggtggcggaatgaaggacacagaggccactgcggggtctggcctctaagaggcttttacggcctcctccgtcactaccgggcgagtgattcagcctgccttttttttttttttttttttttgagatggagtcaagctctgtcgcccaggctggagtgcagtggcacgatctcggctcactgcaacctccgcctcccaggttcaagcgattttcctgcctcagcctcctgagtaactgggattacaggtgcccgccaccacgtccggctaattttttttctatttttagtagagacgggggtttcactgttttggccaggctggtctcgagctcctgatctcgtgatccgcccgcttcggccttacaaagtgctgggattacaagcgtgagccaccgtgcccggctcatcctgcttttggtttcaggtctccatgccagtgaaatgtcacctcaactccaccgtccctggtgtcaggcaagcccgagggacccaattctgcctttcttctggattttcctaacctgttaagagtcttgaaagtccttaaaccacgggagactatctggcacatgacacgggatgagacttggtgggggtcccacgggggacaggtccttccagcggttcctctgcacccagcgctgcacgggcatggggcgtgggtaatcagcctcccgaaagccacgcgagtcacggtcctgcctgcgaagaactcccagggcgaccttggggctgaggagtgggcctgcttcggccttctgctcttctgttgtgtggtgaccctcaccagaggacagcttcatgctcttggacttcccagcctcaagaacttcttgctctgttgcccaggctagaatgcagaggcaccatcttggctcactgcaacctccgcctaccgggttcaaatgattctcctgcctcagcctcccgagtagctgggattacaggcacctgccaccatgcccagctaatttttgtattttcagcagagatgaggttttaccatgttgaccaggctggtcttgaactcctgacctcaagtgatccgccaacctcggcctcccaaagtgctgagattacaggcatgagccaccatgcccggcctccatcttttactttcaatctatctgaagctttatatttaaggtgcatatattttagacagttaataatttcagcttgcttttttttttcctagttggggaaactctgctttttaattggattgtttattctggttacatttgttgttgtggtgaaatttggaaagttcaacctgccacaacgtcttcacttactatttttaaaggatattctcaatgagtgtgaatagtgagtcaacagctttctttcaccatttcacacatcctgagcctccattgttttgagtcagctgtcgttcatatctttgttacctgtgaatgcacaaaatttgctctgtatgatgactatgatgtgtccaggtagggttttctttacatttatttttatgaggggtttatgaactttttgaatctataagttgatgttttttcactacatttgagactatatcaactttttttttctttcatcttttccagccatttcttcttggttctggttccgtgtgtactgcatgatattgtaccacgtgtcacggagactcgcttccttgttttctttcagtttcattttcccttgcacttcagatggaatgatatctattgatctcttttcaagttcactcattctttcttctgtaatgttcaatctctcttaagaaagtccaaataaatttttcatttcagagagtggaattttcggttct

SEQ ID NO: 380 - DNA, 10412 bp, HOMO SAPIENS
gtaattgcgagcgagagtgagtggggccgggacccgcagagccgagccgacccttctctcccgggctgcggcagggcagggcggggagctccgcgcaccaacagagccggttctcagggcgctttgctccttgttttttccccggttctgttttctccccttctccggaaggcttgtcaaggggtaggagaaagagacgcaaacacaaaagtggaaaacagttaatgaccagccacggcgtccctgctgtgagctctggccgctgccttccagggctcccgagccacacgctgggggtgctggctgagggaacatggcttgttggcctcagctgaggttgctgctgtggaagaacctcactttcagaagaagacaaacatgtcagctgctgctggaagtggcctggcctctatttatcttcctgatcctgatctctgttcggctgagctacccaccctatgaacaacatgaatgccattttccaaataaagccatgccctctgcaggaacacttccttgggttcaggggattatctgtaatgccaacaacccctgtttccgttacccgactcctggggaggctcccggagttgttggaaactttaacaaatccattgtggctcgcctgttctcagatgctcggaggcttcttttatacagccagaaagacaccagcatgaaggacatgcgcaaagttctgagaacattacagcagatcaagaaatccagctcaaacttgaagcttcaagatttcctggtggacaatgaaaccttctctgggttcctgtatcacaacctctctctcccaaagtctactgtggacaagatgctgagggctgatgtcattctccacaaggtatttttgcaaggctaccagttacatttgacaagtctgtgcaatggatcaaaatcagaagagatgattcaacttggtgaccaagaagtttctgagctttgtggcctaccaagggagaaactggctgcagcagagcgagtacttcgttccaacatggacatcctgaagccaatcctgagaacactaaactctacatctcccttcccgagcaaggagctggctgaagccacaaaaacattgctgcatagtcttgggactctggcccaggagctgttcagcatgagaagctggagtgacatgcgacaggaggtgatgtttctgaccaatgtgaacagctccagctcctccacccaaatctaccaggctgtgtctcgtattgtctgcgggcatcccgagggaggggggctgaagatcaagtctctcaactggtatgaggacaacaactacaaagccctctttggaggcaatggcactgaggaagatgctgaaaccttctatgacaactctacaactccttactgcaatgatttgatgaagaatttggagtctagtcctctttcccgcattatctggaaagctctgaagccgctgctcgttgggaagatcctgtatacacctgacactccagccacaaggcaggtcatggctgaggtgaacaagaccttccaggaactggctgtgttccatgatctggaaggcatgtgggaggaactcagccccaagatctggaccttcatggagaacagccaagaaatggaccttgtccggatgctgttggacagcagggacaatgaccacttttgggaacagcagttggatggcttagattggacagcccaagacatcgtggcgtttttggccaagcacccagaggatgtccagtccagtaatggttctgtgtacacctggagagaagctttcaacgagactaaccaggcaatccggaccatatctcgcttcatggagtgtgtcaacctgaacaagctagaacccatagcaacagaagtctggctcatcaacaagtccatggagctgctggatgagaggaagttctgggctggtattgtgttcactggaattactccaggcagcattgagctgccccatcatgtcaagtacaagatccgaatggacattgacaatgtggagaggacaaataaaatcaaggatgggtactgggaccctggtcctcgagctgacccctttgaggacatgcggtacgtctgggggggcttcgcctacttgcaggatgtggtggagcaggcaatcatcagggtgctgacgggcaccgagaagaaaactggtgtctatatgcaacagatgccctatccctgttacgttgatgacatctttctgcgggtgatgagccggtcaatgcccctcttcatgacgctggcctggatttactcagtggctgtgatcatcaagggcatcgtgtatgagaaggaggcacggctgaaagagaccatgcggatcatgggcctggacaacagcatcctctggtttagctggttcattagtagcctcattcctcttcttgtgagcgctggcctgctagtggtcatcctgaagttaggaaacctgctgccctacagtgatcccagcgtggtgtttgtcttcctgtccgtgtttgctgtggtgacaatcctgcagtgcttcctgattagcacactcttctccagagccaacctggcagcagcctgtgggggcatcatctacttcacgctgtacctgccctacgtcctgtgtgtggcatggcaggactacgtgggcttcacactcaagatcttcgctagcctgctgtctcctgtggcttttgggtttggctgtgagtactttgccctttttgaggagcagggcattggagtgcagtgggacaacctgtttgagagtcctgtggaggaagatggcttcaatctcaccacttcggtctccatgatgctgtttgacaccttcctctatggggtgatgacctggtacattgaggctgtctttccaggccagtacggaattcccaggccctggtattttccttgcaccaagtcctactggtttggcgaggaaagtgatgagaagagccaccctggttccaaccagaagagaatatcagaaatctgcatggaggaggaacccacccacttgaagctgggcgtgtccattcagaacctggtaaaagtctaccgagatgggatgaaggtggctgtcgatggcctggcactgaatttttatgagggccagatcacctccttcctgggccacaatggagcggggaagacgaccaccatgtcaatcctgaccgggttgttccccccgacctcgggcaccgcctacatcctgggaaaagacattcgctctgagatgagcaccatccggcagaacctgggggtctgtccccagcataacgtgctgtttgacatgctgactgtcgaagaacacatctggttctatgcccgcttgaaagggctctctgagaagcacgtgaaggcggagatggagcagatggccctggatgttggtttgccatcaagcaagctgaaaagcaaaacaagccagctgtcaggtggaatgcagagaaagctatctgtggccttggcctttgtcgggggatctaaggttgtcattctggatgaacccacagctggtgtggacccttactcccgcaggggaatatgggagctgctgctgaaataccgacaaggccgcaccattattctctctacacaccacatggatgaagcggacgtcctgggggacaggattgccatcatctcccatgggaagctgtgctgtgtgggctcctccctgtttctgaagaaccagctgggaacaggctactacctgaccttggtcaagaaagatgtggaatcctccctcagttcctgcagaaacagtagtagcactgtgtcatacctgaaaaaggaggacagtgtttctcagagcagttctgatgctggcctgggcagcgaccatgagagtgacacgctgaccatcgatgtctctgctatctccaacctcatcaggaagcatgtgtctgaagcccggctggtggaagacatagggcatgagctgacctatgtgctgccatatgaagctgctaaggagggagcctttgtggaactctttcatgagattgatgaccggctctcagacctgggcatttctagttatggcatctcagagacgaccctggaagaaatattcctcaaggtggccgaagagagtggggtggatgctgagacctcagatggtaccttgccagcaagacgaaacaggcgggccttcggggacaagcagagctgtcttcgcccgttcactgaagatgatgctgctgatccaaatgattctgacatagacccagaatccagagagacagacttgctcagtgggatggatggcaaagggtcctaccaggtgaaaggctggaaacttacacagcaacagtttgtggcccttttgtggaagagactgctaattgccagacggagtcggaaaggattttttgctcagattgtcttgccagctgtgtttgtctgcattgcccttgtgttcagcctgatcgtgccaccctttggcaagtaccccagcctggaacttcagccctggatgtacaacgaacagtacacatttgtcagcaatgatgctcctgaggacacgggaaccctggaactcttaaacgccctcaccaaagaccctggcttcgggacccgctgtatggaaggaaacccaatcccagacacgccctgccaggcaggggaggaagagtggaccactgccccagttccccagaccatcatggacctcttccagaatgggaactggacaatgcagaacccttcacctgcatgccagtgtagcagcgacaaaatcaagaagatgctgcctgtgtgtcccccaggggcaggggggctgcctcctccacaaagaaaacaaaacactgcagatatccttcaggacctgacaggaagaaacatttcggattatctggtgaagacgtatgtgcagatcatagccaaaagcttaaagaacaagatctgggtgaatgagtttaggtatggcggcttttccctgggtgtcagtaatactcaagcacttcctccgagtcaagaagttaatgatgccatcaaacaaatgaagaaacacctaaagctggccaaggacagttctgcagatcgatttctcaacagcttgggaagatttatgacaggactggacaccaaaaataatgtcaaggtgtggttcaataacaagggctggcatgcaatcagctctttcctgaatgtcatcaacaatgccattctccgggccaacctgcaaaagggagagaaccctagccattatggaattactgctttcaatcatcccctgaatctcaccaagcagcagctctcagaggtggctctgatgaccacatcagtggatgtccttgtgtccatctgtgtcatctttgcaatgtccttcgtcccagccagctttgtcgtattcctgatccaggagcgggtcagcaaagcaaaacacctgcagttcatcagtggagtgaagcctgtcatctactggctctctaattttgtctgggatatgtgcaattacgttgtccctgccacactggtcattatcatcttcatctgcttccagcagaagtcctatgtgtcctccaccaatctgcctgtgctagcccttctacttttgctgtatgggtggtcaatcacacctctcatgtacccagcctcctttgtgttcaagatccccagcacagcctatgtggtgctcaccagcgtgaacctcttcattggcattaatggcagcgtggccacctttgtgctggagctgttcaccgacaataagctgaataatatcaatgatatcctgaagtccgtgttcttgatcttcccacatttttgcctgggacgagggctcatcgacatggtgaaaaaccaggcaatggctgatgccctggaaaggtttggggagaatcgctttgtgtcaccattatcttgggacttggtgggacgaaacctcttcgccatggccgtggaaggggtggtgttcttcctcattactgttctgatccagtacagattcttcatcaggcccagacctgtaaatgcaaagctatctcctctgaatgatgaagatgaagatgtgaggcgggaaagacagagaattcttgatggtggaggccagaatgacatcttagaaatcaaggagttgacgaagatatatagaaggaagcggaagcctgctgttgacaggatttgcgtgggcattcctcctggtgagtgctttgggctcctgggagttaatggggctggaaaatcatcaactttcaagatgttaacaggagataccactgttaccagaggagatgctttccttaacaaaaatagtatcttatcaaacatccatgaagtacatcagaacatgggctactgccctcagtttgatgccatcacagagctgttgactgggagagaacacgtggagttctttgcccttttgagaggagtcccagagaaagaagttggcaaggttggtgagtgggcgattcggaaactgggcctcgtgaagtatggagaaaaatatgctggtaactatagtggaggcaacaaacgcaagctctctacagccatggctttgatcggcgggcctcctgtggtgtttctggatgaacccaccacaggcatggatcccaaagcccggcggttcttgtggaattgtgccctaagtgttgtcaaggaggggagatcagtagtgcttacatctcatagtatggaagaatgtgaagctctttgcactaggatggcaatcatggtcaatggaaggttcaggtgccttggcagtgtccagcatctaaaaaataggtttggagatggttatacaatagttgtacgaatagcagggtccaacccggacctgaagcctgtccaggatttctttggacttgcatttcctggaagtgttctaaaagagaaacaccggaacatgctacaataccagcttccatcttcattatcttctctggccaggatattcagcatcctctcccagagcaaaaagcgactccacatagaagactactctgtttctcagacaacacttgaccaagtatttgtgaactttgccaaggaccaaagtgatgatgaccacttaaaagacctctcattacacaaaaaccagacagtagtggacgttgcagttctcacatcttttctacaggatgagaaagtgaaagaaagctatgtatgaagaatcctgttcatacggggtggctgaaagtaaagaggaactagactttcctttgcaccatgtgaagtgttgtggagaaaagagccagaagttgatgtgggaagaagtaaactggatactgtactgatactattcaatgcaatgcaattcaatgcaatgaaaacaaaattccattacaggggcagtgcctttgtagcctatgtcttgtatggctctcaagtgaaagacttgaatttagttttttacctatacctatgtgaaactctattatggaacccaatggacatatgggtttgaactcacacttttttttttttttttgttcctgtgtattctcattggggttgcaacaataattcatcaagtaatcatggccagcgattattgatcaaaatcaaaaggtaatgcacatcctcattcactaagccatgccatgcccaggagactggtttcccggtgacacatccattgctggcaatgagtgtgccagagttattagtgccaagtttttcagaaagtttgaagcaccatggtgtgtcatgctcacttttgtgaaagctgctctgctcagagtctatcaacattgaatatcagttgacagaatggtgccatgcgtggctaacatcctgctttgattccctctgataagctgttctggtggcagtaacatgcaacaaaaatgtgggtgtctccaggcacgggaaacttggttccattgttatattgtcctatgcttcgagccatgggtctacagggtcatccttatgagactcttaaatatacttagatcctggtaagaggcaaagaatcaacagccaaactgctggggctgcaagctgctgaagccagggcatgggattaaagagattgtgcgttcaaacctagggaagcctgtgcccatttgtcctgactgtctgctaacatggtacactgcatctcaagatgtttatctgacacaagtgtattatttctggctttttgaattaatctagaaaatgaaaagatggagttgtattttgacaaaaatgtttgtactttttaatgttatttggaattttaagttctatcagtgacttctgaatccttagaatggcctctttgtagaaccctgtggtatagaggagtatggccactgccccactatttttattttcttatgtaagtttgcatatcagtcatgactagtgcctagaaagcaatgtgatggtcaggatctcatgacattatatttgagtttctttcagatcatttaggatactcttaatctcacttcatcaatcaaatattttttgagtgtatgctgtagctgaaagagtatgtacgtacgtataagactagagagatattaagtctcagtacacttcctgtgccatgttattcagctcactggtttacaaatataggttgtcttgtggttgtaggagcccactgtaacaatactgggcagcctttttttttttttttttaattgcaacaatgcaaaagccaagaaagtataagggtcacaagtctaaacaatgaattcttcaacagggaaaacagctagcttgaaaacttgctgaaaaacacaacttgtgtttatggcatttagtaccttcaaataattggctttgcagatattggataccccattaaatctgacagtctcaaatttttcatctcttcaatcactagtcaagaaaaatataaaaacaacaaatacttccatatggagcatttttcagagttttctaacccagtcttatttttctagtcagtaaacatttgtaaaaatactgtttcactaatacttactgttaactgtcttgagagaaaagaaaaatatgagagaactattgtttggggaagttcaagtgatctttcaatatcattactaacttcttccactttttccagaatttgaatattaacgctaaaggtgtaagacttcagatttcaaattaatctttctatattttttaaatttacagaatattatataacccactgctgaaaaagaaaaaaatgattgttttagaagttaaagtcaatattgattttaaatataagtaatgaaggcatatttccaataactagtgatatggcatcgttgcattttacagtatcttcaaaaatacagaatttatagaataatttctcctcatttaatatttttcaaaatcaaagttatggtttcctcattttactaaaatcgtattctaattcttcattatagtaaatctatgagcaactccttacttcggttcctctgatttcaaggccatattttaaaaaatcaaaaggcactgtgaactattttgaagaaaacacaacattttaatacagattgaaaggacctcttctgaagctagaaacaatctatagttatacatcttcattaatactgtgttaccttttaaaatagtaattttttacattttcctgtgtaaacctaattgtggtagaaatttttaccaactctatactcaatcaagcaaaatttctgtatattccctgtggaatgtacctatgtgagtttcagaaattctcaaaatacgtgttcaaaaatttctgcttttgcatctttgggacacctcagaaaacttattaacaactgtgaatatgagaaatacagaagaaaataataagccctctatacataaatgcccagcacaattcattgttaaaaaacaaccaaacctcacactactgtatttcattatctgtactgaaagcaaatgctttgtgactattaaatgttgcacatcattcattcactgtatagtaatcattgactaaagccatttgtctgtgttttcttcttgtggttgtatatatcaggtaaaatattttccaaagagccatgtgtcatgtaatactgaaccactttgatattgagacattaatttgtacccttgttattatctactagtaataatgtaatactgtagaaatattgctctaattcttttcaaaattgttgcatcccccttagaatgtttctatttccataaggatttaggtatgctattatcccttcttataccctaagatgaagctgtttttgtgctctttgttcatcattggccctcattccaagcactttacgctgtctgtaatgggatctatttttgcactggaatatctgagaattgcaaaactagacaaaagtttcacaacagatttctaagttaaatcattttcattaaaaggaaaaaagaaaaaaaattttgtatgtcaataactttatatgaagtattaaaatgcatatttctatgttgtaatataatgagtcacaaaataaagctgtgacagttctgttggtctacagaaa

SEQ ID NO: 381 - DNA, 2384 bp, HOMO SAPIENS
gcggccgccaccccaccatgctcaagcgctgcggccggcgcctgctgctggcgctggcgggcgcgctgctcgcctgcctgctggtgctcaccgccgacccgccgccgcctccactgcccgccgagcgcggccggcgcgcgctgcgcagcctggcgggccccgcgggggctgccccggcgcccgggctgggggcggcggcggcggcgcccggggcgctggtccgcgacgtgcacagtctgtccgagtacttcagcctgctcacccgcgcgcgcagagatgcgggcccgccgcccggggctgccccccgccccgccgacggccacccgcgccccctggccgagccgctcgcgccccgagacgtcttcatcgctgtcaagaccaccaaaaagttccaccgcgcgcgcctcgacctgctgctggagacctggatctcgcgccacaaggagatgacgttcatcttcactgacggggaagatgaggccctggccaggcacacgggcaacgtggtcatcacaaactgctcggccgcccacagccgccaggcgctgtcctgcaagatggccgtggagtatgaccgcttcatcgagtccggcaggaagtggttctgccacgtggacgatgacaactacgtcaacctgcgggccctgctgcggctgctggccagctacccgcacacgcgggacgtctacgtcggcaagcccagcctggacaggcccatccaggccatggagcgggtcagcgagaacaaggtgcgtcctgtccacttctggtttgccacgggcggcgctggcttctgcatcagccgtgggctggctctgaagatgagcccgtgggccagcgggggtcacttcatgaatacggctgagcggatccggctgcctgatgactgcaccatcggctacatcgtggaggccctgctgggtgtgcccctcatccgcagcggcctcttccactcccacctggagaacctgcagcaggtgcccacctcggagctccacgagcaggtgacgctgagctacggtatgtttgaaaacaagcggaacgccgtccacgtgaaggggcccttctcggtggaggccgacccatccaggttccgctccatccactgccacctgtacccggacacaccctggtgtccccgcactgccatcttctagtggccatggctgagacccaatccctgggcgcccctggtatccaaagggcccagggaccctgttgcgctgccctggcctcggcattcgaggctcccctagggccgtgcctgtgcgtgtgcgtgtgcgtgtgtgtgtgtgtgtactgcatgcccacccgggtagcaggctgctgggcagttctgctctgtggaggggcgggcaccagcgccacttatgtgcctctgctccgagggccagtgggctgcagggcctgcttggaggaaggatttgtgtgtcggaggccactccgagggcaattctgttaggatttttggatctttctacagctacggggctccgggctactttgcagggatgcgatgcgtaggtgcctttctcttcctgctgaccacaagctctgtgctgggggtacctgtgccctgaagtcctggcccctgtgtcatagccccaagtacgactcactgagccatgctcattgcaggggaggctgggtctgggggtgcgtgacccaatccccttcctcctggcctggacgctgtggcttaagagtaacagcagccaccgcccagttccagtggccccacgaagcccccagtggctggctgtccagctgggcaaacagtggcacccctcccagctcttctgagtggggagtcttccaggcctcctcagaggtcttccctttgcctccccaggacagggtgagtcagagctcagcatttaatctcctctccaaagtagagagcaagtcgcccacagtgggcgtgtctgtaaatattgtgacagtatttttttactgtgctgttttttttgaaaggggatgggtaaaaagtagggtgttcttgttttttgcttgggagggtgggggtgggggagggtcttattttatcttatcttttctgtggatcagaaaaaacagaagccaaactcggggtcatctttgtttttaaagctgaagtgggactgtctggcactctgtgtatttatgcgttccagcatctggaacctcccatccctgccctcctcctgtgtagctgccacctccccgctgggcccagcatggctcacctgtcccgtgggctgtgtttcttgttgtttttctctttgcaaagacatagctaggaaagcgaatgataagggaaaagttctcagggaattgaagtgttgttgctatggtgacgtccttttgctgtgaataaaggtgctctttgcagcaaaaaaaaaaaa

SEQ ID NO: 382 - DNA, 1813 bp, HOMO SAPIENS
gtgcacaccggaaactcaaagcacgactctatactgtacttttgtaatgtacaatgattgccgtggagagcagcgatggagatgttagtcctctttccttctccatcccccttgccctggtgcctgtgaaacagagcatccccatggcaacagcagcagctggtccctagataagaggagctggagccggccagcagcagccactgccgcagaggagccaggcccagcctcggtgagcacacacgccctccctgtctctcgccttcgcttccctgcatctgcgctgattgtgctggagaagaaatacatccacccaccctcctttgatgatgtccactgagcaaatgcagccactggaactctcagaagacagactggacaagctagaccctcgttgcagccacttaggtgtgttttcagaacatttaattaaaagatacgatgttcaagagagacatccaaagggcaaaatgatccctgttcttcataacactgacctggaacagaaaaagccaaggagaaaagacacacctgccctgcacatgtccccctttgcagcaggtgtgacattgctcagggacgagagacccaaagcaatcgtggaagatgacgaaaaggatggtgacaagatagctatttaaagatagttcccctgagaccacttgtaaataggttagattggttccctgtggtgacctagagaaaaaatagacttgtttctgctctcatttttgtcatcgtctgacttgaagattcagacaccttctccccaggagatgtatgccatcaaattgccagtcacctctttgtctctctcttctttctgagtatggtttctattctgtgttttgaatttttattttctaatgcagtggaaaagaaacagatcatcctaaatgaggaggtaacagggaaagcactggggttcggtttctgcatcttctggatcaattcacggaacagagatcgtggattacatgggctccttcttggtttttgctgctgggcaggacttgacttagcattatccaagcaccagtccaagtggggttccctgttgccagttagagaggtgagaatgtttggactctaactcaccgattgctttgcagacaaaggtcttttatttctcctgtcctatcttaagagtccaaatgtctctggtgatgttcctaagacccttgtcccagatactctaaatgtgaatgtatgagctgggggagtcaacccagcccaccatgccttggctgatgataccagaggcagagagtgctggtctgtctgggaagcttagcaatgtatcttcaaatttatttttgtttttaaaaatatttcttaaacatgctgtcccaacatttgtgagttgtgtcacaagtgagtcattatcaatggtagataaaatatcaatgtttgtgatgaatttactgtaaaaaaattaaggtcaatgaaagccattctgttatttttagcattctcacttatttagactctattacactttcttggatgagaggggagagtgtggtgttagctagtgagcagaggtctgtatattgtccttgccccagcctgcaatctgtggatgcccaggggaaggcatacaggcctcatccaccaggcaatagacaggagagaggtgagaactatttttagaaggaggaaaagtagatacgcaaattgtcacaactaagagtgataatttggtagctctgtatgtatgctggttccaactgtttaatcccttctgtctttctgttctcacaaagatggaaaagatacaagagcttgccggaaataaagctacatctatcca

SEQ ID NO: 383 - DNA, 6792 bp, HOMO SAPIENS
agcattttgagtgagcttgcagaaaatgaggggctttcagctggtcgcctgcttgtcacctctcgctgcctgaaaggcagctctcagagccctttcctgtccttctaattacagcggcgggggcagtgcgcgcttcgggacgcaattggaaaccagcgtgcagggtcaaagacagccggccccccatgtcagtggtctaggatggccagtgaaggcaccaacatcccaagtcctgtggtgcgccagattgacaagcagtttctgatttgcagtatatgcctggaacggtacaagaatcccaaggttctcccctgtctgcacactttctgcgagaggtgcctgcagaactacattcctgcccacagtttaaccctctcctgcccagtgtgccgccagacctccatcctgcccgagaaaggggtggccgcgctccagaacaatttcttcatcacaaacctgatggacgtgctgcagcgaactccaggcagcaacgctgaggagtcttccatcctggagacagtcactgctgtggctgcgggaaagcctctctcttgcccaaaccacgatgggaatgtgatggaattttactgccagtcctgtgagactgccatgtgtcgggagtgcacggagggggagcacgcagagcaccccacagttccactcaaggatgtggtggaacagcacaaggcctcgctccaggtccagctggatgctgtcaacaaaaggctcccagaaatagattctgctcttcagttcatctctgaaatcattcatcagttaaccaaccaaaaggccagcatcgtggatgacattcattccacctttgatgagctccagaagactttaaatgtgcgcaagagtgtgctgcttatggaattggaggtcaactatggcctcaaacacaaagtcctccagtcgcagctggatactctgctccaggggcaggagagcattaagagctgcagcaacttcacagcgcaggccctcaaccatggcacggagaccgaggtcctactggtgaagaagcagatgagcgagaagctgaacgagctggccgaccaggacttccccttgcacccgcgggagaacgaccagctggatttcatcgtggaaaccgaggggctgaagaagtccatccacaacctcgggacgatcttaaccaccaacgccgttgcctcagagacagtggccacgggcgaggggctgcggcagaccatcatcgggcagcccatgtccgtcaccatcaccaccaaggacaaagacggtgagctgtgcaaaaccggcaacgcctacctcaccgccgaactgagcacccccgacgggagcgtggcagacggggagatcctggacaacaagaacggcacctatgagtttttgtacactgtccagaaggaaggggactttaccctgtctctgagactctatgaccagcacatccgaggcagcccgtttaagctgaaagtgatccgatccgctgatgtgtctcccaccacagaaggcgtgaagaggcgcgttaagtccccggggagcggccacgtcaagcagaaagctgtgaaaagacccgcaagcatgtacagcactggaaaacgaaaagagaatcccatcgaagacgatttgatctttcgagtgggtaccaaaggaagaaataaaggagagtttacaaatcttcagggggtagctgcatctacaaatggaaagatattaattgcagacagtaacaaccaatgtgtgcagatattttccaatgatggccagttcaaaagtcgttttggcatacggggacgctctccggggcagctgcagcggcccacaggagtggctgtacatcccagtggggacataatcattgccgattatgataataaatgggtcagcattttctcctccgatgggaaatttaagacaaaaattggatcaggaaagctgatgggacccaaaggagtttctgtggaccgcaatgggcacattattgttgtggacaacaaggcgtgctgcgtgtttatcttccagccaaacgggaaaatagtcaccaggtttggtagccgaggaaatggggacaggcagtttgcaggtccccattttgcagctgtaaatagcaataatgagattattattacagatttccataatcattctgtcaaggtgtttaatcaggaaggagaattcatgttgaagtttggctcaaatggagaaggaaatgggcagtttaatgctccaacaggtgtagcagtggattcaaatggaaacatcattgtggccgactggggaaacagcaggatccaggtttttgatgggagtggatcatttttgtcctacattaacacatctgctgacccactctatggcccccaaggcctggccctaacttcagatggtcatgttgtggttgcagactctggaaatcactgtttcaaagtctatcgatacttacagtaatggtgggcaggtggatacccgcttccatggtcttgcactataaactggaatggatttctcaatgcgggaccagattatgactagagtttttatgccagaaggaatcattggtgaactttccaaggttatttctgaatgtaacaatttccttaaaaatgacttatccaatttctgtatttcacctttagggttaaaaaaaactcttctactgaatctataaaaactgcagttttacatctgtgaactatggcttaagggacaggatttatgtagctaaactaattttgcaaatcaaacagacacttaaaaaactagcatatgtaaaggtattcgttaatcctgtgaatggtagcttttgcacagaacttccaaaagcaaaacaaaaacaaaatctattgtagttatatacttcatttaacctaggtcacaagacccagggaatcttctaacctcacttttacagtaggtattactcttgtgacatttttttggttatcaacaactaaatataaattactttggaaaaagtaaggctgtcttgcaaaatgatcccagctctgattagcagccctctggagttcagaacttaagtatcagtgcaaatttctcaacctttctgggttagacaaagatccttttttgtgtgttcttttcaccacccctttggctcaccttgtatcagcaaacaaagtacttcttcagggaaacctgaaatttctaatgccttgaaaagcatattacaaaagtaatgctaccttttgggaaacaaactgccccgttaactccagatcattgcactggaatgtaatcaagaaagttagtcatgttttatgtaccatgttttcacacgtgtctcttctcttcgacttcctgaaagcgaaagctttacctcctgcaaatgtcagcacatgtagtaggacaccagtatcctaggacagagagccataagtagccctttggaggactgatggtgtcaaccaaaggcatgtgattgattaatgattcccccttagaaagcaagtgttaccaaagttgtgttatcttgaaagcattacaggtaagggcatgttatggttatttatcattgtttaatgaatagtagaggtgtcaagggactatgtatacatgattagggtaagatagaatgtattatatatatatatatatacacacacacatatatatagctgaatctttggtgtattgaaataggcagcactctgaaagacagaagcttcgtccagccactcttcagcacattcctttactaagcagtttaaagccgtcctagtggagcaagccctaaagcagatttaatttttgccattttccaagaatgacggtggtggcttttagtcagaaaatggccttctgtgctttcaaaaaaaaaaacaaaaaaaaaaccacacacacacataaaaaacccaacaggtcaaaataaaagttgaacttgagttacatttaatttaaatataaatgcattttgagaaatgttaagaacaatttagtcaatcgttcatctgtcattggtactgtaaaataagctgtggtctatttccactgtttaattttctactcagttctaccaaataggatgtcatgtttgacatttttgatagtgactttggggtcttcttcactgaaagcaccttagaactgtactataagaaaacatttcccctatgtataattatatgaatgtgatgtttattgcttattaatttataattcagtcattctctatataggacttcttaaaatttagaagggaaatctagctacttcaaattgtctgttaaatttattatgcccaaatcaacctctgaaaaaaggtttttccaggaagatttacatttaggtttaatatttttttagttaggtagagttttaaaaaatacttgagcctgtccgtgataaagctataaaattcaataactttttagaatgttaaatgaagacactgtttcctaacatcagtgagatacatctttgaatttaaacattcatatttactgagtacctactaggtaccaagtactcttttaggcactggaaatacagtgatggacaaaacaggtaaaaaatcgctgccccctcagagctgacattctggggtgggaatttcattttgccacgtactaacgttctgcacaaaagacaggctagactcttgtctagattgtttaaaagaaacttttcaaattggttacattaattttagtttattttcacaagtaaaaatggctttttatttagattctttctgtcccaggctgttgatcttaaaactagttgatttaaagagtttttttgcacaacatttcaattatatttgtgaacttagaaattaacttacaatctaaccagccatcatatcatatcctatcaggctagatatctcaatagtagactgaatacaaagctaattttttttacatgtcaatattggcacaaactggaatgaaagaatagtttgattcagacctgctccactatgtgttgctaaaacacatgctatgagcactccaggaaacactatattttttccaaaaaatatgtgattatatatgttaaagtatagataacatttcacacttggatacatatgtgcatttactgtatttcttggtaagcatatttttgggggaaagtgctgctgatatgatacaagtagacaaaatttaaatgaaattttgtcacattctatggaaaatggtttctggtaaactgagaaggatattaaaataagtggcttttttctgggctaccattattgtttgatttctctttgtcaagtgtatagaacctgtcatacattcatgataagtagcactgaaaaattactcattcaaatttcccctgggcacgtaaggcaaaatattgccggttgggatttcaaggtcagtgacgacgcatttcctcccagtacagaccccccagccccccttgctggacatggggaggcagagagtcacttgaccatccagaaatacatgactacaagtcctttatgactgtttgccattttttttaatggtacttagtattttgatcaaactttagtctccagaactaaacaagtccctaagtttccttattttaatttactgtgactagatttgaagcaaataaatactccagatccatgcagctagaacacacttgcttccactactaaatatacagggtatgtcctaacatggagttaactggaatagcagtacactagcaagtatctgtgaatccttagcactgacgggttaacagaaatgctttggtaatacctacttagttaattggaggaagtagtaaataaacattaggtaatctgcagattacttcaaatgggaaaaatctttttgtagactctatagtaccctctctattcactagcttctgaaaagggaggagtatttttagtttgacaatttaataatttaaaaacaagacatctccaggtaggaaaaaatgaaagctatttcatgcaaacattatctaatttagcttaaaagtgaaagtggtaatactgttggtttctgtaaatgttgcagggttttaaactttataattactttaatatttttgataactagaaatctagtattgccataaaggaaactaagtgcccatcaaagatttgtttggtataaataaagaattatttgttttgttttcaatgacagtaagctacaaatcatgatgcttaaaaactttctaaagatgaattgtgtggcagtgattggtctgtttgtggagaatgtatgaaagctattaatattctagaatagattaataaattggctatgttgttccaatgaatgtacagcacttccattaacttttgaaagcaacacagccttaaactcaatgcttttgctttatgacatgggaatgttctgtcatcaatggagtgtattcttgtaatagaattctttatatcgttctcaattctatagactttcaagcctatgtatgaatatgaaggggttttttttttttgctttgttttctttttagattttgtacattccatctttataggtctgtttcatatgttttatgtatagaacactaagtcttgcactctctgacattgatactgatatattctcgtcatttgttcttttatgaatcaaaatgttgactgcctatttaaagaaaagaatgaacgctgtgcatcaaagtgtttgtatgttcgtagctacatacgtaccacagtattttggatgctttagtctacaatgaaactttcaattaattctgtcttgaaacataggagaaacaggattcatgtgtatctctttaccatgcacaaaatctcaaatcattataataaagcttgttttctccatttgc

SEQ ID NO: 384 - DNA, 4507 bp, HOMO SAPIENS
ttccggccagcccctcccccgcctccctcgcgtggccacctccccctctgccttctcctacccagtctcttccccaactctccccacccctggtgctctccgccccgcttgcctcccgttcttccccgcccgctccatccgggtcgctgacggctgtctctggactggacagcagtggcgtccgcttttctctaaggaacccgataagaactccattttctgttgatgtggagacatagggtacctccaactttccggggtttcagaagagaattttttattgaaactggaagaccaaaataattacaagcatgttgtgctggggaaatgcatcctttgggcagctaggtttgggtggaattgatgaagaaattgtactagagcccagaaaaagtgacttctttataaataaaagggtccgagatgtaggatgtggactcagacatactgtgtttgttctggatgatggaacagtgtacacatgtggatgtaatgatctaggacagctaggtcatgaaaaatccagaaagaaaccagagcaggttgttgccctggatgcccaaaatattgtagctgtttcatgtggagaagctcatacgttagcgctaaatgacaaaggccaggtgtatgcttggggtctcgattctgatggacagcttggcctggtaggatcagaggaatgcatcagagtacccagaaatattaaaagtttgtcagatatccagattgtacaggttgcttgtggttactatcattcacttgcactttctaaagcaagtgaagtcttctgttggggacagaataaatatggccaattgggtttaggtactgactgtaaaaagcaaacttcaccgcagctgcttaagtctttgcttggaatccctttcatgcaagttgcagcaggaggagcccatagttttgtactcaccctttctggagctatctttggatggggacgcaacaagtttggtcagctaggtcttaatgatgaaaatgataggtatgttcctaatttactaaagtcactaagatctcagaaaatagtttatatttgttgtggagaagatcatactgctgctctaaccaaggaaggtggagtgtttacttttggagctggagggtatggtcagttgggccataattctaccagtcatgaaataaacccaaggaaagtttttgaacttatgggaagcattgtcactgagattgcttgtggacggcagcacacttctgcttttgttccttcatcaggacgaatttactcttttgggcttggtggtaatgggcagctgggaaccggttcaacaagcaacaggaaaagcccctttactgtaaaaggaaattggtacccctataatgggcagtgtctaccagatattgattctgaagaatatttctgtgtaaaaagaattttctcagggggagatcaaagcttttcacattactctagtccccagaactgtgggccaccagatgacttcagatgtcccaatccgacaaagcagatctggacagtgaatgaagctctaattcagaaatggctgagctatccttctggaaggtttcctgtggagatagccaatgagatagatggaacgttttcttcctctggttgcctaaatggaagttttttagctgttagcaatgatgatcactatagaacaggtaccagattttcaggggttgatatgaatgctgctaggcttttattccacaaacttatacaacctgatcatccgcagatatctcagcaggtggcagctagtttggaaaagaatcttattcctaaactgactagctccttacctgatgttgaagcattgaggttttatcttactctaccagaatgtcccctgatgagtgattccaacaatttcacaacaatagcaattccctttggtacagctcttgtgaacctagaaaaggcaccactgaaagtacttgaaaactggtggtcagtacttgaacctccactattcctcaagatagtagaactttttaaggaagttgtggtacatcttttgaaactctacaagatcggtattcccccttctgaaagaagaattttcaacagttttcttcatactgcattaaaggttttagaaatactacatagggtaaatgagaaaatgggacagattatacagtatgataaattttatatacatgaagtacaagaattgatagacataagaaatgattatatcaactgggtccaacagcaggcctatggaatgttggcagatatccctgttacaatctgtacatatccatttgtatttgatgcccaagcaaaaactactctgttacagaccgatgcagtcttacagatgcagatggctattgatcaggcccacaggcagaatgtctcctctctttttctcccagtgattgaatctgtgaatccctgcttaattctagtggtgcgtagagaaaatattgtaggagatgcaatggaagtccttaggaaaacaaagaacatagattacaagaagccactcaaggttatatttgttggagaagatgctgtggatgcaggaggggtgcgcaaagaatttttcttgctcatcatgagggaattattggatcctaaatacggcatgtttaggtattatgaagattccaggctcatttggttttctgataagacatttgaagacagtgatttgttccatttgattggtgttatctgtggcttagcaatttataattgtaccattgtggacctccattttcctttggctttatataagaaactactgaaaaagaagccatccttggatgatttgaaagaactaatgcctgatgttgggagaagcatgcaacagttactggattatccagaagatgacatagaggaaacattttgtcttaattttacgatcacagttgaaaactttggtgcaacagaagtgaaagagctggttctaaatggtgcagacacagctgttaacaaacaaaatcggcaagagtttgtcgatgcttatgtggattacatattcaataaatcagtggcttccttatttgatgcttttcatgcgggctttcataaggtctgtggaggaaaagtccttctgctctttcagcctaatgaactacaagcaatggtcattggaaatacaaattatgattggaaggaactggaaaagaatacagaatacaaaggggaatattgggcagaacatcctacgataaaaattttttgggaagtatttcacgaattaccattggaaaagaagaaacagtttctgttatttttgacaggtagtgatcgcattcctattcttggtatgaagagtctgaaactagtcatccagtccacaggaggtggtgaggagtatctcccagtttcccatacttgttttaatcttctggatcttccaaaatatacagaaaaagaaactctacgctctaaactgatccaagctattgatcacaatgaaggcttcagtttaatataactttggagttataactattcagtttagtgcaaaagcattaaactatttgtgtttttcttgtggtgatgaattcagcaaggtgacagaggtactattataattcttacttgcagaatgttcaatctacgagtgttcatggaagccaaaaaatattaaaggaaaatgaacaaactgttaatattattgtacagaaccatggattttttttgaccatcttctaataaacatagcaagtattatgaatacattaaagttttactaacatgaattttaagagtttgcatatttcagaaatgatctggtgtgagtgcatggaaatattgcttaatttttcttcaatcattgagtgaaaaacctttaactttggcctgcaatagtcatttgattattttttcattttgtaaataatgttaagttttgtaataaaatagttatgttctgataccagtacagtttctatggttgtaattgaacttgaacagacttttaaaggttaaaaattatgatttaaatcttactctgagactctataaaaagaaaaaaaaggtagcatggtggaaacactatcttttcttttttgctagaataagtgtctttgtgcaaacctaaatcacagatagggaatatactacataacctgcagttcttttctttgtgaatcctgacacactgatagatgggggattgtcgatcagagaacttattaatatttagtactggaagaactctgtctccacagttgccagtaataaaaagaaacattggctactatgagcaccaatcactgggttatagctttcaaaattattgatgctgcagtgctttagagctatttccttgaatttaagaaacaaatcttaacagttttatggtgctgatgcttagttgtctcatgccattaaattgtaaaagtgagttgatgcaatacatgtgactttctgctataatgcaaatatttattttttaaatttattttaaaatgccgtgaaaactgtttaataaagatttattgttttaatatttaaactttcaaaaaaaaaaaaaaa

SEQ ID NO: 385 - DNA, 1619 bp, HOMO SAPIENS
ctccagctgagctaagtgtagcagcagcaccagggcagggactgactccagcccttggactcaggacatcgcagaccttcccttgcgtgcgtgactcattcgcacatccatttctgtttatgcctggggtggggagaaaaatcccaaaccagctccattggatatgactgtgcactggagccggttgtgctgttctctcagctgtacacacccatcaaatcacagtgcccctgaggacgagagaaaattgaagctgtgtaaatgagtatggaagattatgatttcctgttcaaaattgttttaattggcaacgctggtgtggggaagacgtgcctcgtccgaagattcactcagggtcttttccccccaggtcaaggagccacaattggagttgattttatgattaagacagtggagattaatggtgaaaaagtaaagctacagatctgggacacagcaggtcaagagagatttcggtccattacccagagttactaccgaagcgccaatgccttgatcctcacctatgacattacctgtgaggaatccttccgttgccttcctgagtggctgcgggagatagaacaatatgccagcaacaaggtcatcactgtgttagtgggcaacaagattgacctggctgaaaggagagaggtttcccagcagcgagctgaagaattctcagaagctcaggacatgtattatctggagacctcagccaaggaatctgataatgtggagaaactcttccttgacttagcatgccgactcatcagtgaagccagacagaacacacttgtgaacaatgtatcctcacccttacctggagaagggaaaagcatcagctatttgacttgttgtaatttcaactaaaggctgaggcacggagaagaaaaggaatcagcaactgccctgatgggccatgagatgctggggagatctggcgatgactgtggctcccgctctctgaccttctgactcctgtgggctcctgagcttacaaagcatggcaggccaagggcctcgaccacaggccagcattagcagaacatataatggtttcacccttttccagtctggagttggagcaaggagaaaattgcactaggcactccatgatctgcagagcatgttgcttttgtttttttaaaaagcaagtaaaagcgcattcctaaacagagtccggggggaaatgtactgtagggatccctcctgcacatcagtgggtgcatgtgggaactcttctttagggcttcggtggtaatcatctgggggccctggttttcttgtctaccagataaaccaaaactgggaaggccaagtacagtctctgtggtgcgtattgacgaccccatggagattttgaaaagtgttatttctcttgtccacaggcactttcaagaactttgggatgtaaaaatgaaatgaaacctttacccatgaccaacagtaacaatcattgttttaataatatatacaagctccataactccttttggtgctaatgattccgctatttcacagaccaaacgttttagtacattaatgtccttaaatgtgttatatagaaataaaaaaatgggggaagtccatgaatcagcaaaaaaaaaaaaaaaaaa

SEQ ID NO: 386 - DNA, 1854 bp, HOMO SAPIENS
attcctttttaaacaatatccattctcttgatgtctacaatatcacctttcttatagattcgcatatacatggccaaaggaacaactccatgttttctaaaaggcctagagaacatacatcagctcaccaggacatgattatagcttctcaagcttatctaaaataaaagataacatatatatcaacatttttgatgaaatgatgactgaaaaacatgaggatcactgtctcaagagctgtagtggtcactcatatataagaaagaattggcttggatgcattgtcttccctttttctgctcttctgcaacaatctgagtttttagatcaaacagaggtcttgcagagagcacagatttttaaaaagaattgtaaggcaatgtttcccaaccgaagaatcgtaactactgtttttaatgatgaagggatacagttcttagtcacaagatatatcaaggcattaaatccacctcagcaacttctggatatatttcttcacaattctaatgcaacatttgacctcattgctcgatttgtatctttgattccttttgtgcctaatacaccagatgaaaatgatggctctgatatatggatgacatcagagcactgcatcagtttagctatcggaaataaggaggagcatgccatccttctctgtaatttctttctgtattttggaaagaaggcactggtcctcttgggaacgtcagtgttagaagggcatgtggcttatgtagtaactcaagaaactaatgaatatttgctttggaatccatcaactggccaatgttataagcagtttgacccgttttgtcccttaaaaagtgtagattgtttgtttgatgatagaaatgtctggtttaatattcaacaaaataatacaccaatggctgtattttttgactattcaaaggaaagtttctggaagcagttgcttccaaaaaacgttcaaggaacaaaaatacaaagcatacaggtcacgggatttcccatccagatgccatacattgatgtacagtcaattattgatgctgtttatcaaactggaattcactctgctgaatttccccagacagaatttgctttagctgtatacattcacccatacccaaacaacatattatctgtgtgggtctatttggcttccttagttcaacatcaatgaaaaggaagcagagcaaagtaaaagattgtactatagtcctctagtaccaacaaaaacttttctggtaccttgagattttgctgtttattctcaagtccagctaagtgctgggcccaatttttgattcacttacagagctgggcactatggagactcgcacccctgagtgagtctttgaggaggagtctagatgagcttctcaccagagacctctccaggaaggacctttggatagtctggctttcttgggtcactgtctgcagtaggtcttattctgggaaagaagcaattttggcctcttctcctaagaccaatgtttctcaaattgtagaattcacaccacctccatttgaatcatctggagagccttgttgaaaatgcagattactagatcctcctcaagacccactgaatcagcacctctgggagtgaagctacagactctgcattattttcaacaagctccccagataattctgatgcactgttatgagggagagcccagccttatagaatgttgtcactactaaactaaggctggtacgtttgatgctgggtctgatacaatttcagatggaagctgctcgagtggaaaactaaggtcattgcctctcatggataaaatgttatttcactggtaaagaaaaataaaataaaatctaccatgttgggctgaaaaaaaaaaa

SEQ ID NO: 387 - DNA, 4693 bp, HOMO SAPIENS
aggttgcgacttcccttccctaccctgctcggctgcgtagtgcgctccccgcccagcctgcagagctcgcgccgcggcagcccagccgctcggccccgccgcgctcgcagaggccgccatgggcaccgcgcgctggctcgcgctgggcagcctcttcgccctggctgggctgctggaaggccggctcgtgggcgaggaggaagccggctttggcgaatgtgacaagttcttctacgccgggaccccgcctgcggggctggcggccgattcccacgtgaagatctgtcagcgcgcggagggtgctgagcgcttcgccaccctctacagcacccgggaccgcatccccgtgtactccgcgttccgcgccccgcgccctgcgcccggcggcgccgagcagcgatggctggtggagccgcagatcgatgaccccaacagcaaccttgaggaggcgattaatgaggcagaggccatcacctctgtgaacagcctgggaagcaagcaagccttgaatacagattaccttgattctgattaccaaagaggacagctttacccattctcccttagcagtgatgtccaggtggccacatttactctcacaaattcagccccaatgactcagtccttccaggaacggtggtatgtgaatctccacagcctaatggaccgggctttgaccccacagtgtggcagtggggaagacctatatatcctcacaggcacagtgccctcagactacagagttaaagacaaagtggcagtccctgagtttgtttggctggcagcctgttgtgctgtccctggaggaggctgggccatgggctttgtcaagcacacccgggacagtgacatcatagaagatgtgatggtaaaagatcttcagaaactgcttccatttaaccctcagctgtttcagaacaactgtggtgaaactgagcaagacacagagaaaatgaaaaaaatcctggaagtggttaaccaaatccaggatgaagaacgaatggtacaatctcaaaagagttctagtcccctttctagcaccaggagcaagaggtctactctgttgcctccagaggcatctgagggaagtagtagctttttgggaaaactcatgggcttcattgctaccccattcatcaagctttttcaattaatttattaccttgtggtagcaatcctgaagaacattgtctatttcctgtggtgtgttaccaagcaggtgattaatggcatagaaagttgcctttaccgcctgggctcagccaccatctcatacttcatggccattggggaagagttggtgagcattccctggaaggtgctcaaggtcgtggccaaagtcatcagggctctcctccggatcctttgttgtctgctgaaggccatttgccgagttctgagcatccctgtccgtgtccttgtggatgtggccactttccctgtgtacaccatgggcgctattccaattgtttgcaaggacattgcactgggccttggtggcactgtctcactgctctttgacactgcttttggtaccctgggtggcctatttcaggtggtttttagtgtctgcaagcggattggctacaaggttacttttgacaattctggggagttataaactcaaaaaactaatagtatccagtcacagtgaatttgaaagctggaatagtttgtctttacaatgggtttctgttcactgtcagttatcattatattttggcctttggtggggatgtctgcttgtttttgcaaaagaagatggcagaatttagacttgacagaggagaaatgctcagggtgagattaggtgtagtaatctgctgtttacctccagttatatgtgcaaactcccaagccactaataacttcagttatgcactctaacacagacgaccacctgaaatgcactggtatttatttctgataattaaaaattacaggggagggaagaactagaaaaagaacaactttagaccaaaggtgtctgagaaaaggagaaagggagcttgttcttcccattgctctttgtgatttaaggcaaaacagattaaaaaaaaaatctgcagccaatttcttggcatttgcttctctttctcctcaactcgactgaccttggtggaatgcagataatgcctctttgttgaaataactttgtgggaatgtacaattttctatatctcttagctttccgtggttctcaaggatatgtacagttttcattttcctccaaagttgaattttgctacatttttcttttaggtaatgataagcattttttaaaaaatcatttttaggtaatggtaagcattttatgccaaatgtggcataacagagtttgaattgaagggcaaagttttcttttcttttttttttgggccccttgaatggtataatacagtcctctccggtggaaagaagagaagagaaggtggacagccctgctcttagtaggtgctgcagatccaaggacatcttttgtccagcttggattaacttgacgtgtatccctgcctgacaaggttgaactgaaagatctatatgttaagctaacatgaaaattcatattctgcaacatagtagatttttctaatgcatgaaataagtacccagcacagtaaaaatactctgacttatgtccctaaatggttgttttgatacaactatatagaaaagagccacaaaataaagataaaagttattgtggccatctctgaaaaaaatatataaaatatttaagaataattatatcttaggaaattatttttacagtgtgtttgaggctacaaacataactcccccattaatacaaattaaatgtgagagctcattctcaaaatttttttgatcaagcacttgtcattttaaatcttgcactaaaaaatggtaacaagagggaccaaactttgcttcccacaattgggatggaatcacctggatttttctgaatgttttaaagaattgctgagaggtagaaacagccaagtatgaaatactgatcttggggctaccgcccaggatcaatcagaaagttatatgcaaaaattcggggtcccaacaaggagagaacaatatgtcaaccatttgcatggggtcgatggatgagaaacatgagcgtagcaagagttacattttgcagaaaaatagcggaggcacacccagagtagaacagcagccagcaagctgccatcctgatcaatttgtgatgcaaggttagggagtatgagcaccgcatgggtccatgctagggagatgtgcaccaggcttagctaagaaacttaaagcagtattttaccaactcttgtcttagggagcataaagtttggatgtccctttatttcagcagtgtgaaggtaaatggaagggtgagggtttgacttggtactgattggtcaagaatcctgctggataaagaaaaggaattttagaagtgaccagagggacagtccagccaaactattatttgataaggaacccaaggccctgggaggcaacaggctagcccttagtttcatggctagctgagagcagattaggagccaacgttgtttgcacatgtcccatcacacctgagatgtcagacatgggaagttcgtgctattattcagttgcctctctggaccatggcaagatttcctcattcatcaaacagactccaggccctgacaaagcagttggatttggcatgtgtgatgaaaacaattagccatccatgtacaacattatgcttactgcatcccatggaaacttaattccctcctagcacatatttgcatactgaaaggtccgaaaagggcatccacggcagcttgagccccttagcaccatgtaaggagcacagcatccaaacggcttcttgagaaccattggggaatgtctttctttttcacatccaattgtttagtgtctatttattcttgggtggccagttttgaaacctaaaaagggacaataaagcaaaaagtatcagtaaggataggtggctgagacccactgccctgagctactagtgtggctgtgcctgtgggtctctagaaccatctgcattggacgtgaagccacagcaggtggctggactgctggcctgttcctaatgagctacgctgggctttgaggtagaggttggggtttatgaaccccaactctggcttaaagatcttgctgtggctctgttatgttctgaggccttgggattagcctcttcctcattatggagctgattttctagtctgtggatcagctatgcctttggacacttctcttttccattgtgccttttgaatgttgtcttctcactcagcatcagcacttcgatctaaatgcagactaggtagttgggaggaggaaccaaagtgaaccatccttcatttattcagtcattcgttcatctgtcaaacacgtatttggacatcaaggttgcagagatgaacaatgcatggatttcatctttgaggagttcaaaacctagtggagagaacacatggtacaatcgtaacacatgaaggacaagtaagtgctgcagtaaaggtactaataacatgttccttggaacagaggaagaaaaaccacgaaaccatggaaattagggaagcctttacagagggtgtgacaaaactcaatttgacattttcaagctatgtacaatgatgtgcaccttgcagatgctcaataaagtaattactgacaactcgtt

SEQ ID NO: 388 - DNA, 12172 bp, HOMO SAPIENS
attttcttctgcacttctgtctggagaggtctgtagccactgagggccccggtcggggccgctttgcaggtccctagtcaggaccgagcaggggagtaggataggaatccccgccgcacctttgtacgagcctgaccccttccgtgggtttgttcctgggtcgccgtcaagctgcggtctctcctcccccgcccttcagccccgcggtctccaggggcggcgccctgggtctggaacgcggttgccaccgaggaggcggcggccctgcgtctggaacgccgttgccaccgaggaggcggcggccccgagcgcgcctggaagccccgggcaaccggccagggtcgggcacaggtggggtccgtcaggccgcccggggctcctctgtcccagctctgcggcccagggggtgacgtgatggcggcagcggtgctgacggaccgggcccaggtgtctgtgacctttgatgatgtggctgtgactttcaccaaggaggagtgggggcagctggacctagctcagcggaccctgtaccaggaggtgatgctggaaaactgtgggctcctggtgtctctggggtgtcctgttcccaaagctgagctgatctgccacctagagcatgggcaggagccatggaccaggaaggaagacctctcccaagacacctgtccaggcgacaaaggaaaacctaagaccacagaacctaccacttgtgagccagccttgtcagagggaatctcacttcagggacaagtgacacaaggaaactcagtggactcacagttggggcaagccgaggatcaggatgggctatcagaaatgcaggaaggacacttcagaccaggaatagatccccaggagaagtctcctgggaagatgagccctgaatgtgatggtttagggacagctgatggtgtgtgttcaaggattggacaggagcaagtctctccaggagatagagtccgtagccataactcatgtgagtcaggtaaagatcccatgattcaggaagaggaaaataactttaaatgcagtgaatgtggaaaagtatttaacaagaaacacctccttgctggacatgagaaaattcactctggagttaagccctatgaatgcacagaatgtgggaaaacctttattaagagcacacatctcctgcaacatcacatgatccacactggggagaggccctatgagtgcatggagtgtggaaaggccttcaaccgcaagtcataccttacccagcaccagcggattcacagtggagagaagccttacaagtgcaatgaatgcggaaaggccttcacccaccgctccaattttgtcttgcataacaggagacacactggagaaaaatcctttgtgtgcacagaatgtggccaagtctttcgacataggccaggctttctccggcactatgttgtccacagtggtgagaatccctatgagtgcttggagtgtggcaaggtcttcaaacacaggtcatatctcatgtggcaccagcagactcataccggggagaagccctatgagtgcagtgaatgtgggaaggtcttcttggagagtgcagccctgattcaccactatgtcatccacactggagagaagccctttgagtgcctcgagtgtgggaaggctttcaaccaccgatcctacctcaagaggcaccagcggattcacactggggagaagcccttcgtgtgcagtgaatgtggaaaggccttcacccactgctctacttttatcttgcataaaagggcccacactggagaaaagcctttcgagtgcaaagagtgtgggaaagcctttagcaatcggaaggacctcattcgccacttcagcatccacactggagagaagccctatgagtgcgtggagtgtggaaaggccttcacccgcatgtcgggcctcacgaggcacaagcggattcatagtggagagaagccctatgaatgtgttgagtgtgggaaatcgttttgctggagcacaaacctcattcgacatgccattatccacactggagagaagccctataaatgtagtgaatgtggaaaggccttcagtcgcagctcgtccctcactcagcatcaaaggatgcatactgggaaaaatcccatcagtgtaacagatgtgggaagaccttttacaagtggacaaacctcagttacccttcgagaacttcttttagggaaggactttttgaatgtaaccactgaggcaaatattttgccagaggaaacatcttcctctgcatctgatcaaccataccaaagagaaaccccacaagtgtcttcactgtgagaaaaccttctgttgctgaatattacttgtcatctgaagagtcatattagaaattcgttcagtctagagccttattctccatctgataatttatcctggagagagacccagtggttattgtgcacataggagaaccttcagctgcatctttctccttagtttacagtgcaattttatctcaggaattatttttaaaaggaggaggggacatagaaaaaatgaaatgcaagcacacatcttttcaggcttctctgccaagcctatggcgctttgtcatggatttcttagtgtatttgggggaagggaaatgtttcaaggtaaagaaccttgaccctttatgtgcttgtatgtacatttattgctatccagtgtcagaacagttagtttaggaaaagtatgcaaactttaatcgcacatcttctgtattccacaatagtacttactcttgagaagcataactttatgacaacttagggggcttgagccatgaaatactcacgtttaagtcagtaaggatacacatgttaacattcaggcttttgtcttgatgcccgtcttttggtttacgtcatcattgtagccatatggtaaatttttatttgttaaatttttaaaaattacttagctcaaaatgtcagtggtaaatttttaaattgagtaaagtgattcttctttgctcttatttaaaatcgacagcatttctagttcctttgacattccatataatttttaggattagtttgtacttatttacaaaacagtcttgttcagatttttacagaaattgagttaagtctgtggattaatctgttaagaattggtatctttactatgttgggtcttgtagttcatgagtgcaggagtaggcctcttaatttataatagttaagcattccttaaagtatttcattaatgttaaaaattttcagcgtatagatccctatgcatttttgttagaatttgcatcctagggtgcttttttgtttgtgtgtgtgtgtaatttgagtgattgtaaatggcattgatgtttgaactttgaattgcacacaatttttggtagtatacagaaatataatatttttggacattgttttgctaccctgcaaccttattgagttcacttattatttttagctatttctttcgacagaatccttggaattttctatatagaaatgtcatctgcaaatacagaccattttttatctttcatcttacctgtaatataccttttatttcctttttgtttgtcttattgcattgcacaagctgggacttccattatagcgttgaataggaatagtgagaaaggccatccttacctggttcctgatagtaggggggacaatgttcagttttttgtttttttgttttttgtttgagacagggtctcgctctgtcacccaggctggagtgcagtggcacgatcttgtctcaccatagccttaagttcctgggctcaagtgatccccccacctcagccctcaccaccccccagtagctggtactacaagcatgcaccaccagtcccagctaatttttgtattttttggtagagacagggtttcaccatggtgcccaggctggtcttgaactcctgggctcaagcaacctgcttgcctgggtctcccaaagtgctgggattacaggcgtgagccacagtgcacagcatgttcagtttttcatcatgaagtataatgtaagttttataaaacatatgtcctctataagggtaaaaaatttcctctgttcccagttttctgagactctgtgttgctatgaataagtgtggaattttgttcagtactttttctccaccagttgatgtcattatgctattttccttctacatcctattgatggaatgtattgctttgatcaagttttgaatattgagccagccttgcatccttagaataaaccatacttgtttgtagagtataattgtttttatatatcatttgacatcattccctttgtttgtattttgttgaggaaatattcctctaatttattggctaataatgtgtagttcttttttcttttgtttcttatgttctaaatgtcttatgtgtggttttgatgtctaggtgatcttgacctttcaacatgaattggaaggagttctcttctaatttttggaagactgtgtagaattggtgttatttgttcttgtcatgtttgatgacctctagtcaaccattgggccagagatttttcttctggaggcttttaaattacatatttattttattggataggtagaactattcgaagtatctatttcttgtgtaataaattttgatagtctgtcctgttgaaggaatatttcatctgtatttgtagcactcccttattcttttgatagcaggatctgcacttctttttatttttaatatttaaaatgtgcatactcattttatgattgagtcttcttagacatttatcagttttattgcgcatcatgctgaaagatgtaatttttgcttcatctctcacttcagagaactagcactttatattaatgatttgtctctattcttgatttctttgatttctgctctgatcggtattatattccacttgctttggttgtatttggctctttctaacttttcaaggtggggttttagattattgatttgagatttttttgcttttttaatgtaagcattacattgtataaatttacctcatatcactattggtttgatcccacaagttttaatgttttcattacattttaattctaatagtttttattttttgagacattctctcttagccatgaattatttaatagtatgcttaattttctggtgtttggcatatttgttactgatttctaatttgttccatgtttgatctgactgtttaaatgtgttaacatttttttatgacccaggatagggtctatcttgtttcgtatagctgcttgaaaagaatgggtgttctgctgttactgggtggagtttctataaatgtctctatgatcctgctcattgttattcaagtcagctatgtccttgctgattttctgtccagcatttctgtcagttgctgagaggggtgttgaagtcctgaacataggccgggtgcagtggctcacgcctgtaatcctagcactttgagaccactaaggcaggtggatcacctgaggccaggagttcgagaccagcctggccaacatggcaaaaccctgtctactaaaaatacaaaaattagccaggcatggtggcgtgtgcctgtaatcccagctgctggggggctgaggcaggaggatcagttgaacgtgggaggcagaggttgcagtgagctgagatctcaccactgcactccagcctgggcaacagagcgagactctgtctcaacaacaacaacaaaaagtcctgaacatgattgtggaagtgtgttgctctttcaagttctatcactttttgtttgcaaagttcaaagctgtattgtttggtacatatacatgtaggtttgccaagtctttgtggtgaattgactcttctgtcattatgtgatgtcatttttttgccttttaatagtcttgtcaatactttacctgatgttctcatagtgactcctgcatattttgattaatgtttgcatggttaatatttcttcattttattttaaagcttacctgtatcattacttatgaagtcagtttctttgaacagcatatactcaggccatgctttttttattcattctgcatatgtctctcttaattggtatgttgaaatgatttacattaaaataattattgatattttagggcttaagtgtgcccttaaatgatttttgtgttcttttttattgttcctctgttatttggggttgtttactagtcttcctataggttacttcaccttttttttttttaataatttgatttgatacatatgtagtgttttttagtatagatcctccttgacttatgatggggttatgtcacaataaacccattgcaagttgaaaatactatgtcaaatatgcatttaatacacctaccctgctgaacatcatagccgatcttgccttcagaatgctcagaaaatttacattagcctgcagttgggcaaaatcatctaacacaaggcctactttataataaagttactgcaaagaattttaaataaaaattcaagtgtggtttctactgaatgcatgtcgcattcgcaccattgtaaagtcaagtagtaagtcgaaccatcctaagtcagggactgtctgtatatatctgcattttttagtgattgttctactattacagtgtaaatatataacttatgacagtttaataagttatcagcaatttagcactttacttccattaggttcctttagcttacctactaatgtaactatcttaagtaatagtaattcctcttcaaaaattgagcgctatgttgcaagatgtaatttttcttttccttttttttgagaccaagtctcactctgtcacccacgctggagtgctgtgatgcgatctcggctctctgcaacctctgcctcccgggttcaagcaattaactgcctcagcttccctagtaatggattacaggcgcccgccaccacgcctggctaatttttgtatttttagtagagacggggtttcaccatcttggccaggttggtcttgaactcttgacctcatgatccacccgcctcggccccccaaagtgctggggttacaggtgtgagccactgcacccggccacaagatgtaatttttactttatctctcacacgtattttacaaaacgtcatgagaaacattgtctcttgaccttttttttttttttttttttttaaagagacagagtctcactctgtcacccaggctggagtgcagtggcacgatcttggctcactgcaacctccgcctcctgggttcaagcgattctcctgcctcagcctcctgagtagctgggattacaggtgtgcgccgccacacccagctaattttgtatttttagtagagacggggtttcaccatgttgctcaggctggtctcaaactcctgaccttgtgatccgccaaccttggcctgtcgacctctttacccattccattgttcattcttctttcttgaaatcccaaaccttctattaacatttcttttcagttatacactgaactttactgtagcctttcttctagagtaacaaatgttctttgttttccttcctctaaagatgtctttatgtttccttcattcccaaagaatatttttgtggaatataagattcagagttggcagttgttttcttttagacttcagagatgtatctctctgttctgtacattattgtttaatataagaaacctactagcattcaaataatcattccctattttacaatgcatcagttctgtcaagcttcattcaaagtgtttttcattgtctctagtgttcagaagtttggctgtgatgtgcgtggcatggaagtttttgggtgtattctatttggcgctccctggtgcttgcccagctttttgatctgtaggattatgccttttgcaaaatttggggaactttcaactattatttcttcaaatattttttcaccccccagtcttgtcttttttagggacttcaataacatgagtggcagatcttgttttacactcccatgggtccttcaggctctcatcttttttctttttccagtctattttctgtcttgttaatattgattaatttttattgaccttccatggtcctcactgattgttttctttgtcatacctaatctgttgagtttgtgcagtgagttttcattttggttttgtattttccagttgtttaatttccattgggtgggttcttttgtacaccttctgtttctttgcttattttttaacgccaaagaaagactctcagagaatagacaactatattccaaagtcatggttctctggtggtttgtcttgacatttgaatagaaatgttaaactatctgggggaatagaaagcccacagtcttctgagttgtgctacaccaatatttctatgaacagatcttacaactgagagtgatctgcagatttttcagagtcatgttctccatggaatgtttgtaaaattccctagctctctgcactgagctgagatcgtgccactgcactccagcctgggcaacagagcgagactccatctcaaaaaaaaaaaaaattctctagctctctatgccttgttgtatcctcaggaaggagtcacctctcttccaggatcactcttgccttttgttattggacacattttcctacctcctgcccagtcttttttaggctctctgtcatacttcctcgcctagtctttaacttgtctctgataaccagatttttcccccataatctgtatctgtattcaagtctctatcctcatccccaaatggatttcaccccgcttgtccatcagtctctgcccatttcttctgtctcccacagacatggtctgtgtagttgttctgcacactacccgtcctcgccccttctcatttccctcactccacggacagctacaggagggcttccatcatttgtcctcttacttccttgttagaactttgtgctgctgaccaccactctgaaccaaaacttctttcttggttcttgaaagttgctgtctttctcctccagagggtctgtgtcttccttccaactcttaaacatttttgtttcccagaatccatcattggccattgctttttcacttgccatgagctctgtgaatgagatggttcctgctgaagacatttactttcaatgatctacagaatttcccaaatctatgtctccagactggatgtttctcacgtctgtggcccactgggcatcttctgcactttctctgcatttgtaaacactgagcctgtatgcgtgtctatgtggccatggccctggccgtggggatgcacccataattataatgagagcaggtgaatgtcatgtggctatgtatgagacattgttgtgaatgttttacatgcatcagctctttcaacatttacagcatctgtgtgtggtaggtaatgttgtttccttcattttgcagagcagaatatagataggctcaggttaagaatttgcccaaggttacacagttatgaagtttggatttaggaatgggaggccacgtagactggcttcagaattcatgtctttaaccactttattgcttctcatgttggggggtttgttttctggtcactatttttactaaagttgattcaacaatgctataatctgttactctcattcgacaatacatcttgactgtttcttcaacttgaggaaggtaaaccaaagccactctttaatgggtgcaaatatctgttgtaactatgtagaagatacagtgtctgggtttgaggacaggggagtgggaaaactgagtagggaagcggtaagacatgcatctggctttaggagtgtttgaagtgcctaaagatcagggtgaatttcccaaatttgaatcttgttgcccaagccacattgcaaccacctctttttctcttacctcgtccccacatccaggcactgccccattctgttcattccacctttttttttagtagaccctccatatatgtgtgtgttttggtgaatggccacacacagcaaagttatttttattgcaattttgttgttgttgtttgagacacagagtctcatactctgccacccagactgaagtgcagtggtgcgatctcagttcactgcaacctccatccccccatgttcaagcaattctcctgcctcagcctcccaagtagctgggattacaggcatgggccaccatgcccggctaatttttgtattttttgtagacacggggtttcaccatgttggccaggctggtctcacactcctgacctcaggtgatccacccgcctcggcctcccgaagtgctggcattacaggcatgagccaccacacccagcctttattgcaatttttggttccctcacagaatgtttaccatgaagctgtgcgtataggtggtaccatgtatgacataccttgacctcaaagataatctacctgggctttttttgtttgtttgttttgagatggagtctcactctgtcacccatgctggtgtgcagtggcgtgatcttggctcacagcagcctctgcctcccgggttcaagcgattctcctgcctcagcctcctgagtagctgggactacaggtgcctgcgaccacacccagctaatttttgtatttttagtagtagtgggatttcaccatgttggccaggatggcctccacctcctgacttcatgatccacccgcctcggcctcccaaagtgctgggattacaggcgtgagccaccgcacctggcctacctgggcttttttggacagatgtacatgattttagaaattgttatgaatgactgtcttgggatcctcaagaacacccccaggtttgacgatttgctgagaagactcaggtctcagcattctgtcatactcaacagctatgatttactgcagcaaaaaaatacaaagcaaatagtaaagggaaaaagccaaaattcagagaaaaccaggcacaatcttctgagtcttgtttcagtgaagtcacaggatgtgccttatttaagttccatctggtacttatgacaacacatgctatatgtccactgggaagcttattagagactcagtgccagggtttttattgggcatgttttctagcacatcccacaattctggacttccagaaggttagcaggggttcagcttttcagctgaaaacgttatccccctttcagctggggggaaaaaaaggcaccgaaaaacagggcagtgagctactcctgttttgggtgggtggagcagtagtaagcctcccaaaatctaaggtcccacactccagcaagggtgaaccttgcaaactcaaaaggatagcagtctccaacctgctgttttatacagtgacttaagtggtactaaaatgctatataagtcaaatttacgtaacattaagcaaataattttttttcagcaaaaaaataatggtcatgactttgtggtgaaggcttatgtaatgattgtaataaattcaggtggctcacgcctgtgataccagcacttttgggaggctgaggcgggtggatcacttgaggtcaggagtttgagaccagcctagccaacatggtgaaatcccatctctacaaaaatgaaaaattagccgggcgtagtggtacatgcatttagtcctagctacttgggaggctgaggcaggaaaatcgcttgaacctgggaggcagaggttgcagtgagccgagatcatgccactgcactccagcctgggtgacagagtgagactgtgtctcaaaaaaaaaaaaaaaaaaaaaatgcctcagttttgttaagaggaaaaagcaaatcctaagttacagtggaacttatgaacaccctagcctagagatttaatttagtgatgaaaaggtacagagagagtctttcaagaaaggacctagtctgctcgcgttctctctctctctctctctatatatatatatgtatatgtgtgtgtacatatggaccacttcaagctacacacacacacacacatatacacgtgtatgaatatatatatatggctataagtggtgcgacttgcaggtactccctttgttcacctttgtaaagatgttattgccagttcagtgtgtatttctatagtatatatgtaaacaatttgtcatccttttgttgctgcttttgaaactagttcatggcttcagtgggggagagatttaaataatatgggtttataatttctgcattattaaatgcagataacttgtgattaaagagtatgttattggaaaaaaaaaaa

SEQ ID NO: 389 - DNA, 3132 bp, HOMO SAPIENS
agcagtgttctcttcgtccccctcccccaaactgaggattgggcaataccacagaacctcaggaaaggggggaagagcgagcttcggccccactaatgggggagtgggcggaggctggatttcccacctcggctgcacctgggcactggaggctgaagaggaaagtgagaatctgaagttttgagacctctgactggccaggaatagctcctggggcggggggcaaggatgggaccataggcggaaagagtctcgcggtcccccctgcttctggcgcgggtccctgcgcccggttgtggagcgtctcgcgcggggagggggcggggggaacggcagctcgcggtgttgttcactcgcgcgtcgagcacacggtgggtccggcggcgggttggcgccccaggcggcgttccctgtggcctggcgcctgggccgctgccctgagcgggttccgccccagagcccgaccctcctgggggctctaggcggagtcccgcgagccgagggggaccggcgaccgctgccgaagcatgaagaaggggtaaggcgtgagcccccaagatttcacgcatgccccctagcttcggtactctgacaccttctcttgcacttgcggatgatgaactggaataacgatgaaagaaagcacatccgatctcaacattcacgtcctgccctataaccgattaattaattgatccccagctagactaggtgaactggcacaaaggttaatctcaagatgccgctagtgaaaagaaacatcgatcctaggcacttgtgccacacagcactgcctagaggcattaagaatgaactggaatgtgtaaccaatatttccttggcaaatataattagacaactaagtagcctaagtaaatatgctgaagatatatttggagaattattcaatgaagcacatagtttttccttcagagtcaactcattgcaagaacgtgtggaccgtttatctgttagtgttacacagcttgatccaaaggaagaagaattgtctttgcaagatataacaatgaggaaagctttccgaagttctacaattcaagaccagcagcttttcgatcgcaagactttgcctattccattacaggagacgtacgatgtttgtgaacagcctccacctctcaatatactcactccttatagagatgatggtaaagaaggtctgaagttttataccaatccttcgtatttctttgatctatggaaagaaaaaatgttgcaagatacagaggataagaggaaggaaaagaggaagcagaagcagaaaaatctagatcgtcctcatgaaccagaaaaagtgccaagagcacctcatgacaggcggcgagaatggcagaagctggcccaaggtccagagctggctgaagatgatgctaatctcttacataagcatattgaagttgctaatggcccagcctctcattttgaaacaagacctcagacatacgtggatcatatggatggatcttactcactttctgccttgccatttagtcagatgagtgagcttctgactagagctgaggaaagggtattagtcagaccacatgaaccacctccacctccaccaatgcatggagcaggagatgcaaaaccgatacccacctgtatcagttctgctacaggtttgatagaaaatcgccctcagtcaccagctacaggcagaacacctgtgtttgtgagccccactcccccacctcctccaccacctcttccatctgccttgtcaacttcctcattaagagcttcaatgacttcaactcctccccctccagtacctcccccacctccacctccagccactgctttgcaagctccagcagtaccaccacctccagctcctcttcagattgcccctggagttcttcacccagctcctcctccaattgcacctcctctagtacagccctctccaccagtagctagagctgccccagtatgtgagactgtaccagttcatccactcccacaaggtgaagttcaggggctgcctccacccccaccaccgcctcctctgcctccacctggcattcgaccatcatcacctgtcacagttacagctcttgctcatcctccctctgggctacatccaactccatctactgccccaggtccccatgttccattaatgcctccatctcctccatcacaagttatacctgcttctgagccaaagcgccatccatcaaccctacctgtaatcagtgatgccaggagtgtgctactggaagcaatacgaaaaggtattcagctacgcaaagtagaagagcagcgtgaacaggaagctaagcatgaacgcattgaaaacgatgttgccaccatcctgtctcgccgtattgctgttgaatatagtgattcggaagatgattcagaatttgatgaagtagattggttggagtaagaaaaatgcattgataaatattacaaaactgaatgcaaatgtcctttgtggtgcttgttccttgaaaatgtttggtcattctagtgttttgctttcttttccttataataaatgacccttttcctccataacttttgatttctaaggaaaatattagcatacatttcaaactaaatgttttacagtggcttatcttttttttccccctgaaaagactaatttggtcaaataaaccactaagtattaagcatggacagctgttgttagagtagcagattcagttttttgatatatcttaattgtgtactttgtgaattttaatttaaagaaagcaactgaaattgaaatcttgagggcagctgtgtctactaatgagccttattccatttcctgatgttttaaaagaagaaacactgccttgattatacgaatacactcagaaagtacatttagcttgtagtgttgaattctcttaaaggaatgcttgaattttttcattattgttttattgtttttatatacttgccttatttgaatgtttagcagtatccccttcccacttatatattgtgtgatatgattttgcttgcctataggagttaaaaacttttccatgtgaaatactctgacttaaacatacatgtaacttacataactgttaagaataacagtctgatttaataaatggttcattttaaaagttaaaaaaaaaa

SEQ ID NO: 390 - DNA, 273 bp, HOMO SAPIENS
gaacagcaacctaaaatactcatacagttagctctaacaatgtttacaagtcttaaaactattcctgcaaattgttgtattacataaatgttattgactcctcaaccatggttttttaaagtaatatttgttaattataaagtaagaaaatacaagccgggcatgatggcacatgcctgtagtcccatctactggggaggctgagtcaggaggattgtttgagcctggagtttgaggctacagtgagctatgatcacattattgcacgttagc

SEQ ID NO: 391 - DNA, 4373 bp, HOMO SAPIENS
ttttggcgtagattccccactgatcgaggcattttttttccctttttttttcctttttttttttcttttaaaaattttggccatcgttctccgtacgggggctttttctgtctgtctgtctggctggcaggctggctttccccctctttcccacggagcccgagccgggcgcccggtggggagtggggagtgggtggggggagccagcagagttccattttggaacgcccgtgccgcgtctccgcgttcccagcccgggtccccgcgttcacagccccagcgcaggtctggatgtaccgactgcttttggaataaaaagattcccaggatgtgagcaacacgggaccgatatgatgcttcctggtgtgtttagtggttggtgccattccaattttctgtgctgaaatcattctgaaaactcaaacagtagacttcagcacacaaggaaagccaaagccatttgagggggaataaagccaaaagcctttcaccttattcgttccaagaatctcaccgccccctccttatccccctccaaaaataagccattgcacacagacaggcagcatggctagcaaacgaaaatctacaactccatgcatggttcggacatcacaagtagtagaacaagatgtgcccgaggaagtagacagggccaaagagaaaggaatcggcacaccacagcctgacgtggccaaggacagttgggcagcagaacttgaaaactcttccaaagaaaacgaagtgatagaggtgaaatctatgggggaaagccagtccaaaaaactccaaggtggttatgagtgcaaatactgcccctactccacgcaaaacctgaacgagttcacggagcatgtcgacatgcagcatcccaacgtgattctcaaccccctctacgtgtgtgcagaatgtaacttcacaaccaaaaagtacgactccctatccgaccacaactccaagttccatcccggggaggccaacttcaagctgaagttaattaaacgcaataatcaaactgtcttggaacagtccatcgaaaccaccaaccatgtcgtgtccatcaccaccagtggccctggaactggtgacagtgattctgggatctcggtgagtaaaacccccatcatgaagcctggaaaaccaaaagcggatgccaagaaggtgcccaagaagcccgaggagatcacccccgagaaccacgtggaagggaccgcccgcctggtgacagacacagctgagatcctctcgagactcggcggggtggagctcctccaagacacattaggacacgtcatgccttctgtacagctgccaccaaatatcaaccttgtgcccaaggtccctgtcccactaaatactaccaaatacaactctgccctggatacaaatgccacgatgatcaactctttcaacaagtttccttacccgacccaggctgagttgtcctggctgacagctgcctccaaacacccagaggagcacatcagaatctggtttgccacccagcgcttaaagcatggcatcagctggtccccagaagaggtggaggaggcccggaagaagatgttcaacggcaccatccagtcagtacccccgaccatcactgtgctgcccgcccagttggcccccacaaaggtgacgcagcccatcctccagacggctctaccgtgccagatcctcggccagactagcctggtgctgactcaggtgaccagcgggtcaacaaccgtctcttgctcccccatcacacttgccgtggcaggagtcaccaaccatggccagaagagacccttggtgactccccaagctgcccccgaacccaagcgtccacacatcgctcaggtgccagagcccccacccaaggtggccaaccccccgctcacaccagccagtgaccgcaagaagacaaaggagcagatagcacatctcaaggccagctttctccagagccagttccctgacgatgccgaggtttaccggctcatcgaggtgactggccttgccaggagcgagatcaagaagtggttcagtgaccaccgatatcggtgtcaaaggggcatcgtccacatcaccagcgaatcccttgccaaagaccagttggccatcgcggcctcccgacacggtcgcacgtatcatgcgtacccagactttgccccccagaagttcaaagagaaaacacagggtcaggttaaaatcttggaagacagctttttgaaaagttcttttcctacccaagcagaactggatcggctaagggtggagaccaagctgagcaggagagagatcgactcctggttctcggagaggcggaagcttcgagacagcatggaacaagctgtcttggattccatggggtctggcaaaaaaggccaagatgtgggagcccccaatggtgctctgtctcgactcgaccagctctccggtgcccagttaacaagttctctgcccagcccttcgccagcaattgcaaaaagtcaagaacaggttcatctcctgaggagcacgtttgcaagaacccagtggcctactccccaggagtacgaccagttagcggccaagactggcctggtccgaactgagattgtgcgttggttcaaggagaacagatgcttgctgaaaacgggaaccgtgaagtggatggagcagtaccagcaccagcccatggcagatgatcacggctacgatgccgtagcaaggaaagcaacaaaacccatggccgagagcccaaagaacgggggtgatgtggttccacaatattacaaggaccccaaaaagctctgcgaagaggacttggagaagttggtgaccagggtaaaagtaggcagcgagccagcaaaagactgtttgccagcaaagccctcagaggccacctcagaccggtcagagggcagcagccgggacggccagggtagcgacgagaacgaggagtcgagcgttgtggattacgtggaggtgacggtcggggaggaggatgcgatctcagatagatcagatagctggagtcaggctgcggcagaaggtgtgtcggaactggctgaatcagactccgactgcgtccctgcagaggctggccaggcctagacagggaagtctgttagaactgctgtgctgatcaacgggacgctccgtctttgaagaaagaagagatggtctctccccagccatgggccacccttgccagtgactccaagtggaactacttagctcgcgtgtgcctggagggtgcgggaagtccagcgactctcagacgcacctcccagaggaccggtgggaattgttcatagtgccaaagtcctactactgcgttttcaatgggtccttgtacatagtttgctcctctgccctagccctcacctcttgctatactggaaccgatttgtacaatgtgggaattttgttacctttttaatcaagggcaacttccttttccagcactaccattgtaaggtttttttcaggagggagggctaaccaccttgcttttctcttttctctttttcttttttttatttttgttttattaatttggggaaaggggtgttagcattagtgccatgatatctactggattttaagtagggagactttatttttaaaggtaggttgaaatttgggagatttctcggcaggaagggctgaaatccaggcccctgtctcaacttggagagaggtgacagacggcagatcttccaaatcaaattcctttccagttcttcccctggctgcctttttgggggtccctgccttagccccacacaaggctttctgaactgccaagaggggatctggcttctcaactgctcggcctcttgggccaggctgtgcccagccagccctgggagaactgggtagcaggtggctgacttctttaagcacctttctaaataccagcagaagaggctcccgcctctgttagcatgatcagtactattgtgacattaaaacaacaacaataagatcttcctatctggagggtacagaggtgaatggctttggttttcatttctcttcttcactgccttttctcggtgtggtatttgacaagattttagctcaaagcctcaccatgaattgattttttttgtttgtgtgtgtgtttgttttgggacaattttagatacctgagtgcactttttcagttagtcctaacttttaaaagaaggaaaaccaagagacatatctggtgtacgtgttgcagtatgaactctggttgcaatccctccccgtcccacactgccccccatttgagtacaccgcacaagtcaaacgctaggaagtttgaataaaaccaatttttctaacttgttgctcatttgttgtaactcaataaagcaaagactaaacatttttataacctttaaaaaaaaaaaaaa

SEQ ID NO: 392 - DNA, 2741 bp, HOMO SAPIENS
ggacttcgccagatcagacccacggggctgccctcccctgcgcactcccctcgctgcccgggcccggagcgcagcgcggccgcacaggtatttttgctgtgctgtgcaaggaactctgctagctcaagattcacaatgttgaaagcccttttcctaactatgctgactctggcgctggtcaagtcacaggacaccgaagaaaccatcacgtacacgcaatgcactgacggatatgagtgggatcctgtgagacagcaatgcaaagatattgatgaatgtgacattgtcccagacgcttgtaaaggtggaatgaagtgtgtcaaccactatggaggatacctctgccttccgaaaacagcccagattattgtcaataatgaacagcctcagcaggaaacacaaccagcagaaggaacctcaggggcaaccaccggggttgtagctgccagcagcatggcaaccagtggagtgttgcccgggggtggttttgtggccagtgctgctgcagtcgcaggccctgaaatgcagactggccgaaataactttgtcatccggcggaacccagctgaccctcagcgcattccctccaacccttcccaccgtatccagtgtgcagcaggctacgagcaaagtgaacacaacgtgtgccaagacatagacgagtgcactgcagggacgcacaactgtagagcagaccaagtgtgcatcaatttacggggatcctttgcatgtcagtgccctcctggatatcagaagcgaggggagcagtgcgtagacatagatgaatgtaccatccctccatattgccaccaaagatgcgtgaatacaccaggctcattttattgccagtgcagtcctgggtttcaattggcagcaaacaactatacctgcgtagatataaatgaatgtgatgccagcaatcaatgtgctcagcagtgctacaacattcttggttcattcatctgtcagtgcaatcaaggatatgagctaagcagtgacaggctcaactgtgaagacattgatgaatgcagaacctcaagctacctgtgtcaatatcaatgtgtcaatgaacctgggaaattctcatgtatgtgcccccagggataccaagtggtgagaagtagaacatgtcaagatataaatgagtgtgagaccacaaatgaatgccgggaggatgaaatgtgttggaattatcatggcggcttccgttgttatccacgaaatccttgtcaagatccctacattctaacaccagagaaccgatgtgtttgcccagtctcaaatgccatgtgccgagaactgccccagtcaatagtctacaaatacatgagcatccgatctgataggtctgtgccatcagacatcttccagatacaggccacaactatttatgccaacaccatcaatacttttcggattaaatctggaaatgaaaatggagagttctacctacgacaaacaagtcctgtaagtgcaatgcttgtgctcgtgaagtcattatcaggaccaagagaacatatcgtggacctggagatgctgacagtcagcagtatagggaccttccgcacaagctctgtgttaagattgacaataatagtggggccattttcattttagtcttttctaagagtcaaccacaggcatttaagtcagccaaagaatattgttaccttaaagcactattttatttatagatatatctagtgcatctacatctctatactgtacactcacccataattcaaacaattacaccatggtataaagtgggcatttaatatgtaaagattcaaagtttgtctttattactatatgtaaattagacattaatccactaaactggtcttcttcaagagagctaagtatacactatctggtgaaacttggattctttcctataaaagtgggaccaagcaatgatgatcttctgtggtgcttaaggaaacttactagagctccactaacagtctcataaggaggcagccatcataaccattgaatagcatgcaagggtaagaatgagtttttaactgctttgtaagaaaatggaaaaggtcaataaagatatatttctttagaaaatggggatctgccatatttgtgttggtttttattttcatatccagcctaaaggtggttgtttattatatagtaataaatcattgctgtacaatatgctggtttctgtagggtatttttaattttgtcagaaattttagattgtgaatattttgtaaaaaacagtaagcaaaattttccagaattcccaaaatgaaccagatatcccctagaaaattatactattgagaaatctatggggaggatatgagaaaataaattccttctaaaccacattggaactgacctgaagaagcaaactcggaaaatataataacatccctgaattcaggacttccacaagatgcagaacaaaatggataaaaggtatttcactggagaagttttaatttctaagtaaaatttaaatcctaacacttcactaatttataactaaaatttctcatcttcgtacttgatgctcacagaggaagaaaatgatgatggtttttattcctggcatccagagtgacagtgaacttaagcaaattaccctcctacccaattctatggaatattttatacgtctccttgtttaaaatgtcactgctttactttgatgtatcatatttttaaataaaaataaatattcctttagaagatcaaaaaaaaaaaaaaaaaaa

SEQ ID NO: 393 - DNA, 2753 bp, HOMO SAPIENS
gagcgaccgtcggggccggctggggccggagctcggggctcggtgggcctacagcggctccggacggacccccggggctggggagtcggggaggcctgccccggccccctgcccgcggccgccatggcggagaattggaagaactgcttcgaggaggagctcatctgccctatctgcctgcacgttttcgtggagccagtgcagctgccgtgcaaacacaacttctgccggggctgcatcggcgaggcgtgggccaaggacagcggcctcgtacgctgcccagagtgcaaccaggcctacaaccagaagccgggcctggagaagaacctgaagctcaccaacatcgtggagaagttcaatgccctgcacgtggagaagccgccggcggcgctgcactgcgtgttctgccgccgcggccccccgctgcccgcgcagaaggtctgcctgcgctgcgaggcgccctgctgccagtcccacgtgcagacgcacctgcagcagccctccaccgcccgcgggcacctcctggtggaggcggacgacgtgcgggcctggagctgcccgcagcacaacgcctaccgcctctaccactgcgaggccgagcaggtggccgtgtgccagtactgctgctactacagcggcgcgcatcagggacactcggtgtgcgacgtggagatccgaaggaatgaaatccggaagatgctcatgaagcagcaggaccggctggaggagcgagagcaggacattgaggaccagctgtacaaactcgagtcagacaagcgcctggtggaggagaaagtgaaccaactgaaggaggaagttcggctgcagtacgagaagctgcaccagctgctggacgaggacctgcggcagacagtggaggtcctagacaaggcccaggccaagttctgcagcgagaacgcagcgcaggcgctgcacctcggggagcgcatgcaggaggccaagaagctgctgggctccctgcagctgctctttgataagacggaggatgtcagcttcatgaagaacaccaagtctgtgaaaatcctgatggacaggacccagacctgcacgagcagcagcctttcccccactaagatcggccacctgaactccaagctcttcctgaacgaagtggccaagaaggagaagcagctgcggaaaatgctagaaggccccttcagcacgccggtgcccttcctgcagagtgtccccctgtacccttgcggcgtgagcagctctggggcggaaaagcgcaagcactcaacggccttcccagaggccagtttcctagagacgtcgtcgggccctgtgggcggccagtacggggcggcgggcacagccagcggtgagggccagtctgggcagcccctggggccctgcagctccacgcagcacttggtggccctgccgggcggcgcccaaccagtgcactcaagccccgtgttccccccatcgcagtatcccaatggctccgccgcccagcagcccatgctcccccagtatggcggccgcaagattctcgtctgttctgtggacaactgttactgttcttccgtggccaaccatggcggccaccagccctacccccgctccggccactttccctggacagtgccctcgcaggagtactcacacccgctcccgcccacaccctccgtcccccagtcccttcccagcctggcggtcagagactggcttgacgcctcccagcagcccggccaccaggatttctacagggtgtatgggcagccgtccaccaaacactacgtgacgagctaacgccacgcaggcggcggggcgctggggaatcttcctccccagcccccgggctcgggagttatgcatccagagacctgcccttctaccttcctcgcctcccctcttcctcattccattgccccaggtcttttccttttggattttgttttggttttggctttgtttttgatttttttttattatgaatctcctggacgcagaggtgacagtgggagctggcctgggccaggacggcaggtggccctggagatgggaaagtgtctgtgtcgaggcgctgagctctctctctgtttctccttttttcctctactccttccccttcacacccccgtggctggaaggaacctcggcttccctgaaagcttgggggtcccacccttcttaccccacccgggaggaacgcccagggccccgggcttgtttctcctcttgttttccttttgggcagtttgatcactgatcgagtaaggaatgacctttagattgtgcgacttttgtttttgtttttttaaatttttttaaaccaagaatgatttctcctgcttccttctcctcaccatcttcccagacggagttcaaaggccacttctcaagcagcttttggcaccttcagcctcagagtggaatcttttaaagacaggacccctatgtccaggaaaggggaaaaggaactttgccaatgatagtgaccacagcaaaagcaaataataataatattaataataataaagagaaataaaataataaaataaaaaacaatagcacagcccttgttgaggtcagcagggaggaggggctgcccggagttgggtccttgcctggattttgacacagcaacttcctgtagtgagcactttgtatgaatcgtggacttcctgttctcaaggcgcaggtatttattctgtatctgtctagagcacacaccaaaatccaaccttctaataaacatgatggcgcagtcccacaaaaaaaaa

SEQ ID NO: 394 - DNA, 269 bp, HOMO SAPIENS
  misc_feature (129)..(129): n is a, c, g, or t
gaaagccgccaaagactcttatccttattggtgccccatcattggccaccccagccataggtgtgtgctgttggtgggaaatggtctccttcctcagcgttgtgtttgggttactggtgaggccagctncacagagtgacatcatggtcaccagtacatgtcgctggagtaaaatcttgcctttagaaactaggttgagctgttcagaaaggtcaattctcttctgtattccccctcaacatttatctgggtctaaagctcagcactga

SEQ ID NO: 395 - DNA, 3403 bp, HOMO SAPIENS
gggtccggcccaggaggcttgggcgcgcgcagccatcccgggcctcgccggggacctagggacgcaggcaacgcctgcgcccgctcaccatggtcgagggacgcgtctccgagttcctgaagaaactcggcttctcgggcgggggccgccagtaccaggcgctggagaaggacgaagaggaagccttgattgatgaacagagtgagctgaaagccatcgagaaagagaagaaggtgacagccctgccccccaaggaagcgtgcaaatgccagaaagaggatttggccagagcgttttgtgtggacttacacactgggctgtcggagttctcggtgacgcagcgccggctggcccatggctggaatgagtttgttgctgacaacagcgaacctgtgtggaagaaatacctggatcagtttaagaaccccctgatcctgctgctgctgggctctgccctggtgagtgtcctcaccaaggagtatgaggacgccgtcagcatcgccacggcagtgcttgtcgtggtcactgtcgccttcatccaggagtacaggtcggagaaatctctggaagagctgaccaagatggttcctccagaatgtaactgcctaagagaaggaaaactccagcacctgcttgctcgagaactggttcctggtgatgtcgtatctctctcgatcggagaccggatccctgcagacatccgactcactgaggtcacggacctcttggtggatgaatccagtttcaccggggaagccgagccatgtagtaaaacagacagccccttgacaggcggtggggacctcaccaccctcagcaacatcgtcttcatggggaccctggtgcagtatgggaggggccagggggtcgtgattggaacaggggaaagctctcagttcggagaagtgtttaagatgatgcaggctgaagagacacctaaaactcctttgcagaaaagcatggacaggctaggaaagcaactgacactcttctcctttggcataatcggtctcatcatgctcattggctggtcgcaagggaaacaactcctgagtatgttcacgatcggggtcagcctggctgtggcggccattccagagggtctgcccatcgtcgtcatggtgacgctggtcctgggagtgctgcggatggccaagaagcgggtcatcgtgaagaagttacccatcgtggagactttaggttgctgcagcgttctctgttctgacaagacggggactctgactgccaatgaaatgacagtgacccagcttgtaacgtcagatgggcttcgtgccgaggtcagcggagttgggtatgacggtcaagggactgtgtgtcttctaccatccaaggaagtcattaaggaattttccaatgtctcagtgggaaagttagtggaggcgggctgtgttgccaacaatgcggtcatcagaaagaacgccgtgatggggcagcccaccgagggtgcattgatggccctggcgatgaagatggacttaagtgatattaaaaattcatatataagaaaaaaagagattccattcagttcagagcagaagtggatggcggtgaaatgcagtctgaagactgaggatcaggaagacatttacttcatgaaaggggccttggaagaggtgatccgctactgcaccatgtacaacaacgggggcatccccctgccgctgacgccccagcagaggtcattctgcctgcaggaagagaagaggatggggtcgctcggtttgcgggtgctggccctggcttctgggcccgagctggggcggctgacgtttctcggtcttgtgggcatcattgaccccccgagagttggcgtgaaggaagcagtccaggttctctccgagtctggtgtgtctgtgaagatgataacgggggatgccctggagacggccttggccataggaagaaacatcggcctgtgcaacgggaagctgcaagccatgtccggggaggaggtggacagcgtggagaagggcgagctggccgaccgcgtggggaaggtgtccgtgttcttcaggaccagcccaaagcacaagctcaaaatcatcaaggctctgcaggagtcaggggcgatcgtggccatgactggggatggggtgaacgacgcagtggccctgaagtctgcagacattgggatcgccatggggcagacagggacggacgtcagcaaagaggccgccaacatgatcctggtggatgatgacttctcagccatcatgaatgcagtggaggaaggcaagggtattttttacaacatcaaaaactttgtccgattccagctgagcacgagcatctccgccctgagtctcatcactctgtccaccgtgttcaacctgcccagccccctcaacgccatgcagatcctatggatcaacatcatcatggatgggccaccggcgcagagcttgggggtagagcccgttgacaaagacgccttcaggcagccaccacggagtgtgcgggacaccatcctcagcagagccctcatcctgaagatcctcatgtccgcggccatcatcatcagcgggaccctctttatcttctggaaggagatgcctgaagacagagcaagcactccccgcaccacgacgatgacgttcacttgttttgtgtttttcgatctcttcaacgccttgacctgccgctctcagaccaagctgatatttgagatcggctttctcaggaaccacatgttcctctactccgtcctggggtccatcctggggcagctggcggtcatttacatccccccgctgcagagggtcttccagacggagaacctgggagcgcttgatttgctgtttttaactggattggcctcatccgtcttcattttgtcagagctcctcaaactatgtgaaaaatactgttgcagccccaagagagtccagatgcaccctgaagatgtgtagtggaccgcactccgcggcaccttccctaatcatctcgatctggttgtgactgtggcccctgccgtgtctcctcgtcaggggagacttttaggaggccgcagccttccatcaccggatcagtttttcctcttaggaaagctgcaggaacctcgtgggctccagggacccaggcccacatccatccagcgttcccgctggctgtgggacagacagggaggggcctgtacagaaacaccacactgtttattaaatcacaatgatttttattaaccatgtctaactacgtatctgtgccacagcttgcagtgaggcaggccactcgtggcagatacaaggggctcctgagaggcagtgggtaggatggtcacactctgcccattgccctcctggaggccccatttcctcatcataaaatgagggacttttaaataaagtgctatgccgggggataattaaaaaaaaaaaaaaaaaaa

SEQ ID NO: 396 - DNA, 3089 bp, HOMO SAPIENS
atcgtccgagccccacctccctcctcttcgcccccgcacgccgaaaacaggggcctctcacgtgacccctgcgcgctcccgcgggggagcgtagtctcggaggcggcgccgcaggggattgaggggttgactgagcgttgcgagccttagctttctcccgaacgccagcgctgaggacacgatgtcgcggctctcccgctcactgctttgggccgccacctgcctgggcgtgctctgcgtgctgtccgcggacaagaacacgacccagcacccgaacgtgacgactttagcgcccatctccaacgtaacctcggcgccggtgacgtccctcccgctggtcaccactccggcaccagaaacctgtgaaggtcgaaacagctgcgtttcctgttttaatgttagcgttgttaatactacctgcttttggatagaatgtaaagatgagagctattgttcacataactcaacagttagtgattgtcaagtggggaacacgacagacttctgttccgctaaacccacagttcagccctccccttctacaacttccaagacagttactacatcaggtacaacaaataacactgtgactccaacctcacaacctgtgcgaaagtctacctttgatgcagccagtttcattggaggaattgtcctggtcttgggtgtgcaggctgtaattttctttctttataaattctgcaaatctaaagaacgaaattaccacactctgtaaacagacccattgaattaataaggactggtgattcatttgtgtaactcactgaagccaaaatactatcttttaagatgtcccacatggaagacgctattccaggatctttaaatttccatggatgcatataggatgtttgggagcatcatccgtgaagaaaaaatcaattaaatcattgtgttcaacaggaatatttaaaatattctgcatgaatcctgtggctgtcttattttaaatagctgctgctgtgggattatattttttttccttaacatgccaaatataactttctgaaagtgatggaaaatgttgtcttgtgcagacaacatcatggctcttggcagtttaaatttagtaattttaatttagtgaacagaattgagaagaacgtgccaaatgagaatcaattaggtggatttttggctgtcatttcaaaagtggaataaatttattaatttagtagtactaaatggtatccttagattaaaattttgtgcttgataacagctgttttttctacattagaaataagatgccacacaaggaactacattccagatttaaagaaatgaaaggataccattagtgtgtataacagattattgttcatacttgtaaagcatcttatgtcattgagaatataaagaacagtgccttagaagacagtgaaaggtaagctctagcttaatgtctatgatttgttctttgacattaaggaaggtaaggattggtcagaggatgtaacttgatgtgagcagtagtaaacctgttttagatatcatactgttaatattttattgaaaatttatttcagagcggagaaacttaagctaaagtctgttatacagaattgaaagccttcgtatcttgaacctcccaacatttttcttatggctgttgaaaagtatagagctaaattgatttaattacactttcctttgtactttaaaaaaaagtatgctagcactattgtaccttgaaaggatttccaccagactgtcttgagtagtgacttctttggtgaggcaagaaggatatacattattttagaatcatttactatttaaatgagacaatcatattattttagaatcatttattttaaatgagacaatcattttaagttttaagataacagaagtgaccaatgtaatttcacaacacctaaggattttttggttgatcaggttactgtagatttttactgattgtcctggatgaatagactgtgctttttctttttctctcccttccttcttggtttcccatagtataataagcatgcatactttaacttctatagttttctcctttagagggtcgtcttcagttttagaggtttacttctcccttgcctttgactcattggactagtgcagaggctttaagtagtttaaaatgggcttttgcttttctaggtcattaacgttttttatttagtttctttagccaatagtggctgagtttcgcacttgattttcaatattttatagtaagaaatgacaaactgctttgtttcatttcataaacaaactctgcatttagataactattaaaggttgttaagatgaagatttactgtttctttgttactcgttggtacagctgtttgttttacttgcacatttgtacatatacttaatgttttcaagtgccttaattgtttaaaatctctggcttcaaagtttcttggggaaaggtcggtttacctcacattttttgtttccattagtaatattctaggtacctcacaaaatgtattatggtgccatggctgttagtttttagtgagtgctgtaggattaattcgaaaataggcagaattccattcctcccaaggtggcaaaaattagctatactgatgtaattgtcatttacctgggtatgaattccctgacacacattcatgtcaacatatgtagcaaattttgtgaaaacataacaatttgaagcttctgtaattttgagcactgctctaacaacaagcataatataaaattagttagattttgcaagtctacaaatgagctcttgcaacagaactcacagcctttttacttttttcccctaactttagcaatgtagtatcttgagccattaatttttgggtttttttaaaatccagaaggtatatagaaaccttttcagatttttcatctgatttgttcttgcagatgttcttctatcaaataccttattttaccttacagatatttgttgcacaggcagatactgctgtatttagacatttctatttcagttcattaaaaactgcaaaaccaatctgtatcatgtaccaaactgacttaaaataaatctacatgtttattgaattaaaaaaaaaaaaaaaaaa

SEQ ID NO: 397 - DNA, 3089 bp, HOMO SAPIENS
acccgtagggagaggcgggttgcgggcggcggcggcggcggcggcggcggtggtggttgtggcgaggctgtgcggcagggcgcacgggacctgtgctgcagcggctctctcaggccgtgggtcgtcgctgcagctgccgggaaagaaggaaacgacgactccgggggcgaacttggcacacagggaggaagggaaaggatgcatggtcatggaggctatgattctgattttagtgatgatgaacgctgtggagaatccagcaaaaggaaaaaaaggacagttgaagatgacttactgctccaaaaaccatttcagaaagaaaaacatggaaaggtggcccataaacaagttgcagcagaattgctggatagggaagaagcaagaaatagaaggtttcatctcatagctatggatgcttatcaaagacatacaaagttcgtaaatgactatattttatactatggtggcaaaaaagaagacttcaagcgtttgggggaaaatgacaagacagacttggatgttatacgagaaaatcatagattcctatggaatgaggaggacgaaatggacatgacttgggagaagagacttgctaagaaatactatgataaattatttaaggaatactgcatagcagatctcagtaaatataaagaaaataagtttggatttaggtggcgagtagaaaaagaagtaatttcaggaaaaggtcaatttttctgtggaaataaatattgtgataaaaaagaaggcttaaagagttgggaagttaattttggttatattgagcatggtgagaagagaaatgcacttgttaaattaaggttatgccaagaatgttccattaaattaaatttccatcacaggagaaaagaaatcaagtcaaaaaaaagaaaagataaaaccaaaaaagactgtgaagagtcatcacataaaaaatccagattatcttctgcagaagaggcctccaagaaaaaagataaaggacattcatcttcaaagaaatctgaagattctctacttagaaactctgatgaggaagaaagtgcttcagaatctgaactttggaagggtccactaccagagacagatgaaaaatcacaggaagaagaatttgatgagtattttcaggatttgtttctatgagacgagagagagaagcctccgctccttaatgtgaaacttcatgaagttttaaacttcatgcaatttgaaattccatataagtttttatctgcaagttacagcttgtgtggtttgtctttggaaataaaaatccaggttctctcagaatgtcagaggctttggaagttcattagttcaattaaagactttcctgtcctttaaatatcttttcaattgcttatctacaattctgttttatttgtagctcctagaggatagagctggacagattccattgttcctacattttgtaggttttttttcactgccttcattatgtatcttctcttgccttcattattttattttattatttcttctttttctcttttttagagccaccaatactggatttgtttgtttttcatttttttcttttgtggaaacggagtcctcctgtgttgcccaggctggtattcaaactcctggccttatgcattcctcccaccctggcctcccagagtgctgggattacaggtgtgagccaccatgctctgccaattattttaaattactaggattaaagtatattatgtatgtctttaacttctttctttcccattgataaactggcacccttcttttaagtacctgctctcccattaccacctatttccagctgctttttgaggttttttgcttgcctgtctcttgcttccttcttaacctctaccacttaagagagtttgttataatcaaatttgacttcctagcctgtggataatttactattaagtaaattattaccacagggagccagtgaggtcccagtagtctaaaacagttcatgtgttcacaaaaattgcctccccggcagagattatgcagtaagataatttaactgaataatactatgtgcatgtatcttgcctcagatatactcatgcaaatatgaatatacctctgatatggtttggctctgtgtccccacccaaatctcatcttgaatgtgtactcccataattcccacattttataggagggatccagtgagagataatttgaatcaagggggcggtttcccccatattgttcttgtggtagtgaataagtctcacaagatctgatggttttatcaggggcttctgcttttgcatccttctcattttcttttgctgctgccatgtaagaagtgccttttgcctcccaccatgattctgaggctttcccagccatgtggaactgtaagtccaattaaacctctttttcttccccagtctctggtatgtctttatcagcagtgtgaaaatggactaatagaacttctatgcagaaatataaaatgtaacttcttaacataaggtcctagtcgcaagggtctatggaggtgcttcaggagatccaagcctttttagaatctgtgcaaacttctgtgtatgttttttggaggaaaagtccataaatttcaaattttcaaaaatcagattttcaaaaggatttattgatttctgaaaactagcaaagatctgcttttataaagagcaaatagatggatagatataggagaagatgcttgacttgatgaataagagaaaggacatatagaaaatgaactgaacataagcaagtattttattgaagatatactattttaaataacatttaaacacggaatgattggcaataaactgcaaaatgagtaatttggtatcattttaaaatggttattatcagagattttccttttattaaacagttattcattaattccacaaatatttatcaggcttctattatatgtgaggcactgagctgggcatggctgtaaaggaaccatctaggaagtaattatgcaatcatttctgaacctgtttcagaaaagtaaatcagtgttgggtttatcagtgtttaacattgtttgatagtcccctcacttcttgaataaattgttttttttcacctca

SEQ ID NO: 398 - DNA, 11957 bp, HOMO SAPIENS; identical to SEQ ID NO: 146

SEQ ID NO: 399 - DNA, 543 bp, HOMO SAPIENS
  misc_feature (49)..(49): n is a, c, g, or t
  misc_feature (56)..(56): n is a, c, g, or t
  misc_feature (137)..(137): n is a, c, g, or t
  misc_feature (214)..(214): n is a, c, g, or t
  misc_feature (218)..(218): n is a, c, g, or t
  misc_feature (508)..(508): n is a, c, g, or t
  misc_feature (515)..(515): n is a, c, g, or t
gggcaaagtaccaagctacctaaagtttgtattgattctctcaagactnttgctancaaaatggtaaaatgggtcaagtttgtgtttggaacccctagcctctcatctcttcaccctcttccctgaagaggtggagngaataatacaggtaccacctgtaagtaaaaagtgtggcagaaacagtcagttgcatctctcaccaacaggtgggtcngggnggggagggagaggagattcctggagaggaacggatcaagctaggaagcacagaactgcaggccagagacaactctggaagcagaaacaggtgtgtgcttccaggcgcacagacaccaactgtgtgacacccacaccttctactcacaaactcactattgacagtgcaccaccacctgctttgtgcaacacaggaaacaccaataaacactggagacagtgtcaggccaggcatggtggctcacacctgtgctcccagcactttgggaggctgaggtaggaggatcgcttnaggccanaagttcaagaccatcctcagcaatacag

SEQ ID NO: 400 - DNA, 284 bp, HOMO SAPIENS
aacaagtgatgctgaaatatctttttcttttttaacctttattttagaattggggtacatgtgcaggtttgttacataggtacagtgtgggctgctgaggtttgggagtacgaatgaattagtcaccccagtggtgagcatagtgcccgataagtggttttttcaacccttactcccatccctctccattcttgtgttccccagtgtctgctgttcccatttttatgaccatgtgtactcaatgtttagctcccacttagaagtaagaacatgcccagcacttt

SEQ ID NO: 401 - DNA, 410 bp, HOMO SAPIENS
  misc_feature (204)..(208): n is a, c, g, or t
  misc_feature (210)..(216): n is a, c, g, or t
  misc_feature (218)..(222): n is a, c, g, or t
  misc_feature (247)..(247): n is a, c, g, or t
  misc_feature (264)..(264): n is a, c, g, or t
agggaaacaagccacatctctgccctcagcctgggaccctgcttcctgatgatacctgcccatccctgttttttctccataaacttgctgggaaaggtgccctggttctgtttctctagaggctgtggtgccagactggaaactaccagtttcctgggcatgtgccttggtgtcaccgaacagccagatgagacttgtcaccannnnntnnnnnnntnnnnncctttattaaacacactcatattgnccagtactggggatatncccctgagcaaggtgtaggagagcaaaagtagacaaccagataggaagaaaactgaagtggaataaatagatgccaggcacatgaatggtgctttttttcatcaaccttgtgacgttggaattatctcccattactcaagaagctc

SEQ ID NO: 402 - DNA, 6822 bp, HOMO SAPIENS
gcagcagccgccagttccatgcactggcggagcagctctaggcggcggcttctactttcagtttcgtgcagagcgcggaggagccgcgagcgctgagggagtctgcactatggaaacaacctgtcaatccagctcaaggcacacatagcccagacacccatgagaccctctccgtggggaccctagagcacctatcatgaacgaggagaccaaggctggctcctcatggaccccgttggcctccagctcggcaacaagaacctgtggagctgtcttgtgaggctgctcaccaaagacccagaatggctgaacgccaagatgaagttcttcctccccaacacggacctggattccaggaacgagaccttggaccctgaacagagagtcatcctgcaactcaacaagctgcatgtccagggttcggacacctggcagtctttcattcattgtgtgtgcatgcagctggaggtgcctctggacctggaggtgctgctgctgagtacttttggctatgatgatgggttcaccagccagctgggagctgaggggaaaagccaacctgaatctcagctccaccatggcctgaagcgcccacatcagagctgtgggtcctcaccccgccggaagcagtgcaagaagcagcagctagagttggccaagaagtacctgcagctcctgcggacctctgcccagcagcgctacaggagccaaatccctgggtcagggcagccccacgccttccaccaggtctatgtccctccaatcctgcgccgggccacagcatccttagacactccggagggggccattatgggggacgtcaaggtggaagatggtgctgacgtgagcatctcggacctcttcaacaccagggttaacaagggcccgagggtgaccgtgcttttggggaaggctggcatgggcaagaccacgctggcccaccggctctgccagaagtgggcagagggccatctgaactgtttccaggccctgttcctttttgaattccgccagctcaacttgatcacgaggttcctgacaccgtccgagctcctttttgatctgtacctgagccctgaatcggaccacgacactgtcttccagtacctggagaagaacgctgaccaagtcctgctgatctttgatgggctagatgaggccctccagcctatgggtcctgatggcccaggcccagtcctcacccttttctcccatctctgcaatgggaccctcctgcctggctgccgggtgatggctacctcccgtccagggaagctgcctgcctgcctgcctgcagaggcagccatggtccacatgttgggctttgatgggccacgggtggaagaatatgtgaatcacttcttcagcgcccagccatcgcgggagggggccctggtggagttacagacaaatggacgtctccgaagcctgtgtgcggtgcccgcactgtgccaagtcgcctgtctctgcctccaccatctgcttcctgaccacgccccaggccagtctgtggccctcctgcccaacatgactcagctctatatgcagatggtgctcgccctcagcccccctgggcacttgcccacctcgtccctactggacctgggggaggtggccctgaggggcctggagacagggaaggttatcttctatgcaaaagatattgctccacccttgatagcttttggggccactcacagcctgctgacttccttctgcgtctgcacaggccctgggcaccagcagacaggctatgctttcacccacctcagcctgcaggagtttcttgctgccctgcacctgatggccagccccaaggtgaacaaagacacacttacccagtatgttaccctccattcccgctgggtacagcggaccaaagctagactgggcctctcagaccacctccccaccttcctggcgggcctggcatcctgcacctgccgccccttccttagccacctggcgcagggcaatgaggactgtgtgggtgccaagcaggctgctgtagtgcaggtgttgaagaagttggccacccgcaagctcacagggccaaaggttgtagagctgtgtcactgtgtggatgagacacaggagcctgagctggccagtctcaccgcacaaagcctcccctatcaactgcccttccacaatttcccactgacctgcaccgacctggccaccctgaccaacatcctagagcacagggaggcccccatccacctggattttgatggctgtcccctggagccccactgccctgaggctctggtaggctgtgggcagatagagaatctcagctttaagagcaggaagtgtggggatgcctttgcagaagccctctccaggagcttgccgacaatggggaggctgcagatgctggggttagcaggaagtaaaatcactgcccgaggcatcagccacctggtgaaagctttgcctctctgtccacagctgaaagaagtcagttttcgggacaaccagctcagtgaccaggtggtgctgaacattgtggaggttctccctcacctaccacggctccggaagcttgacctgagcagcaacagcatctgcgtgtcaaccctactctgcttggcaagggtggcagtcacgtgtcctaccgtcaggatgcttcaggccagggaggcggacctcatcttccttctttccccgcccacagagacaactgcagagctacaaagagctccagacctgcaggaaagtgacggccagaggaaaggggctcagagcagaagcttgacgctcaggctgcagaagtgtcagctccaggtccacgatgcggaggccctcatagccctgctccaggaaggccctcacctggaggaagtggacctctcagggaaccagctggaagatgaaggctgtcggctgatggcagaggctgcatcccagctgcacatcgccaggaagctggacctcagtgacaacgggctttctgtggccggggtgcattgtgtgctgagggccgtgagtgcgtgctggaccctggcagagctgcacatcagcctgcagcacaaaactgtgatcttcatgtttgcccaggagccagaggagcagaaggggccccaggagagggctgcatttcttgacagcctcatgctccagatgccctctgagctgcctctgagctcccgaaggatgaggctgacacattgtggcctccaagaaaagcacctagagcagctctgcaaggctctgggaggaagctgccacctcggtcacctccacctcgacttctcaggcaatgctctgggggatgaaggtgcagcccggctggctcagctgctcccagggctgggagctctgcagtccttgaacctcagtgagaacggtttgtccctggatgccgtgttgggtttggttcggtgcttctccactctgcagtggctcttccgcttggacatcagctttgaaagccaacacatcctcctgagaggggacaagacaagcagggatatgtgggccactggatctttgccagacttcccagctgcagccaagttcttagggttccgtcagcgctgcatccccaggagcctctgcctcagtgagtgtcctctggagcccccaagcctcacccgcctctgtgccactctgaaggactgcccgggacccctggaactgcaattgtcctgtgagttcctgagtgaccagagcctggagactctactggactgcttacctcaactccctcagctgagcctgctgcagctgagccagacgggactgtccccgaaaagccccttcctgctggccaacaccttaagcctgtgtccacgggttaaaaaggtggatctcaggtccctgcaccatgcaactttgcacttcagatccaacgaggaggaggaaggcgtgtgctgtggcaggttcacaggctgcagcctcagccaggagcacgtagagtcactctgctggttgctgagcaagtgtaaagacctcagccaggtggatctctcagcaaacctgctgggcgacagcggactcagatgccttctggaatgtctgccgcaggtgcccatctccggtttgcttgatctgagtcacaacagcatttctcaggaaagtgccctgtacctgctggagacactgccctcctgcccacgtgtccgggaggcctcagtgaacctgggctctgagcagagcttccggattcacttctccagagaggaccaggctgggaagacactcaggctaagtgagtgcagcttccggccagagcacgtgtccaggctggccaccggcttgagcaagtccctgcagctgacggagctcacgctgacccagtgctgcctgggccagaagcagctggccatcctcctgagcttggtggggcgacccgcagggctgttcagcctcagggtgcaggagccgtgggcggacagagccagggttctctccctgttagaagtctgcgcccaggcctcaggcagtgtcactgaaatcagcatctccgagacccagcagcagctctgtgtccagctggaatttcctcgccaggaagagaatccagaagctgtggcactcaggttggctcactgtgaccttggagcccaccacagccttcttgtcgggcagctgatggagacatgtgccaggctgcagcagctcagcttgtctcaggttaacctctgtgaggacgatgatgccagttccctgctgctgcagagcctcctgctgtccctctctgagctgaagacatttcggctgacctccagctgtgtgagcaccgagggcctcgcccacctggcatctggtctgggccactgccaccacttggaggagctggacttgtctaacaatcaatttgatgaggagggcaccaaggcgctgatgagggcccttgaggggaaatggatgctaaagaggctggacctcagtcaccttctgctgaacagctccaccttggccttgcttactcacagactaagccagatgacctgcctgcagagcctcagactgaacaggaacagtatcggtgatgtcggttgctgccacctttctgaggctctcagggctgccaccagcctagaggagctggacttgagccacaaccagattggagacgctggtgtccagcacttagctaccatcctgcctgggctgccagagctcaggaagatagacctctcagggaatagcatcagctcagccgggggagtgcagttggcagagtctctcgttctttgcaggcgcctggaggagttgatgcttggctgcaatgccctgggggatcccacagccctggggctggctcaggagctgccccagcacctgagggtcctacacctaccattcagccatctgggcccaggtggggccctgagcctggcccaggccctggatggatccccccatttggaagagatcagcttggcggaaaacaacctggctggaggggtcctgcgtttctgtatggagctcccgctgctcagacagatagacctggtttcctgtaagattgacaaccagactgccaagctcctcacctccagcttcacgagctgccctgccctggaagtaatcttgctgtcctggaatctcctcggggatgaggcagctgccgagctggcccaggtgctgccgcagatgggccggctgaagagagtggacctggagaagaatcagatcacagctttgggggcctggctcctggctgaaggactggcccaggggtctagcatccaagtcatccgcctctggaataaccccattccctgcgacatggcccagcacctgaagagccaggagcccaggctggactttgccttctttgacaaccagccccaggccccttggggtacttgatggccccctcaagacctttggaatccagccaagtgatgcacccaaatgatccacctttcgcccactgggataattgactcaggaaagaagagcctcggcagggcgctctgcactccacccaggaggaaggatacgtgtgtcctgctgcagtcctcagggagaacttttttgggaaccaggagctgggtctggacaaaggagtaccctgcattacgtgggatatgtgtgatcaattggggacatgcgacacacaatgagggtgtcatgacaatgcatgacacgtacggttatatgtggcagtgtgaccccttgacatgtggcgttacatgaaagtcagtgtggcacgtgttctgtggcatgggtgctggcatcccaagtagcaggatacatgattgttggtctatatatgacacatgacaaatgtccatgtcacaggactcatggctggccagatgacctcaggctggcccaagatctaatttattaatttttaaagcaaatacatatttatagattgtgtgtatggagcagctaagtcaggaaaagtcttccgcccgagctgggaggggagagtgtccatgcactgaccagtccaggggctcaagggccagggctctggaacaagccagggactcagccattaagtcccctcctgcctcaatcctcagcctacccatctataaacttgatgactcctcccttacttacatactagcttccaaggacaggtggaggtagggccagcctggcgggagtggagaagcccagtctgtcctatgtaagggacaaagccaggtctaatggtactgggtagggggcactgccaagacaataagctaggctactgggtccagctactactttggtgggattcaggtgagtctccatgcacttcacatgttacccagtgttcttgttacttccaaggagaaccaagaatggctctgtcacactcgaagccaggcttgatcaataaacacaatggtattccacgtc

SEQ ID NO: 403 - DNA, 2056 bp, HOMO SAPIENS
accgtattgttccgcgctcggccggggagggcgcggggcgctcggcttcccgtgttcctctccccgccccagccccgtgggcgcgagaggaggcggggggctccttgtgcaccagagacgcagctgccttgttcgcccggtggggtgtggatcctccgagcggtgctgggaagggggttctctctgcccgcgcgcccaggactctacccagggcggaggtcccgagtgggccgccccccgcagcgccctgggttcgcgggcccagaggctggaggcagcggggagctagggtccttcaccctcccctcgccgcgtgcctccgcaggagtcgggctccccgttccccgcgatggccgcgggccgcagtcgtacggagccgccgcgcggaccccggggcgcccctccctagcggggcgcagctccttcttgttccccgccctgccagcgggatggggggcggcgggtcggccctgagggtctgcgccgaccaccgcgggggcatcaactggctgagcctgagccccgacgggcagcgcctgctgacgggcagcgaggacggcacggcccggctctggagcaccgcggacggccagtgctgcgcgctcctgcaaggacatgaaagctatgtgaccttctgccagctggaggatgaggctgccttcacatgcagcgccgactgcaccatcaggaggtgggacgtgctgaccgggcagtgtctgcaggtgtaccgaggacacacgtccatcgtgaacaggatcctggttgccaacaaccagctcttcagcagctcctatgaccggacagctcgggtctggagtgtggacaaggggcagatgtcccgggagttccggggccaccgcaactgcgtgctgaccctagcctactctgccccgtgggacctccccagcactccctgcgcggaggaggccgcggccggggggcttctggtgaccggcagcacagatggcacagccaaggtgtggcaggtggccagcggctgctgccaccagacgctgcggggccacacgggtgcagtgctgtgcctagtgctagacacgcccggccacacggccttcacaggcagcaccgacgccaccatccgtgcctgggacatcctgagtggggagcagctgcgggtgttccgggagcaccggggctccgtcatctgtctggagctggtgaaccgactcgtgtactctggcagcgcggacaggaccgtcaagtgctggctggcagacacaggggagtgtgtgcgcacgttcacggcccacagacgcaacgtgagcgccctcaagtaccacgcgggcaccttgttcacgggcagcggggacgcttgcgcccgggccttcgacgcgcagtctggagagctgcggagggtgttccggggccacacattcatcatcaactgcatccaggtgcacggccaggtgctctacaccgcctcgcacgacggcgccctgcgcctctgggacgtgcgcgggctccgaggtgccccgcggccccctccgcccatgcgcagcctctcgcggctcttcagcaacaaggtgggctgcgccgccgcgcccctgcagccggcctgatcccgcggggcccctgcagacgccagcccagacacccagcggctcccagagcgccccgccctgctacccgcggtggtggcgcccgatggccggcgaggggcgaggagcgaggaagcccgggcgggaggagagcccgtcgcaggcgtctggtttttctttggtggccaggaggcgctgggagcgggagtgctcgccctggggaccgcccccttttcccttttagggtggctcctgtcctccctccccatccctgacctggcgaaaggcctagtcctggggaccctcccacctcaggggctgcaggcggactgccccagctcccccagccccacgaaactgggcctttcctgctgagaggaagtgactttttacagaagccactgaacctggttattttggcaaatcgtccgtctcgagggccttggggggaactgaaatatacagcctgaacgttaaaagtgaaaaaaaaaaaaaaa

SEQ ID NO: 404 - DNA, 2636 bp, HOMO SAPIENS
cacccactagaaagccacccgggttctccttcatccccaacgctcctcacctagcccctgtcctgagggtgcccctaaccctggagccagctttaaaggggcaggccccttctcctgccccagccccagccccacccaccgggcccacattctccgtcttccaggtccagcgctccctcacagaactcccccgcaccttgtctcgctcgctccgcccctccttcccagccacagctagaggtcccgggcgcacctgcagagccggaggcttgctggggcatgcgctccatgaaggctctgcagaaggccctgagccgggctggcagtcactgcgggcgaggaggctggggtcacccgagccggagccccctccttggcgggggcgtccggcaccacctcagtgaggccgcggcgcagggcagagagacgccacacagccaccagccgcagcaccaggatcatgattcatcagaaagtggcatgctgtcccgcctgggtgatttgctcttttacactattgctgaaggacaggaacgaatccctatccacaagttcaccactgcactaaaggccactggactgcagacatcagatcctcggctccgagactgcatgagcgagatgcaccgcgtggtccaagagtccagtagtggtggcctcttggaccgagatctcttccgaaagtgtgtgagcagcaacattgtgctcctgacccaggcattccgaaagaagtttgtcattcctgattttgaggagttcacgggccatgtggatcgcatctttgaggatgtcaaagagctcactggaggcaaagtggcagcctacatccctcagctggccaagtcaaacccagacctgtggggtgtctccctgtgcactgtggatggtcaacggcactctgtgggccacacaaagatccccttctgcctgcagtcctgtgtgaagcccctcacctatgccatctccataagcaccctaggcactgactacgtgcacaagtttgtgggcaaagagccaagtggcctgcgctacaacaagctctccctcaatgaggaaggaatcccccataaccccatggtcaatgctggtgccattgttgtcagctccctgatcaagatggactgtaacaaagcagagaagtttgattttgtgttgcagtatctcaacaaaatggctgggaatgaatacatgggtttcagcaatgccacattccagtcagagaaggaaacaggggatcggaattatgccatcggctattatctcaaggaaaagaagtgctttcctaagggggtggacatgatggctgcccttgatctctacttccagctgtgttctgtggaggtcacttgtgaatcaggcagtgtcatggcagccaccctcgccaacggtgggatctgccccatcacaggcgagagtgtgctgagtgctgaagcagtgcgcaacaccctcagcctcatgcattcctgcggcatgtatgacttctctggccagtttgccttccacgtgggcctgccagccaagtcagctgtatcaggagccatcctcctggtggtacccaatgtcatgggaatgatgtgcctgtcacccccattggacaagctggggaacagccatagggggaccagcttctgccagaagttggtgtctctcttcaatttccacaactatgacaacctgaggcactgtgctcggaagttagacccacggcgtgaaggggcagaaattcggaacaagactgtggtcaacctgttatttgctgcctatagtggcgatgtctcagctcttcgaaggtttgccttgtcagccatggatatggaacagaaagactatgactcgcgcacagctctgcatgttgctgcagctgaaggacacatcgaagttgttaaattcctgatcgaggcttgcaaagtgaatccttttgccaaggacaggtggggcaacattcccctggatgatgctgtgcagttcaaccatctggaggtggtcaaactgcttcaagattaccaggactcctacacactctctgaaactcaggctgaggcagcagctgaggccctgtccaaagagaacttagaaagcatggtatgagcacaggtcatggacagcccctgctcaagaaaaagcatgagctggccacacatgtaatccataaccaccaaaaatactatggagagctacactgcttcagtggggaccaagcagtcatttggtgacttaggctagtgctttctatgggagtcaaaataccccattccctcagcagacagagtacagagaagggcctcagaggacacctgcagtacagctatccagagagactgggcttcaaggtacagcctaatggcttgccccactcaaaaccatcccagctcttcacccaggtctcctcttcctctccctgaagaaaccatcatgagagagatactctggtggagggactctagctaccatgcacatgtacatatccacagaatatgggaagtgggaatggctatatacatggctttagtagtctggagaaatctactccccttggccaggacatgctgctgctactgctaacagccaattttatagacagagaaagtattttgtgttcaaataaactttaattaccaaatcaaaaaaaaaaaaaa

SEQ ID NO: 405 - DNA, 336 bp, HOMO SAPIENS
  misc_feature (273)..(273): n is a, c, g, or t
gtagatgaagtcctgcattttaattgggattgattcacttagaactaaggatcaaagtttaaacttattgcagcgttaggggccatctttgttgctagttgaacaagtcttggtcgtttttaacatggctccttagggtattttctgaagttctgtctacttcattggaaagtgtttgcactacgcaggagtgacagcaatatgaaatgctttgtattcaaggcagcagaggtaatctggacagacagtacatgtgctttaaaagcaagatanagtcatagaaaatatgtagataatttagccgggcatggtggctcgcgcctctaatttgggagg

SEQ ID NO: 406 - DNA, 1114 bp, HOMO SAPIENS
gggagctggagccgagcgccgccgccgaagcttccgtctcgctcgctcgcgcagcggcggcagcagaggtcgcgcacagatgcgggttagactggcggggggaggaggcggaggagggaaggaagctgcatgcatgagacccacagactcttgcaagctggatgccctctgtggatgaaagatgtatcatggaatgaacccgagcaatggagatggatttctagagcagcagcagcagcagcagcaacctcagtccccccagagactcttggccgtgatcctgtggtttcagctggcgctgtgcttcggccctgcacagctcacgggcgggttcgatgaccttcaagtgtgtgctgaccccggcattcccgagaatggcttcaggacccccagcggaggggttttctttgaaggctctgtagcccgatttcactgccaagacggattcaagctgaagggcgctacaaagagactgtgtttgaagcattttaatggaaccctaggctggatcccaagtgataattccatctgtgtgcaagaagattgccgtatccctcaaatcgaagatgctgagattcataacaagacatatagacatggagagaagctaatcatcacttgtcatgaaggattcaagatccggtaccccgacctacacaatatggtttcattatgtcgcgatgatggaacgtggaataatctgcccatctgtcaaggctgcctgagacctctagcctcttctaatggctatgtaaacatctctgagctccagacctccttcccggtggggactgtgatctcctatcgctgctttcccggatttaaacttgatgggtctgcgtatcttgagtgcttacaaaaccttatctggtcgtccagcccaccccggtgccttgctctggaaggaggaagacctgaacatcttttccctgtcctttatttcccacacatcaggttggcagctgctgtgctttatttttgccctgtgttaaagtcctctcccaccccagcacctacctgttcctcaactagcaccaccacatctctgttctaaatgttgttctcctgcaataaaggacgtttgaattaaacattcaaaaaaaaaaaaaaaaaa

SEQ ID NO: 407 - DNA, 306 bp, HOMO SAPIENS
  misc_feature (257)..(257): n is a, c, g, or t
ctctgttctctacaaatcatttgggtctacatccagcttctcccagcatttactcaatatgaaacttccagttatagattaatttgaattctttgcactaattgtttaaaagaccataggaacctcagaccatccctcttcatggtctcaagagctcccagaatcatcctcttggtaagctaagtagttattagtaaggcccagggacaggactgagaagtaacatcttctattttttatttcagttttcctttaanttggaagcaaacaaacaaaaaacccttcagcttagggttttttcaattg

SEQ ID NO: 408 - DNA, 1844 bp, HOMO SAPIENS
gtcacccggcccggaaccacgtgatgcaggaggtgcccgaggcggcggggctcgcgcgggtggagccgcctcggcgttcgagcggggtgggggctgcccggttgagatttcccggcgggtcccggcctctgcgtgcacgcgcctgcgtgctcgcgctcgcggttctggcgctgccggaaaggaataatgctgacagcatgtctgcacattccatgctctgtgaacgaatcgccatagccaaggaactgatcaagagagcagaatcactttctagatcaagaaaaggtggcatagaaggtggtgcaaagctgtgcagcaaattgaaggcagaattaaaattcttgcagaaagtagaagctgggaaagtagctattaaagagtctcatttacagagcactaacctaacacacctgagagccattgtggaatcagcagaaaacctggaagaagttgttagtgttcttcatgtctttggttatacagataccttaggagaaaagcaaacccttgtggtagatgtagttgcaaatggtggtcatacttgggtgaaagccattggccggaaggctgaagctcttcataacatctggctgggcaggggccaatatggtgacaaaagcatcattgagcaggctgaagacttcctccaggccagtcaccagcagccagtgcagtatagcaaccctcacatcatctttgcattttacaacagtgtctccagccccatggcagagaagctgaaagaaatgggcatatctgtgagaggagacatagtagcagtcaacgctctgttagatcaccctgaagagcttcaaccaagtgagagtgaatcagatgatgagggccctgaacttttgcaggtgaccagagttgaccgagaaaatatactagcaagtgttgcgtttccaacagaaattaaggtcgatgtgtgcaaaagagtaaatctggacattactactttaatcacatatgtatctgccctcagctatggaggctgccactttattttcaaagagaaagtgctcacagaacaagcagagcaagagaggaaagagcaggttctacctcagctggaggcctttatgaaggacaaggagttgtttgcttgtgaatctgctgtcaaggactttcagtctattttagataccttaggaggacctggggagagagagagggccactgtgttaattaagcgaattaatgtggtaccagaccagccttctgagcgtgccttgagactagtggccagttcaaaaattaatagccgctcattaacaatttttgggacgggagacaccctaaaagccatcacaatgactgctaatagtggttttgtcagagctgcaaacaaccagggtgttaaatttagtgtgtttatccatcagcccagagcacttactgagagtaaagaggctctagccacccccttaccaaaagactacacaactgacagtgaacactaaagataccctttaaatatttttgtggaagtaagttatttataccaaaggctgggtcttcccatctaaactggtgggaaaaaaggtctatagtaaaagtaaaactgagaactcttaaaccagtagagtttctttgtctctcatctaaagtatataacctcccaaagtagaaaaagcacaagagagaagcttatctatcaaactgtctgcattagtgcaattaagaaccgaaatacgtctatataaagctttcagctgtattgtaatactttgattcgatagggctacaactcccctactgctaaccacatttcatggaatatggctacattgcatcttgcattaaatatctggagaaaattcaaaaaaaaaaaaaaaaaaaaa

SEQ ID NO: 409 - DNA, 269 bp, HOMO SAPIENS
tctattcattccaggtctctacaataataacttaactctttcaattaattgcccatcagaaaatcgttgaatccatctgtgacctggacaccttccacctgcatccatggagttgtgtcacctttctggaccaaaccactggacaccttacatgtatcgattggcaacatgtacacctccacacactgctaaatgacaaagccgaattttgaaatacgatactgtgaggtgtttggagaagagaactgaaatgacgtcatggaggtggc

SEQ ID NO: 410 - DNA, 341 bp, HOMO SAPIENS
  misc_feature (70)..(70): n is a, c, g, or t
cacacaccatagtacacacgaaaatgtgcagatctgtaacatttttttcacagctgataaaaaaaaaaantactaccattctcccccagactcccctttgatacagtaggtaaacaaaatagattttttttccacaaatatcagcagacactttctggcaccccacactgtattggcatcagtgttaacagtcccagttcagatgtgcaatacttcagattggatacactgtaacaagaatccaactttgcatagacatcctcagaatcgcaatcagtcatggggttgcccttccaagctggcagaaaaggaacccgatcttaatttccagctactcctgg

SEQ ID NO: 411 - DNA, 2866 bp, HOMO SAPIENS
ctcatgaggagccactcagattcctgtcacttctcaaagcatctccgtcgtgaacatggccctgccaccattcttcggccagggtcgcccaggcccaccgcccccgcagccgccgcctcctgctcctttcggctgtccgccaccgccgctgccctccccggctttcccgccgcctctcccccagcggcccggcccttttccgggggcctccgcccccttccttcagcctccgctggctctgcagccccgagcctccgcggaggcctcccgcggcggaggcggcgctggcgccttctacccggtgccaccaccgccgctgcctcctccgccgccccagtgtcggcccttcccggggaccgacgccggcgagcggccgcggccaccgcctcccggcccggggccgccctggagcccgcggtggcctgaggcgccgccgccgccggccgacgtgctcggggatgcggccctccaacgcctgcgcgaccggcagtggctggaggcggtgttcgggaccccgcggcgggcaggctgtccggtgccccagcgcacgcatgccgggcccagccttggcgaagtgcgcgcgcgattgctccgggctctgcgcctggtgcggcggctgcgcggcctgagccaggccctgcgcgaggccgaagccgacggcgcggcctgggtcctgctgtactcccagaccgcgccgctgcgcgcggaactggccgagcggctacagccgttgacccaggctgcctatgtgggcgaggcgcggaggaggctggagagggtccggcgccgccggctgcggcttcgcgagagggcccgggaacgcgaggccgagcgggaggcagaggccgcgcgggcagtggaacgcgagcaggagattgaccgctggagggtgaagtgtgtgcaggaggtggaggagaagaagcgggagcaggaactcaaagcagccgctgatggcgtactatctgaagtgaggaaaaaacaagcagataccaaaagaatggtggacattctacgggctttggagaaattgaggaaactgaggaaagaggctgcagcgaggaaaggggtctgtcctccagcctcagcagatgagacttttacgcatcatcttcagcgactgagaaaactcattaaaaagcgctctgaactgtatgaagctgaagagagagccctcagagttatgctagaaggagaacaagaggaagagaggaaaagagaattagaaaagaaacaaagaaaagaaaaagagaaaattttacttcagaaacgtgaaattgagtccaagttgtttggggatccagatgagttcccacttgctcacctcttggagcctttccgacagtattatctccaagccgagcactccctgccagcgctcatccagatcaggcatgattgggatcagtacctggtgccatccgatcatcccaaaggcaacttcgttccccaaggatgggtccttcccccgctccccagcaacgacatctgggcaactgctgttaagctgcattagtaaagatgctccaggagtgtggtccagccagcgctctttccagctgtaaatattagcgatggtgccatcttttgctgtagactaaactgcaacttctaaattccatgtggcattcccctaccctgaagttatgctttccttctgtgctctgtgctggccagaggtgcctcttgaatcagattaatgtggtttttcaggaaaggacttaggtgaactgaggtttttaccacaggcagtgaatgaccttggttcaccaaatttgcctctgttttgaggggcttggtccagagtgacttgttaatttactctaacttccttgtgtgttgatgggtaagtacactcaaacactgaatacaggtgtgtgatgggtagatttcacagcccttctactaatagtgagtgtgaaggcaagcttgatgcaaaacctcctgacctttcctacctgaagagccctttgacttctaggaagaaaggtcaaaaatgttatcttcagttgtgttaatcccagttttagtgcagcttaggaggctgctagttaggaagatggcagtggctgtaggctgggttgccagaaaagatggtggcctagtcttattattcagatggagaacttagaaaacctgaagagtacccaaattggattgtattttaatggacaatggctgtattttttccatgttagaaggatcctaatgaaagcacctgttatttttaagtttctaagggtctagttgttcagaatccccaaggatatttccctaacctcactcagtcacattgtaggagccagtgtagctatggaattatcttaggaactcaagcttctaaaactatccatgtagtcaaatctaggggaaaaagcaaataaaaatagtaaaatttggccgggcacagtggctcacgcctgtaatcccaacactttgggaggccgaggcgggccgatcacgaggtcaggagatcaaggccatcctggctaacacggtgaaaccctgtctctactaaaaatacaaaaaaatattagctgggcgtaggtggtgcacacctgtagtcccagctactggggaggctgaggcaggagaatggtgtaaaacccaggaggcagagcttgcagtgagccgagatcgcgccacggcactccagcctgggagacagagcaagactccgtctcaaaaaaaaaaaaagtaaaatttattttttatattcattaataaatgctgttgtgcttggagatgatcactcatataacatgtcatttttttggttctgttttggtttggtttttgccaattattttgttatatttccaaaaaactaaataaaaatcatttttattttttaaaaaaaaaaaaaaaa

SEQ ID NO: 412 - DNA, 6063 bp, HOMO SAPIENS
taagttggcgcgtcacctagacgtcagcctcttacctctcggacgtcccgtcccaggagcaaaactctagtgactttgggcccgcccccgtgagagtggagggcggccgatgagggcggttctgaagggaacaagaccaatgagacgagcccggggcggggcgcggggccggagggtggggcgggtggcggcggtggcagtccgaggtctggctccgcgcagtatatgacagtacgtcagcagcgggatggccctagcagtggcggcggctgcagaagcccaagcagccgcggccgcagtggaggctagagccggagcggcggcggcggcggcaccccggggagtttaagatggcggcgggggggacagggggcctgcgggaggagcagcgctatgggctgtcgtgcggacggctggggcaggacaacatcaccgtactgcatgtgaagctcaccgagacggcgatccgggcgctcgagacttaccagagccacaagaatttaattccttttcgaccttcaatccagttccaaggactccacgggcttgtcaaaattcccaaaaatgatcccctcaatgaagttcataactttaacttttatttgtcaaatgtgggcaaagacaaccctcagggcagctttgactgcatccagcaaacattctccagctctggagcctcccagctcaattgcctgggatttatacaagataaaattacagtgtgtgcaacaaacgactcgtatcagatgacacgagaaagaatgacccaggcagaggaggaatcccgcaaccgaagcacaaaagttatcaaacccggtggaccatatgtagggaaaagagtgcaaattcggaaagcacctcaagctgtttcagatacagttcctgagaggaaaaggtcaacccccatgaaccctgcaaatacaattcgaaagacacatagcagcagcaccatctctcagaggccatacagggacagggtgattcacttactggccctgaaggcctacaagaaaccggagctacttgctagactccagaaagatggtgtcaatcaaaaagacaagaactccctgggagcaattctgcaacaggtagccaatctgaattctaaggacctctcatataccttaaaggattatgtttttaaagagcttcaaagagactggcctggatacagtgaaatagacagacggtcattggagtcagtgctctctagaaaactaaatccgtctcagaatgctgcaggcaccagccgttcagaatctcctgtatgttctagtagagacgctgtatcttctcctcagaaacggcttttggattcagagtttattgatcctttaatgaataaaaaagcccgaatatctcacctgacgaacagagtaccaccaacactaaatggtcatttgaatcccaccagtgaaaaatctgctgcaggcctcccgctgccccctgcggctgctgccatccctacccctccaccgctgccttcaacctatctgcccatctcacatcctcctcagattgtaaattctaactccaactcccctagcactccagaaggccgggggactcaagacctacctgttgacagttttagtcaaaacgatagtatctatgaggaccagcaagacaaatatacctctaggacttctctggaaaccttaccccctggttccgttctactaaagtgtccaaagcctatggaagaaaaccattcaatgtctcacaaaaagtccaaaaagaagtctaaaaaacataaggaaaaggaccaaataaaaaagcacgacattgagactattgaggaaaaggaggaagatcttaagagagaagaggaaattgccaagctaaataactccagtccaaattccagtggaggagttaaagaggattgcactgcctccatggaaccttcagcaattgaactcccagattatttgataaaatatatcgctatcgtctcctatgagcaacgccagaattataaggatgacttcaatgcagagtatgatgagtacagagctttgcatgccaggatggagactgtagctagaagatttatcaaactagatgcacaaagaaagcgcctttctccaggctcaaaagagtatcagaatgttcatgaagaagtcttacaagaatatcagaagataaagcagtctagtcccaattaccatgaagaaaaatacagatgtgaatatcttcataacaagctggctcacatcaaaaggctaataggtgaatttgaccaacagcaagcagagtcatggtcctagaactctgcttggaccagaagatgtgaataaacttaagcttatttatttaaaattccaaatgagttgctctagattctaaaaaggtgaaactttggctgttgaaagtttcagtattagtaaacttgagttactttttcttttccattttactttgcttccctgcatttcgaagctgctctttctggtcctccccaccaccccacccccaagacttgtgtttgttaatagaaataatttttttaggtattggggatccattgtctatatttcaaatcagttttttttcctcaaaaacttgtgtttgttattagaaatgattttttagatattggggatccagtgtccacacttaaaagttgtatgtgtttaaaaaacaacaacagtaatgtgcaaggtgaaatgcttttggataaacgtaagcctattttctgacgtttcttaatgcaaactctttgccttaaatggtagaatatttagaaatttgcacaaaattaaaaaaataaacattgtcttggagggttaaaaaatagaaaggtgtatgtgtatagattcacatacacatatgtatatacaggctgacttgatctagaacattaaatccgccctgcaagttaaccccccattgcaatggttgccttaaggtgtttgctagttgtgtacatagtgtggttaatcattagctacactgcttcccacttgattagagcaatgggaagcatactgtggcctaccagcatctggaagtgtgtgctcgatctgtatgtgtgcagaggtggtgtggatgtgagcgtgcatgaaggaaaaaaagctgctactcctagtaggccaaacgctcaggttaaacaactgacgagtgttactgtagggtgtttttttgtttttttgttttttttcttctatcaaattgctacttttgttgtggaagacaaaagcatttccatttcaacgagtttgtcagctttattaatgttgggcaaaaattgatatgtcatgaaaatgaaacagatctatagttttgggacaaaattataaaatgaaatgtgtaggtaacctatttatatactgctataaagtattttttgaagagagatatgcaaagaagctattacctacataagaggtatatttaaagattttttttttcatcctggtgccaggaatataaaaaagagtggatatatttaaccataacatactgtgattcatcaaacagcacaaactttcatttcatggagtttatctgttgacattgatttaaactgtcacttgttttatcatgtgggaacataagttatgtggtcaaaaatataaggattttgaattaatgttgattcaagttgtattgtcttattgtattgtcttttcaaagtgctgccagttgaaaagggaagcattatgtttacaaatctgttttgaaatgtttgccaaaattttggtagtgtctttaataaagatgtttgtctccagcatccagaaaaataaatgaataactttgttgtgtatcactgtaaaccagaaaaatgttggttatctagaaaacttgagagagcatgtagattaacttttctctttggagttctaaaacattaactggaaagattagataatatactaaatgtatacagaagtatacagactatacaaagactgaaacaagtcccttttgcactacaactctataacattaccgcagaaattttggttctatgtagcatggacctcctaaggaattctgtttcttttagcattgagatccctggtgctctttttttacctcagaattggtacaatcattattaaacgttaatttatttcaaactttttaattgaaaaaaggaaagggaaacttaattggggataaattcaggcatcatattattatgatagagtctcctgagtggttcgtctataggtaatgaactcattggtgttatttcttggacatcttggccttttaatcaaagactgtgtgctgctatttgctatgagcaaggtttctcaaaagcaaaaggtgcttggaccatttggatcacctgagttagaatctctaggtatagggcccaagtatctgcattttcacaggtttcttgtaggtgactttctgcaagctaaagtatgagaaccattggcttggatgtagttctaaacttttaggtctgtaaatcttgaaatcttgaactgaaggtcaactattggcttttttttttttttaatgtccatcatgtcagcaggtgcaaatcacttttcccctttgcatgatctgaggcacctcctcagttgtttcactgccaactcttgtttcagaacctgtttacaaacaagccttccagttggtgaatggttagccattggagctcctaccctgtacatcagcacatcttctggtttacaagttgggtaacaatgaaagctggagatgctaaatggaaatccagcattgcatacccttagacctgatcacataccagtaaaagccttaatttagatgttagttgtatgtgttggacagatccttgcaaaagtgtgtctgtctattagttgtaaatttgaaaattataaatctctgaatctgctactatccaagtttcatcccttttgaagatgaggcatgagcctattaaaatatttataatcatttttcgtcccctactgcaagacttttagattcttacaaatgattactacaggaatagtggccacttaatgtcagttactccggtggaagaatttatctagttttttttcttttcttttttggaaggatggtgtgaaaaatagcaagattagagaatgagttgtatagttttttctatcacatttcatctaaaatgatttgaaggacttttgaagatttttaccaacatccttaaatcaactccaggttggatgaacaactgatttaaaacaaactaagagaacattaactagatgtgggctttttaaaatatataggtattgcatttcctaccttgttatttattccactttgaatactttagagggcttaactttcaactctttaaggtagtaatggatagttttatacttgttctcacaaaattgttatggtcagtttatatcattgctccatgcattgattataaaaattcagtattaattttttctgatcttataagctttataggagttttcttttctcttataaagtgtttcaccttatgtaaaacaaatgcctgcttgcatattggaagatgttgaaattagttttagacaaaagtggtccatcaattcagacactctgcttggatgccttacccttttcattagtgcattctttgcttctgaaacttggcagaaactcgttagccagtccactgcctttctgacaatgtgtggagtcacgtatgcttggtatatgcctttactacttttaaagttctacagtttattacttgcccaagtgttactaaatccttttcttatgtgtactggatggagaaaaaattatagccagcactttgagaggaaagttttcagaaacaatattaactggcactactaactgaaggccacaggagatgctatcaatgttatttgtaatctgaagattgaacaaggctgtgaggctcatttcaaactattttgaggtgttaaaatatatatatgctgtttctcagctgttccactcaaaccgtgttaggactctcaaaggtaaaatgtcacaggggcttttcagttgttacagagctcagcagctgtggttgcccctgttctacaccaatttcagttcaataaaaatgttaactttgcaaaaaaaaaaaaaaaaaaa

SEQ ID NO: 413 - DNA, 6035 bp, HOMO SAPIENS
atgccgggggccggagcccgggcggaggagggcggcggcggcggcgagggcgcggcgcagggggcggccgcggagcccggggcgggtccggcgcgggagccagcgcggctgtgtggctatctgcagaagctgtcgggcaagggccccctgcgtggctaccgcagccgctggttcgtgttcgacgcgcgccgctgctacctttactatttcaagagtccgcaggacgcgctgcccctcggccacttggacatcgcggacgcctgcttcagctaccagggccccgacgaggcggcggagccgggcacggagccgcccgcgcacttccaggtgcacagcgcgggagccgtcacggtgctcaaggctcccaatcgtcaactcatgacttactggttacaggagcttcagcagaagagatgggaatattgtaacagtcttgacatggtcaagtgggacagcaggacctctccaactcccggggattttcctaagggtcttgtagccagagataacactgatttaatttacccacacccaaatgcttctgcagaaaaagccagaaatgtcctagctgtggagactgtgcctggagagctggtgggagaacaagctgcaaatcagcccgccccagggcatccaaattccattaatttttactctttgaaacagtggggcaatgagctcaagaattcgatgtcttctttccgtcctgggagaggacataatgatagtcggaggactgtgttttataccaatgaagagtgggaacttttagacccaacccctaaggacctagaggagtccatagtacaggaagaaaagaagaagctgacccctgaaggaaacaaaggagtaactggctcaggattcccctttgattttggacgtaacccctacaaaggaaagcgccctttgaaagacataattgggtcgtacaaaaatcgtcacagcagtggtgacccttcaagtgaaggcacatcaggcagtggcagcgtcagcatcaggaagccggcctccgaaatgcaactgcaggtccagagccagcaggaagagctggaacagttaaagaaagacctgtccagtcagaaggagcttgttcgactgctccagcagacagtccggtcatcccagtatgacaagtatttcacaagcagccggctctgtgagggggtcccaaaggacacgctcgagcttctgcaccaaaaggatgatcagattctgggccttaccagccagctggagaggttcagcttggagaaggagagtcttcagcaggaagtaaggacgctgaagagcaaagtgggcgagctcaacgagcagctgggaatgctcatggagaccatccaagccaaggacgaggtcatcatcaagctcagcgagggcgagggcaacgggcctcctcccaccgtggcgcccagctccccttcggttgtgcctgttgccagggaccagctggaactggacaggctgaaagataatctacaggggtacaaaacccaaaacaaatttctaaataaggagattttggaactctcagctctacgaagaaatgcagaaaggagagagagggatctgatggcaaagtattctagcctggaagccaagctctgccagatagaaagtaaatacctgatattgctccaagaaatgaagacaccagtgtgctcagaagaccaggggcccacccgggaggtcatagcccagttgctggaggatgctctgcaggttgagagccaagagcagccggagcaagcatttgttaaacctcatcttgtcagtgaatatgatatttatgggttcaggactgtacctgaggatgatgaggaagagaaattggttgccaaggtccgcgcgttggatctgaagactctctacctcacagaaaaccaggaagtctccactggggtcaagtgggaaaactattttgcaagtacagtgaacagggagatgatgtgctctccagagttaaaaaacctcatccgtgcgggcattccccacgagcaccgttccaaggtgtggaagtggtgtgtggaccgtcacaccaggaagttcaaggacaacactgagcctggccacttccagaccttgctgcagaaggcgctggagaaacagaacccagcctccaagcagattgagctggacttgctgcgaactctgcccaacaacaaacattactcctgccccacctcagaaggcatacagaagttacgcaatgtcctcctcgccttctcctggcggaatccagatatcggctactgtcaaggcctaaacaggttggtggcagtggccctcctgtacctggaacaagaagatgctttctggtgtctcgttaccatagtggaagttttcatgcctcgagactattatacaaagactcttttaggatcccaggtggaccagcgggtgttcagagaccttatgagtgagaagctgcctcggttgcatggccactttgaacagtacaaagtcgactacactctcatcactttcaactggtttctggtggtatttgtggatagtgtcgttagtgacatcctctttaaaatatgggactctttcctttatgaaggaccaaaggttattttccgttttgctctggcactttttaagtacaaggaagaggagattttgaaattgcaagattcgatgtctatatttaagtatctccgctacttcactcgcactatccttgatgctagatccggaaccgacgcgcctaccacttggagaaagtccggctggagctgaccgagctggaggccatccgtgaggacttcctgcgtgagcgggacaccagccctgacaagggtgagctggtcagtgacgaggaggaggatacctgagtgggctcgggatgctgctcttccttccttcacaaccaaagtgtgcccaaagggtgaaagtgcacttaaaagccagaatgtaacgtgtgtgtcctctggggatctgctgggcagatgtcccaagccaggctgcccttcctcatttcccactgtgcggggggcaggggtgggaggtctaatctgtttacaaccatttccgtgccatgcttttggttacacgtatctcagtcacgctttctgcctggttggtggatcctcaggcttaccagtggctatttgcaagagcctgtttccagcctccgtcagcctgtcggtgctctgaccctctgaaaccttgctttgctgggcatctccccatattctctctcctgtacatagtgggcagtggtgtgtggttttgaatggcagtgctataaaggatgccagctgtgctttaggcacctgtaggccagagggttgctgcctcaggcataaggttggtatgaaaaggggctgccttagaaaagcaggcacatcccttgttcagaaatggccactgtaggaaagcctgtgaacctcccaccagtggctttaagctgccagccatgccccatttctagaatagcctttgctcttccacacgcaacccttccatcagtgtcttccagcctgcatggggagggcctggctgcccagacacccaccctcacttctcatggccagcctgtgtttgcagatcactgggctgctctgtccccagcttgccccgtgccaggcatggctctgtgagattctgtggaatgcccttcttgacttgtggaaatcattcaccaagtacgatgggatgggattccaagtaaacagtggaccgtcatattgcaaagcaggcccacgcctgggctggccttggttgaggggatggaggaatgttttcgggggtgctttgcagggcagtggtgcagccgcagcgtgaacgctcttggacagctgaaaaccatggcctccttggggatggccagtgctcctggtgtctccacctgcctgggttgtgcaggaggccggctgccagtgcctggggctgggaaacttttttgcttggggcaggcttgggtgagctctcccagatgtgtgcccaccccaccactgcctggaacatccttgttctctgccaggatgcaggggcactgttgcctctgacacagcagtttctgggaactcagaggactgcctttctgaaggctggggagaggctttgagcaaggagcttgtttttgcttaatcgctctagaccatccctgatgcgtagatgtgagaggatgttttctggcacagtgttatgaaaatacaagataaatgatctcagtggaatgtttcatattacccgaaaaaaactggaaatcatcctttgttgtgaacacactgagactaagaattgaagcaatgcagttttaagaagtatttttcctattttttgctgtcaactttttggcaatgccacggcaaagttggtgtttcagcacatgctagagtgagctccggcttcgtgtctttaaccaactccactaatgtttcactgggtagacggagctggcctctatatttagccagaagcctttgcctcttttcaggcatcaaaaatgggttttgtcattgtctttgtctttgagagcagcagtttgaggtctgactccttcagttgtcctgtgagctgggcgttgcagtctgctcgaatcaagtgttggaaccccccccacccctcagcccatcgtgaaacgacagctgtcagcctggggggcggctgctgaggaggtgcagcaggaatggggctgggccctgaggttttactttccgagccaatggcccctggaacatgccagcacacactgccatgtcctggggctaagagctgcctttagggacaggctcgtgttgtccagtttgccctgagagatgcacctgaccaggggcccgtcgtggctgcaacccacggtggtatgttagtgtttccaggcagttgtcagcagctgccgggcagtgtgtgtgtgcgacagcaggagagttcctggaggaaagggactggggacactttctcagaggttctcctgcctggaatcaagtgatgcgtgtccagaaggcaagagagggcggctccgcctggttaaagtttgggaacgggacggagccaactcctccttccaggactgtgggccccactcttttgcgctaacacttcccctccctcgggtcactgaggaaagagctgctctgtcccctccagtgccctgaaggtccctggcctccactggctgccatggcagggggcccttctgacaggggctgccccaagctgctgttcctcctctgaaccttcaccccaacacccagcccgtggcccctgcaagggggaccctgccagctgggaaacccaaaggcctgtccaaacgtgcgcaccaggaccgaggggagctccctcccaacacctgctaggaattgccaacttttaaatggatggggttttttatgggttgaacctctgttaatacttttgtacactctcactacagtttatatttttataggctattttctcaaggtgtttctagattccacatatctattttatataacaagttattatgttatgtgtgtgactcccttgtgtgtatctgtgccagcctcagcctccgagttgcttttccctctggccctgactctcactgactcaccgatgtgatgtgcaggcccacttcttaccccagatagcctcgggcgctgcctgtagtcatgctgacagctgtacagtagccgccaagactgctgacagctggagacggttctggtttcaactacggtatattgatatcggaagtattctagacagatcctcggttgggttttctagctacatgtttgtattgcacagatccccacctgccatcctatagtgttgtcttcctgtgtgttccggggcttctgggcagctgggcctgcccggggaagtccttgcaggtgggaggccatacagagacccactgtgtgccactgaacgtcccactgctgctgggcaactggaggactgcagggggcgccaggtgactctctccttttatatcacagcagctcctgtgctgaccttcaagttacgttttggaactgtaatactaaaggaagaaataaactactaatttgtataataaaaaaaaaaaaaaaaaaaaa

SEQ ID NO: 414 - DNA, 3442 bp, HOMO SAPIENS
gaagtcgcccggcgcgggagcgcgaactctcgcgagaatgccgccagctccggaggcgactgcggcaggagcccgagctctcgcgcgacaggcaccaattcgttagacgcgcgctgcaggagcgcggaacatggcgcggcacgggccaccgtggagtcggttggacgcgcagcaggagcgcgacgtgcgggagctcgtccggggtgtcgccggcctccaggacgaggcagaccccaacttccagctcgccctaaacttcgcctggtccaacttcagatttcatcgtttcttggatgtcaacagccacaaaatagaaaaaacaatcgaaggaatttatgaaaaatttgtcattcattctgatctaagcaaagctgctagttggaagagattaacggaggaatttctaaatgcaccacttcccagtataaaggaaataaagacagatgcacattattccatactgtcacttcttctgtgtctgtcagactctccttcaaacagcagttatgtggagacaccaagaaataaagaagtggaaaagaaagatgatttcgactggggaaaatacttgatggaagatgaagaaatggacattggtccgtacatggacacaccaaattggtctgaagaaagtgaagaggaaaatgatcaacagcccttaagcagagaggactctggaattcaggtagacaggacaccgttagaagaacaagatcaaaacagaaaactggatccttgtatcagttggaaagatgagccagatgaccgaagctggctggaacatcatgtggtccatcagtactggacagccaggccctcccagtttcctcatagtttacatttgcactctaatttagctgctgtctgggaccaacacttgtacagcagtgatccattgtatgttccagatgacagggttttggttactgagactcaggttattcgggaaaccctatggttactttcaggagtgaaaaagctctttatatttcagttgatagatgggaaggtaactgtgagaaacaatattatagtaactcatttaacacatagctgtttacgatctgtgctggaacaaatagcagcatatggccaggttgtgtttcgactccaggagttcattgatgaagtcatgggacacagttctgagagcatgctgcctggaagtgggtctgttcctaagaagtcaactgaagctccctttagaacctaccaggctttcatgtgggccctgtacaaatatttcattagtttcaaagaggaacttgcagaaattgagaagtgcatcatcaataatgatactacaataactcttgcaatagtggtggacaagttggcacctcgattgtctcagctcaaggttctgcacaaagtgtttagtactggagtagcagaagttccacctgatactcgaaatgtcgtccgggcctctcacctgcttaacaccctgtacaaggccattcttgaatatgacaatgttggagaagcctctgagcaaaccgtctccctccttttctctctctgggtggaaacggtgcggccttacctgcagacggtggacgagtggatcgtgcacgggcacctgtgggatggcgccagggagttcatcatccagagaaacaaaaatgttccagttaatcacagagacttctggtatgcaacttacacgttatatagcgtatcagaaaagacagaaaatgaagaaaaaatgagtgataacgctagtgcgagttccggcagtgaccaggggccctccagcaggcagcacaccatggtgtccttcctcaaacctgtcctgaagcagatcataatggctggcaagtcgatgcagctgctgaagaacctgcagtgtgcggagagcaccacctgccaggcaggagccagagatgcagaaagaaaaagtttatacactctctttctggaatctgtacagtcccgtcttcgacatggagaagattccactccacaggttcttactgagcaacaggcaaccaaggagaacctgatgaagatgcagtccattgctgaaagccatcttgaactggatgatgttcatgatccactgcttgccattaactttgcaaggatgtatttggagcagagtgactttcacgagaagtttgctggtggtgatgtatgtgtggatagatcatcggaatctgtgacatgccagacttttgaattaacgctgagatcctgcctctatcctcatattgacaagcagtatctagattgctgtggaaatctcatgcaaactctaaaaaaagattacaggttggtagaatacttgcaagctatgaggaattttttcttaatggaaggaggagataccatgtatgacttctacacgtcaatttttgataaaataagagaaaaggaaacatggcagaatgtgtcttttcttaatgtccaactccaagaagcagtaggacagcgttatcctgaagatagttcacgtctatctatatcttttgaaaatgttgacacagctaagaagaagctgcctgttcatatcttagatggtctgaccctcagctacaaggtcccatggcccgtggacattgttataagtttggaatgtcaaaaaatttataatcaagtgtttcttctcttattgcaaataaagtgggcaaaatatagtctggatgttttactttttggtgaactggttagtactgcagaaaaaccacgacttaaagaaggccttatacatgaacaagacacagttgctcagttcggaccacaaaaagaaccagtaagacagcagattcatcgcatgttcctcttaagagtgaagctcatgcatttcgtgaacagcttgcacaactacatcatgaccaggattctacacagtacagggctggagtttcaacatcaagtcgaggaagccaaggatttagatcaattgattaaaattcactataggtatctgtcaaccatccatgaccggtgtctgctgagagaaaaggtcagctttgtgaaagaagctatcatgaaggtgttgaacttggctctcatgtttgcagacggttggcaggcaggcctgggcacttggcgaatggaatctatagagaaaatggaatctgattttaaaaactgccatatgtttcttgtaaccattttaaacaaagccgtctgtagaggatcctttccccattgtgagtatatcatgttaaaatatttctacctctgtatttccttgtaactaagtgtatgtgtcattgttttgttactgatcccatgaagaattagaaattctcaccattttcaaaactgaaaagtcccttagcagttgtcccatgctttgaattgctttttaagcattacggtgaggtgagtgtaagcctgaggatcttactttctggtataccatttattacaacagatttctaaaactcctattaaataaagttgatggcagaatagatttctgtcacacttc

SEQ ID NO: 415 - DNA, 4368 bp, HOMO SAPIENS
atcattgtaaacaggcagaggctgggcggggtgggaatggggcgcccgaggccggcctggggcgcagcgcaggaggcggctccggtggctgcggcggcagcgtgagcgcgaggaggcggaggctgcggcggggcggacggtcgcgcggcggcaggcacaggtgtaatggataggtaacagagaagacctcgtcccttcctagtcagggcatcagcatgactgagtgcttcctgccccccaccagcagccccagtgaacaccgcagggtggagcatggcagcgggcttacccggacccccagctctgaagagatcagccctactaagtttcctggattgtaccgcactggcgagccctcacctccccatgacatcctccatgagcctcctgatgtagtgtctgatgatgagaaagatcatgggaagaaaaaagggaaatttaagaaaaaggaaaagaggactgaaggctatgcagcctttcaggaagatagctctggagatgaggcagaaagtccttctaaaatgaagaggtccaagggaatccatgttttcaagaagcccagcttttctaaaaagaaggaaaaggattttaaaataaaagagaaacccaaagaagaaaagcataaagaagaaaagcacaaagaagaaaaacataaagagaagaagtcaaaagacttgacagcagctgatgttgttaaacagtggaaggaaaagaagaaaaagaaaaagccaattcaggagccagaggtgcctcagattgatgttccaaatctcaaacccatttttggaattcctttggctgatgcagtagagaggaccatgatgtatgatggcattcggctgccagccgttttccgtgaatgtatagattacgtagagaagtatggcatgaagtgtgaaggcatctacagagtatcaggaattaaatcaaaggtggatgagctaaaagcagcctatgaccgggaggagtctacaaacttggaagactatgagcctaacactgtagccagtttgctgaagcagtatttgcgagaccttccagagaatttgcttaccaaagagcttatgcccagatttgaagaggcttgtgggaggaccacggagactgagaaagtgcaggaattccagcgtttactcaaagaactgccagaatgtaactatcttctgatttcttggctcattgtgcacatggaccatgtcattgcaaaggaactggaaacaaaaatgaatatacagaacatttctatagtgctcagcccaactgtgcagatcagcaatcgagtcctgtatgtgtttttcacacatgtgcaagaactctttggaaatgtggtactaaagcaagtgatgaaacctctgcgatggtctaacatggccacgatgcccacgctgccagagacccaggcgggcatcaaggaggagatcaggagacaggagtttcttttgaattgtttacatcgagatctgcagggtgggataaaggatttgtctaaagaagaaagattatgggaagtacaaagaattttgacagccctcaaaagaaaactgagagaagctaaaagacaggagtgtgaaaccaagattgcacaagagatagccagtctttcaaaagaggatgtttccaaagaagagatgaatgaaaatgaagaagttataaatattctccttgctcaggagaatgagatcctgactgaacaggaggagctcctggccatggagcagtttctgcgccggcagattgcctcagaaaaagaagagattgaacgcctcagagctgagattgctgaaattcagagtcgccagcagcacggccgaagtgagactgaggagtactcctccgagagcgagagcgagagtgaggatgaggaggagctgcagatcattctggaagacttacagagacagaacgaagagctggaaataaagaacaatcatttgaatcaagcaattcatgaggagcgcgaggccatcatcgagctgcgcgtgcagctgcggctgctccagatgcagcgagccaaggccgagcagcaggcgcaggaggacgaggagcctgagtggcgcgggggtgccgtccagccgcccagagacggcgtccttgagccaaaagcagctaaagagcagccaaaggcaggcaaggagccggcaaagccatcgcccagcagggataggaaggagacgtccatctgagcagcctgcgtggccgtctggagtccgtgagactgaaaggacccgtgcatcttactgtaacccgggggccaggccggctctctcgctgtacattctgtaaaggtgtcttctcttctcagactcttcctctgtcacacgtctgactccttcacgtcaggctcaggttccatgggaggacgaagcagtggacgcattgtgggctttagggacagatgagttttccagatagtgtcagcttatttgaagattaattttctttgttaacttaaaataactattttaacccttgagtggcttctttttaaaccaaaaaccgtctttctttgcttttttatcacagcagaatcaggatctctttctcattcaaggggggaaccaccccaggtcagcgctgcgcctgctgtggccgccgcgagccacgccctctgggatctctggtaccgtcactcttgcttgtgccttccacaccttctcggtgcagatccctatgggggagctgcctcacgttctctgactggtcagagcagcgcctggtgggtgttccctggcccactctcctctctccttctgcagttctaaaccacagtctataagcccgagtcaccaggacggcctgtctggccacagacaggggctgcctgtggagcctgcccaccggcccccggcagtgcagtccagcggggaggaggctgcccgttcctgccagttcctcactgcggggaccagcaaaggccttctcactgggttggtcaaaggtagtcaccttggcctggtgcatccacagaggatgttgttcaaaccagaaatcttttaaacgactgaccttccttaaaaacagaatgactccgattgcttgcttgggctagaatgtacacgtctccttgcctgaataagccatatatatgctcttaaacaaaagtttgaaattatccatatcatctcagtgaacctactggtggactcccaattgacaagattgagcaatagaaaaaaattcctttcctttgaatgatagctgtgattcaccccaccccattttcttgtttctggtccatccgatgagacggatgctctgatgctctgaggcttctgggaggctgggccctggaggcaacgtgctgcaggcgcactctgtcagagtgaacagcaccgcgagacaggccaggctcgtggctcggaagacaaaccccacacacactcaaggggtcgaaaacaaaccccacacgagggctctcacctccttctcctaggtagtatttattttcagcacctgtttgatgcagtttttaatcctctacctattgcactgttgtgactcgttggccattatttgatttttgtacgaaaaaaagctttgttatagaaatcagcatactatttttttaaatctggagagaagatattctggtgactgaaagtatggtcgggtgtcagatataaatgtgcaaatgccttcttgctgtcctgtcggtctcagtacgttcactttatagctgctggcaatatcgaaggttccttttttgtttgtgtaaactctaatttctatcaaggtgtcatggatttttaaaattagtatttcattacaaatgtctcagcattggttaactaatttttgccaggaccattattgatcaagcaaataaattcaacagccatttgggaaaaagaaaagcttctagtttttttgtacacattctttctgtgaggagattgagtactctgcagctggcgaggagttggttgaggcacttcttcaaggccaagggggaacacagtgttttgtttccagctcactttgtacccctcacctctgcagacacggggagaaccccggacccctggcatgcatgctggcggcggcatgcctcccttccacaagcccatgctgctgcagagggagcctgtgtttgcaaaacccagtggactgggctgggtctgctgtctgagcagctcctggctccggtgggaactgcacacaagtccactggcctggcttggccccaggcattgcaattgacagacatttgcatttcatacggtaaatgaggactcagcacagccaaccataatcagcatgtctgggatagactggtctagaataaaaatgaagtttccattgctttgtttgctttaaaaattccacaattaaaatatctgtcattgaaagcttaaaaaaaaaaaaaaa

SEQ ID NO: 416 - DNA, 5634 bp, HOMO SAPIENS
ttgcgcgctgcagggcaacaccccggcgtccctggaagctgggggagcgggagaaataactttatttggactgagagctggagaatgagaataggacctgagagtatattgggctaaggaggagaggtgtttgagcccagatgagtcatggctggacgacccctccgcataggagatcagctggttctggaagaagattatgatgagacctacattcctagtgagcaagaaattcttgaatttgcccgggagattggtattgatcccatcaaggaaccagaactgatgtggctggcgcgagagggcatcgtggccccactgcctggagagtggaaaccatgccaggacatcacaggtgacatttactatttcaacttcgccaacgggcagtctatgtgggaccatccatgtgacgaacactatcggagcttggtgatccaagagcgggcaaagctgtcaacttctggggccattaagaagaagaaaaaaaaaaaggaaaagaaagacaagaaggacagagacccccccaaaagttcgctggccttgggttcctcattagccccagttcatgttcctcttgggggcctggctcctttacgaggtcttgtggataccccaccctctgctcttcgtggatctcaaagcgtgagcctggggagctcagtggagtctggacgtcagcttggagaactcatgctgccttcacagggtctcaagacctctgcttatacaaagggtctcttgggctccatatatgaggacaagactgctctcagcctcttgggtttaggagaagaaaccaatgaggaggatgaggaggaaagtgacaaccagagtgtccacagctcaagtgagcctcttaggaacctacacctggacattggggcactggggggtgactttgagtatgaggagtctctgagaacaagccagccagaggagaagaaggatgtttctctggattcagatgctgccggtccccctactccctgcaagccctccagcccaggtgcagacagcagtctgagcagtgctgttggcaaagggcgacagggaagtggagcaagacctggtcttccagaaaaagaggaaaatgagaagagtgaacctaagatttgcaggaatctggtgacccccaaggcagaccctacaggcagtgagcctgccaaagcctctgaaaaggaagcaccagaggacacagtagatgcaggagaggagggttccaggagggaagaggcagccaaggagccaaagaagaaggcttctgctctggaagagggcagttcagacgccagccaagaactggaaattagtgaacacatgaaggaaccacagctctcagactccatagcttctgaccccaagtccttccatggcctggacttcggttttcgcagccggatctcggagcacctgctggatgttgatgtgctttccccagtcctgggtggagcttgtcggcaggcccagcaaccactgggaatagaagacaaggatgacagccagtccagccaagatgagctgcagagcaagcagtccaaaggcctggaggagaggttatctcctccacttccacacgaggagcgggcccagagtccccctcgcagcctggccactgaagaagagcctccccagggccccgaggggcagcccgagtggaaggaggcagaggagcttggggaggactctgcagccagcctcagcctgcagctgtccctccagagggagcaggccccaagcccacctgctgcctgtgagaagggcaaggagcagcattcccaggccgaggagctgggccctgggcaggaagaggcagaggatcctgaggagaaggtggcggtcagccccaccccgccagtctctccagaggtgcgatccacagagcctgtggctcccccagagcagctctcagaggctgcactaaaggccatggaagaggcagtggcccaagtactcgagcaagaccagaggcacctgctggaatccaagcaagagaagatgcagcaactgcgggagaagctgtgccaagaggaggaagaggagatcctccggcttcaccagcagaaagagcaatctctcagttccttgagggagcggctgcagaaagccattgaggaggaggaggcccggatgagagaggaggaaagccagaggctatcctggctccgagctcaggtccagtccagcacacaagcagatgaggaccaaatcagggctgagcaagaggcttccctgcagaaactgagagaagagttggagtctcaacagaaggctgagagggccagcttggaacagaaaaataggcaaatgctggagcagctcaaggaagagatagaggcttcggagaagagcgagcaggctgccctgaatgctgcaaaggagaaggctctgcagcagctgagggagcagctggaaggggagaggaaagaagctgtggcaacgctggagaaggagcacagtgctgagctggagcggctctgctcctcattggaggccaagcaccgggaggtggtctccagcctccagaagaagatacaggaagctcaacagaaagaggaggcccagctgcagaagtgccttgggcaagtggagcacagagttcaccagaagtcttatcacgtggctgggtatgagcacgagctcagcagtctcctgcgagagaagcgccaggaagtggaaggggagcatgagaggaggttggacaagatgaaggaggagcaccagcaagtgatggctaaggccagagagcagtatgaagctgaggagaggaagcagcgggctgagcttctggggcacctgaccggagagctggagcgcctgcagagggcccatgaacgagaactggagactgtgaggcaggagcaacacaagcgtcttgaggacttgcggcgccggcacagggagcaggaaaggaagctccaggatttagagttggaccttgaaaccagagctaaagatgtcaaggccagattggctctgctggaggtccaggaggagaccgcccggagggagaagcagcagctgcttgatgtgcagaggcaggttgctctgaagagtgaggaagccacagccacccatcagcagctggaggaggcacagaaggagcacacccacctgttgcagtcaaaccagcagctccgagaaattcttgatgagctgcaggcccgcaagctgaagctggagtcccaagtggatctgctgcaggctcagagccagcaactgcagaaacacttcagcagcctggaggctgaagctcaaaagaagcagcacctgttgagagaagtgacagttgaggaaaataatgcttccccacattttgagccagatctccatattgaggacctgaggaaatcccttggaacaaaccagaccaaagaggtgtcttcttctctctcccagagcaaggaggacttatacttggacagcctgtcctcccacaatgtctggcacctcctctctgctgagggggtagccctccgtagtgccaaggagttccttgtgcagcagacacgctccatgcggaggcggcagacagctctgaaagctgcccagcagcattggcgccatgagctggccagtgcgcaggaggtggccaaagacccaccaggcatcaaggccctggaagatatgcgcaagaacctggagaaggagaccaggcacctggatgagatgaagtcggccatgcggaaaggccacaacctgctgaagaagaaagaggagaagctgaatcagttggagtcctctctttgggaagaggcctcagatgagggcactctgggaggatcccccaccaagaaggcagtaaccttcgacctcagtgacatggacagcctgagcagtgaaagttctgaatctttttccccgcctcaccgtgagtggtggcggcagcagaggatcgactcaaccccgagtctcacctcccgcaagatccacgggcttagccactccctccggcagatcagcagccagctgagcagtgtcctcagcatcctggacagcctcaaccctcagtcgccgccgccgctcctcgcctccatgccagcccagctccctccccgggaccctaagagcacccccacccccacctactatggctccctggccaggttctcagccttatcatctgctacacccacgtccacccaatgggcctgggattcagggcaggggcccaggctcccctcctctgtggctcaaacggtggacgacttcctgttggagaagtggcgcaagtattttccatctggcatcccgctgctcagcaacagccccaccccgctggagagcaggctgggttacatgtctgccagtgagcagctccggctcctacagcactcccattcgcaagtccctgaggcgggcagcaccacctttcagggcataattgaggccaaccggaggtggctggaacgtgtcaagaatgaccccaggttacctctcttctcgtcaacacccaagccaaaagctactttgagcctcctgcagctgggccttgatgagcacaacagagtgaaggtgtatcgcttctgaggccctgagcaggggcttggggcagcccagcctctcctccacccagaccaagtgcctgaggagctgcctgccttcttccatctgagaaagcaccctccttccccctttgacttgcaggagccaccagggaccagggggttgagtggaacagtaaagccacacattctgtgactatataacctatctcaggctaaaatgtgtggactcgtacgagctcttgtcattgacatggcaagctgatggcgtgcggtggctgcggggtatcagggccgggagccctttgggaggaagggaggcgttagaggagctgccttcggaggctcagggagtccctttggagctggttgtttccttggccctgcagcgcactgctcggggctcccaaggaggttgtgtgtatggttcttaattcatcaggacaaagacccccagcatgtgtgtaccctgggacccgatttctctgggcccacatctatctccaatacctcagcctcagatcagaccctttcttttttgtctttcttctcttaatttttaaatgcctcttttcttgagcattccatctctctttttgaccctctcaggactgggcttagctgtccagagccctgccggagggtgctgggggctgtccctctgcaggcactgtgttttcctcaggggctgtcctcagaacacccctcctgctccctggggctcctcagggagccatttcagctggagtctcaggtctcaaaaacaacttctccaggaggccaaaaaaagactgggttggcttctggtcctcatgatggcttttatcctcctgggacactttgggtatattcatgggcattgtttccatctgtcttttctacctgtgccacccctgccctgattccacggctgcctcaggcaggcaggcaaggagctaggccggtgcccggccctggcagcaaggggtctttgtgcagttggagatgctgccgttgtggcagagcgtcctgcagccccgcttccatcagcaggctctggggtgggggctttgcaggggatgctctctgatgtttgttccgttgtttaaataaaatgcacttatttttgtttttttttttgcaaaaaaaa

SEQ ID NO: 417 - DNA, 10923 bp, HOMO SAPIENS
attcatttcctgagaactgcagagagccgctgagaggctctgcgtgtgcgtgtgcgcgggtgacgccgtgtgtgtgcgagtgtgtgtgtgtgtgtgcgcgcgcgcgtgtgagagagagaaagggagagagagagggggactctgtgtgagggaaagaaaacaatttctcctgctctgcagcttctgttcaggatcaatgtgactctaagaacaaatggatgaatgaatatccatatgaagagaaaaacaataaagaatatcaacacctttgagaacagaatgttaatgcttgatgggatgccggcagtcagagtcaaaacagagcttttggaatctgaacaagggtctccaaacgtccacaactatcccgatatggaagccgttcccctgttgctaaataatgtgaaaggggagcccccggaggactcgttatctgtagatcacttccaaacacaaactgagccagtggacttgtcaataaacaaagccaggacgtcccctactgccgtttcatcctccccagtttccatgacagcatctgcctcctcaccttcttcaacttcaacctcttcatcgtcttctagtcgtctagcctcatccccaactgttatcacatcagtatcttcagcgtcatcttcgtcaacagtattaactccagggccccttgtggcctctgcatctggtgttggaggccagcagtttttgcacattatccatcccgtaccgccttcaagtcccatgaatttacagtctaacaaactgagtcatgttcaccgcatccccgtggtggtacagtcggtgcctgttgtctacacagctgtaaggtcacctggaaatgtgaacaacactattgtcgtgccgcttttggaggatgggagaggccatggcaaagcacaaatggacccccgaggcctatctcccagacaaagtaaaagtgacagtgatgatgatgacctgccaaatgtgaccttagatagcgttaatgaaactggatctacggccctttccatagccagagcagtacaagaggtacatccgtccccagtatcaagggtccggggcaatcgaatgaataatcaaaagtttccttgttcaatttcaccatttagtattgagagcacaagacgccagagacggtctgaatccccagactccagaaaacggcgtatccacagatgtgattttgagggatgcaacaaagtgtacacaaaaagttctcacctgaaggctcaccggaggacacatacaggagagaaaccttacaagtgtacctgggaaggctgcacctggaagttcgctcgttcagatgaactgacgaggcattaccgcaaacatacgggagtgaagccattcaagtgcgcggactgtgatcgcagcttttcccggtcagatcatttggccctgcaccgccggaggcatatgttggtgtgaggaatgctacctgtccagctgagcgtaagagctggatctcttagcggcacccaattcagcagggctgaatccccttcacagtgttaacacaaaagggcatcaccatcccacgatgtctgaaaccagagcaggaaaaagaaggcacacttcttttggtctgaaggtaacccccatcatgactagacgagaaccgtctttacccgggcctgggagctcagtgacataaatgctgaagagacaggcattgttttccgtgctgtgtcctctgccatttaaagatgtttgtagcttgtacattttctgagctgtcagacattttgttattgataccttaaaggtcacctaccacaaattgatggctagagcaagaccttttaaatttggatgaatctcccatcatcccatcccttaacccctttttacagaaattttagttacaatctgagtaagctagaacacacatccaatctgttaccagcaagcagcatgaaagtagaaacgaagaagcagatggagaggtcccattacctgcaaagaaagggcactcaggcagccctttgcaatcgcgatggcagccactagatatcactctcaacttgtcattctgccatgccctgaagaaaaccaacattgaatctttcatttgtttgtcgttgattgtttttgttttgtttcgattctgttttgttcatctgttcgagcagaggggcagttgaagtctcgtcctggtctctgccctggcatggactggcacagaggtgttctgtagttgaataggaagagcctgtctaaaaaactactgccccacttcaaattgcagtgttctgtcacctaggcatcatctcttcctgcccctagtatttgattacaaggaaccaggggaaaaaaactttcttagacacactggcaccaaggtaagaggtggggctgcccaggcaaagtcagtgaacatgaaaactcagacaaagcagagatggaaataatgcgcctcttgaggagaaaagcaataatgaataaaaggactttcctacaataacttcactgaggactcacgttaccaattttcatacttactaaagggattgtaaaaaacaccccagcattttaggtgtcttggttccatttacagcactgaggtaatctttctgctgtttgttgtcctgcttggttgagtaccacaattaaagattatgctccccttttcttgtttgaaaacagttatttggtgactagaaaggcaagggaggcatagccgggaattaactcttcggttaatgggtcagttctccttggaactgaatcagtggaaagagaatgcttcccatagaaagcccgacatggtgctagtttcctctcttggagagccaaggataagtgactctccaataggttcttctataccgatttcattttctaaactgtatcaggacccaggtgtcctgcattggcatctgcagggatattgaacccactcatcctgtgcagaggatgagaggaaggtgttagttccatcagccccataaaattatgaacctttttgcaactaggaacatatacagtaaacaagcaatacatcaccaacgagcattctttcagaaaaattaccatatttttgtccccaccacaagctgggtttttttccagctttctgtggctgaggggctggtgagattttttgttgttattgttgttgttgctagaattttttatagcttagatataaaaggtctccaacaaagacctttgcaatatattttaattacaaacacttgattttgggaattgcacatattaacctcacaatattactagctcatttttaaatgtctggacattctgaaataatttccggttacagaattaccctttttaggatcatcttctaattcagataatcttattctgatgaagcgagaactatgaacgttgaaacaaggacaatttgtgttggatggtattcaaaaggaattttttaaaacattaagcaacagtgtaatgattttcaggtcaaattatggcttcacaaatatgtgctctatattgtctgccaggtctcaaaaattcatcaagcaatttccctccaacaagggctgcagttctagtgataaatagcatctttagctgcacagtctactactcatcaaccagtgggttttttttagcacctggaaagtttttttgtactatatgcaactcctacttcacattgcctgtgaccattcagaatagaaaaaggtctgttgatgcatgccagtgctggttactagtcagtgacagagaacacagagagggacaaacacagccatgaaccccctggcactagtaccagcacctagttggcaagtagtgggtgcatctctcaagtgaagtgtagatttgtatttagtcctgcttgctctcataaaaagagccagttcttttctctgctgaaagatgtcttgagagtattacaggtagacttggtttttagaattcataaaactgacaggcaggggaatcttcctgagtgacagcttggtttaaatttagcacagaactagatgagttgcacttttctaataacataggatggatttggggaagggaacattttccctcatcctctgaaagtggaaaccagactgagatggtaagttaactgataaaacctgtcagcattccatcattttccccttttgacgtatcagtacttctaagaagggatctaagcacaattaagtgaattgagtccctggtctagcctcaggaactgaaacttctttggggcttgtcttgagacgtggcaaattctccttggtgagttttctaaaagtatttccccatggaaaggagaaagtggtttgggacagaaagaaatggaatgtcttcagtcatggaagagcctccatttcatctcatgtccatttctagcctctttcaaaaagcacagtgcatcatgagcaacagaaaagcagtagaatcctaaaggacataacagttgttccgtaactagaagcattctttgattttaaatttgaagctgttcagtttgcagctggggatatgtgcatggttgggaacttatacacatagagccattaactacttaagcagctgcagtagacctgattttctgtttgcagtatagagattgatttcaagggagttacattatttgaaaagttatgactttcagcctttgaggttttaagaatcccttttcatggtctgatcttaagttgtttgaaaaaagattcacgcttctgcatccacctctgccctcattctgtcaattgtgtgtggactctgagaagcctgcttgataacttgtcttaagttctattaaggcagttagactgagatttctaatgacttcaccataaagattatacttctgcctggcgtcgtttctataaaacactataggacatttgttttcaaaagcagttgagtaacagcaacataaaccacattttttaaaaaaatgagcacttttcattcacttgaaagcttaagtgggaaaaaggaagatgattgtcaggggaaaaacttacaaaatgctacagtgtttacaaatgccagttccaggtgattagaaaggccgttttcattatggttcagatttggaatagcttatgcaaagattgtgttcatttttatacaattctttttaactttaaattgccatctgtgttttaaacataattctgcactttggaatcagttcattagaatgataacatttatatggataaagatgcagtattccttattctgtacttgatttattatacttaccaaagctgcaactgaataaatctggtgaggtgaggccttcaaaatgtattaatacgcctttgttatgttgttatgactgcttagaaatgtagccatgatgttgttctaaagatgtcttaacatttatagtgaggattgacagaaattaagcagtgttaagaataccagcatccatgttacagtctgcgtataagggactgaatgtgaggtaactcttatgaatcataataggcccagaaagccttaatattcatagttcataatccagtctcagattttgctcttcaatgttgcctgtaaacttagcaggtaaatgtattctagtataaaacatcattgaccaaatctcttcctttagtttttctgaggtagtgcatcccattaaaaaagtctcttcaattagatttggctttagtttagaaaggggtttggtaagtcatgtcttccatatgacatttctactcatccccacactgccttccacttaacctgtacagacagccccaacacatgcacatgtgtgtacacaactgtatatgcagcagccagtgggctaacaaatatcagcaaagaacttttttaaaaagaatttgtaataatccgtgctgtctagaaatgtgagttacttaccttattaggaaaccggcttataatactatatatgactctgcctgcattttatagttaagaaatgtacataaaaattgctatattttcacagtttcattataatgtctgtttagtaacccatgtccactgatactttaaatatgctaattactgagcaattgcaatagaaatccagattttcataagaaaatgaaatagaaggatactgcatctttaaaaaatagagtgaagatattttactgtattcgtaacatatgtgatagtggaaaaagtattttcaaactcacaaattttacagaggttgtaaatagtttgatgaagtatgttgggaaagagagcttctagttttcatcacaataaaaagaaaaaacttgttcagatatgccttgtatatcttacacacaatgagtgaaattgccatgggaactctgtccaactttgtcagagcatgctcttcgtgttctgttcaaaatagagtggccacttgtcatggtttagccaggatggtttaaaatataatgaagtcattttaagttgcagacaactgattccaaactagtaatgtcttttcctgaaaagggcaaaacagctgcacaggattttgcttgtactaaagaggagcatcttacaattgttctcttttctcagttatctccctcctcaacagagtgtgaacaaccatacaggtgtttattcttgttttattccagggagactgcttttaggtataactacatgttgacaagattaagtgctgtggatatggccacgtgttaaaggaatctatactcgcaataggaataagctaatgcccattttcagaaataaattaaatgctgaaagtgcctgtcagtaaaccttatgaccaatgagatattcctatacttttacacagcaataattcttaataagactgggttttttcctgcacatgtgaacacacacacacatacacacagagagagtaaatacatacacatagtaaatcaaatctgttcacatgcccacaaaaaacgcttttatagctttcaaatatacctaatcttgtttacattaacatttcttaatttgatctttctaacttgcagaacgttaagaacacaaatctgaacattaagtttatcttcagtgaacactattgcatatggtaattataatttccagataaaaagttgactgtcatttgccccaaacttatgaaacagtatgtatgattcaaaaagttttgctcagttaaaaacaccaatttatttggcgcaaaagactgaaggatatttgtttgcttgttcattttatccactcatatcaaacgcacaaattcatctttacatttcttcattcccctttcccctaatatttcctattatcatcttaagaatcattttggaatgaatattgacagaatcatttctccccaaaaagtctgttgaagtaccactgacacttagtaagcctagcctttaaccatctttgcagttagtcctaaaaattaccagatgcacattcagaagctcacaggttttttcctgtaattactgtactgctaaaagtggagtcatggatagaaatatacaatgagactatatgaatagacatgaaccctggaaattctccaaccctgccatctcagagcacaaattcacccaaacaagctactgaggctatcagtaaaattatactcatggagagtcacacatcgggtaagggcaattttaaaagtaggactgtgattaaacattcaggctttagacttccatgatggactcagaccacaggcctcaaaaaaacatccactgttttctcctcccaatgttagaaagaagaaaagggagacggaaatgtaccaggataagggggtaaaataaccaattaagtgtcaaaggaaagctgctgggttccttaatctcactgaagtcaagtcttctgactgggcttcttaccatgtgttgtctgaaaaaactaaagtaccttgaaaggttacacattcagcaaaccatgaagataatagctattctttattaaacactgtgtgccaagcaatagactaggcaatttttagatacgttacctgcaacctgtacaacatttctacactttatggatgggaaacggagacatgggaagtgtggctgagttgttcatggatgtagaaatagtaaacggcagagtaggaaagtgaaaccgcctatctctgacctggaggtctgcctgtatctttcccactccaccacactgcacgtgggtgtcccgaaaccaccttcccagattcctgactctcagtaattttattatggacaacatgcatgagtagtcatcatatttttcaagtgaaatatcgggacatgatataacacatgacttaacaatggtactgaatatttgaaatcaggcctttcccggaaaatcatgcatgaaggatcattataaacaaacaatagcaaccagttgtctccccgaacttgtcacttttctcataaatgtctggcctggagctccaaaatcatccaaatacttagtagcattttagcctgagtacactttctcagttcctcaactctttgtatacctttccaccaatatagacattctagaatctgcttcagatgcatttgaaattttcacccccatggaactagtgattaatatcagagcccactcttgcagttggtaatggggtggcaatcaaacgttcagatgatgataaaggagagataatggataattctttttcagagttctcacttaacagctctgttgtggaatgttttaaatagtcttataaataatttgtttatagtattgttgttagtttaattgaattttatgtaagaagctgtccaacatcagagaaatgaaattcctcccactttctgtgtagaacaaggtctctgacagtattgattcatggaagtactaatggacttagaaaacattaagagaatgtcatttctcatagtgtttctgtttctgaaaatgaatctcctgaattattatctttctccctgttacttggctggggaaagagatagaagctgtataaacaaattctcttccatgctcaaagcaagtgttccatgtgcacaacctgctgcagactggggcccttctcagttaattgggtttcacaagcaataatttctccacaacaaaaaccacaacttgaagtgagttgaaaagagatcaatagtggaaacagtcgcctcagtactttttctttctggatttcatctctagaaatttgaagtgtttgagacagagtccaccctttgtgcaaggcgagaaccaatgaatggactccttgtgtgaattattgcatcttcttccaaagcaggttcatcaagactttcacagagattcatttttgttgagaagtaagggttaataggaggatagaatttggatccaaatctagtgataaaagtgtccaagcaatcaaaaagtaagatattttagggacataccaacatcttccctttctgctaatttcatgctccaaagatatggcaaaaaaaaaaatcataaaaagtgcttttgccctacttgtgttctagttttcccatggcagaattttgtaattacatccagaatatagtgtatattttgttcctcaaactttattacattggatggatattgttgaactggggcactggtgcctatattcaaggctctttcctatcaacgtgtctgtccacgatttgttgtgtttaaagcttcattttgaaaaatcactgtccccctgtggggtagtgactgtattgttttgttcatgtctatgtgggacacattgcatcacatggcaaaccaactctctgtggatgtgagataagtacttataaaaccagcttgaaaacatcgtcttatgtattatgtcatcctgcatcataatgcaattatgtgtatcataacatgctcatttaaaaaaagagaaaccagcaaattcatgtttgtccatagaagaatgtactcagaactttgtgttgtgaaacgatgagaacagaccacctttaagatacccacctgccacttaaaatgacttagttataattagtagtagtctagacgttgttcttggtgtgtgggggtcaattctaacgtcatgttcttttgaataaatctctcagtcatatttgaaaaaaaaatacatgggaataaagaaaaatatcatctttggccaaatcaagcaggcatcttttttcttttccttgacgtttagctcattatacgtggtgattggatcacgagatctgtccgtgtgaaaatacagaaacatcctttagtttacaaaacagttattctaggcttgaagcctctgaacagcaaattgaatagatgggctgcatctgatttgctttatggatgtaattttacaaaacactcttgggtctctgaccccagggagttaagagtgcccagaggaggtcctacacattaaaggataaagccccccagtgatgctggcaagcaaatgtgttgagttcttaaatcttcatttggttttctgttcaggattttaattgcaaatgaatttatttctccagtttatctaaagacctaatttcccaatagtttcctctgcatttatatactctgtagtgtttaggcaaccctgttataagtttattaatattatgtaagtgttgttcttgtatttatgtatagtgtatgtattgtaaatatactcagagcttttttccttttactgtaaaatggtgatttttttgccctatgataatgtaaagggagaccctcctaatgagattctctcagaggatgattattccagtctattctcagagatttaaatgaacaagtgttattgtttttaatggtgtctcagacatattctgttggtgcattgcttttctgtattcaactttcctatgaattgagctgtgaactgaaatagagtttaaacctttaactgtatgcatttgtataattatctgaatgaaggcatgaaggttaaataaagcattttgtatggaacaaaactccctaactgactcagacactttggaaatcatagttattaaccattctaattaaacctttgttatgaaaagttttaaaaaaaaaaaaaaa

SEQ ID NO: 418 - DNA, 6202 bp, HOMO SAPIENS
gaattccggcgtcgcggacgcatcccagtctgggcgggacgctcggccgcggcgaggcgggcaagcctggcagggcagagggagccccggctccgaggttgctcttcgcccccgaggatcagtcttggccccaaagcgcgacgcacaaatccacataacctgaggaccatggatgctgatgagggtcaagacatgtcccaagtttcagggaaggaaagcccccctgtaagcgatactccagatgagggcgatgagcccatgccgatccccgaggacctctccaccacctcgggaggacagcaaagctccaagagtgacagagtcgtggccagtaatgttaaagtagagactcagagtgatgaagagaatgggcgtgcctgtgaaatgaatggggaagaatgtgcggaggatttacgaatgcttgatgcctcgggagagaaaatgaatggctcccacagggaccaaggcagctcggctttgtcgggagttggaggcattcgacttcctaacggaaaactaaagtgtgatatctgtgggatcatttgcatcgggcccaatgtgctcatggttcacaaaagaagccacactggagaacggcccttccagtgcaatcagtgcggggcctcattcacccagaagggcaacctgctccggcacatcaagctgcattccggggagaagcccttcaaatgccacctctgcaactacgcctgccgccggagggacgccctcactggccacctgaggacgcactccgttggtaaacctcacaaatgtggatattgtggccgaagctataaacagcgaagctctttagaggaacataaagagcgctgccacaactacttggaaagcatgggccttccgggcacactgtacccagtcattaaagaagaaactaatcacagtgaaatggcagaagacctgtgcaagataggatcagagagatctctcgtgctggacagactagcaagtaacgtcgccaaacgtaagagctctatgcctcagaaatttcttggggacaagggcctgtccgacacgccctacgacagcagcgccagctacgagaaggagaacgaaatgatgaagtcccacgtgatggaccaagccatcaacaacgccatcaactacctgggggccgagtccctgcgcccgctggtgcagacgcccccgggcggttccgaggtggtcccggtcatcagcccgatgtaccagctgcacaagccgctcgcggagggcaccccgcgctccaaccactcggcccaggacagcgccgtggagaacctgctgctgctctccaaggccaagttggtgccctcggagcgcgaggcgtccccgagcaacagctgccaagactccacggacaccgagagcaacaacgaggagcagcgcagcggtctcatctacctgaccaaccacatcgccccgcacgcgcgcaacgggctgtcgctcaaggaggagcaccgcgcctacgacctgctgcgcgccgcctccgagaactcgcaggacgcgctccgcgtggtcagcaccagcggggagcagatgaaggtgtacaagtgcgaacactgccgggtgctcttcctggatcacgtcatgtacaccatccacatgggctgccacggcttccgtgatccttttgagtgcaacatgtgcggctaccacagccaggaccggtacgagttctcgtcgcacataacgcgaggggagcaccgcttccacatgagctaaagccctcccgcgcccccaccccagaccccgagccaccccaggaaaagcacaaggactgccgccttctcgctcccgccagcagcatagactggactggaccagacaatgttgtgtttggatttgtaactgttttttgttttttgtttgagttggttgattggggtttgatttgcttttgaaaagatttttatttttagaggcagggctgcattgggagcatccagaactgctaccttcctagatgtttccccagaccgctggctgagattccctcacctgtcgcttcctagaatccccttctccaaacgattagtctaaattttcagagagaaatagataaaacacgccacagcctgggaaggagcgtgctctaccctgtgctaagcacggggttcgcgcaccaggtgtctttttccagtccccagaagcagagagcacagcccctgctgtgtgggtctgcaggtgagcagacaggacaggtgtgccgccacccaagtgccaagacacagcagggccaacaacctgtgcccaggccagcttcgagctacatgcatctagggcggagaggctgcacttgtgagagaaaatactatttcaagtcatattctgcgtaggaaaatgaattggttggggaaagtcgtgtctgtcagactgccctgggtggagggagacgccgggctagagcctttgggatcgtcctggattcactggctttgcggaggctgctcagatggcctgagcctcccgaggcttgctgccccgtaggaggagactgtcttcccgtgggcatatctggggagccctgttccccgctttttcactcccatacctttaatggcccccaaaatctgtcactacaatttaaacaccagtcccgaaatttggatcttctttctttttgaatctctcaaacggcaacattcctcagaaaccaaagctttatttcaaatctcttccttccctggctggttccatctagtaccagaggcctcttttcctgaagaaatccaatcctagccctcattttaattatgtacatctgtttgtagccacaagcctgaatttctcagtgttggtaagtttctttacctaccctcactatatattattctcgttttaaaacccataaaggagtgatttagaacagtcattaattttcaactcaatgaaatatgtgaagcccagcatctctgttgctaacacacagagctcacctgtttgaaaccaagctttcaaacatgttgaagctctttactgtaaaggcaagccagcatgtgtgtccacacatacataggatggctggctctgcacctgtaggatattggaatgcacagggcaattgagggactgagccagaccttcggagagtaatgccaccagatcccctaggaaagaggaggcaaatggcactgcaggtgagaaccccgcccatccgtgctatgacatggaggcactgaagcccgaggaaggtgtgtggagattctaatcccaacaagcaagggtctccttcaagattaatgctatcaatcattaaggtcattactctcaaccacctaggcaatgaagaatataccatttcaaatatttacagtacttgtcttcaccaacactgtcccaaggtgaaatgaagcaacagagaggaaattgtacataagtacctcagcatttaatccaaacaggggttcttagtctcagcactatgacattttgggctgactacttatttgttaggcgggagctctcctgtgcattgtaggataattagcagtatccctggtggctacccaatagacgccagtagcaccccgaattgacaacccaaactctccagacatcaccaactgtcccctgcgaggagaaatcactcctgggggagaaccactgacccaaatgaattctaaaccaatcaaatgtctgggaagccctccaagaaaaaaaatagaaaagcacttgaagaatattcccaatattcccggtcagcagtatcaaggctgacttgtgttcatgtggagtcattataaattctataaatcaattattccccttcggtcttaaaaatatatttcctcataaacatttgagttttgttgaaaagatggagtttacaaagataccattcttgagtcatggatttctctgctcacagaagggtgtggcatttggaaacgggaataaacaaaattgctgcaccaatgcactgagtgaaggaagagagacagaggatcaagggctttagacagcactccttcaatatgcaatcacagagaaagatgcgccttatccaagttaatatctctaaggtgagagccttcttagagtcagtttgttgcaaatttcacctactctgttcttttccatccatccccctgagtcagttggttgaagggagttattttttcaagtggaattcaaacaaagctcaaaccagaactgtaaatagtgattgcaggaattcttttctaaactgctttgccctttcctctcactgccttttatagccaatataaatgtctctttgcacaccttttgttgtggttttatattgtaacaccatttttctttgaaactattgtatttaaagtaaggtttcatattatgtcagcaagtaattaacttatgtttaaaaggtggccatatcatgtaccaaaagttgctgaagtttctcttctagctggtaaagtaggagtttgcatgacttcacactttttttgcgtagtttcttctgttgtatgatggcgtgagtgtgtgtcttgggtaccgctgtgtactactgtgtgcctagattccatgcactctcgttgtgtttgaagtaaatattggagaccggagggtaacaggttggcctgttgattacagctagtaatcgctgtgtcttgttccgccccctccctgacaccccagcttcccaggatgtggaaagcctggatctcagctccttgccccatatcccttctgtaatttgtacctaaagagtgtgattatcctaattcaagagtcactaaaactcatcacattatcattgcatatcagcaaagggtaaagtcctagcaccaattgcttcacataccagcatgttccatttccaatttagaattagccacataataaaatcttagaatcttccttgagaaagagctgcctgagatgtagttttgttatatggttccccaccgaccatttttgtgcttttttcttgttttgttttgttttgactgcactgtgagttttgtagtgtcctcttcttgccaaaacaaacgcgagatgaactggacttatgtagacaaatcgtgatgccagtgtatccttcctttcttcagttccagcaataatgaatggtcaacttttttaaaatctagatctctctcattcatttcaatgtatttttactttaagatgaaccaaaattattagacttatttaagatgtacaggcatcagaaaaaagaagcacataatgcttttggtgcgatggcactcactgtgaacatgtgtaaccacatattaatatgcaatattgtttccaatactttctaatacagttttttataatgttgtgtgtggtgattgttcaggtcgaatctgttgtatccagtacagctttaggtcttcagctgcccttctggcgagtacatgcacaggattgtaaatgagaaatgcagtcatatttccagtctgcctctatgatgatgttaaattattgctgtttagctgtgaacaagggatgtaccactggaggaatagagtatccttttgtacacattttgaaatgcttcttctgtagtgatagaacaaataaatgcaacgaatactctgtctgccctatcccgtgaagtccacactggcgtaagagaaggcccagcagagcaggaatctgcctagactttctcccaatgagatcccaatatgagagggagaagagatgggcctcaggacagctgcaataccacttgggaacacatgtggtgtcttgatgtggccagcgcagcagttcagcacaacgtacctcccatctacaacagtgctggacgtgggaattctaagtcccagtcttgagggtgggtggagatggagggcaacaagagatacatttccagttctccactgcagcatgcttcagtcattctgtgagtggccgggcccagggccctcacaatttcactaccttgtcttttacatagtcataagaattatcctcaacatagccttttgacgctgtaaatcttgagtattcatttacccttttctgatctcctggaaacagctgcctgcctgcattgcacttctcttcccgaggagtggggtaaatttaaaagtcaagttatagtttggatgttagtatagaattttgaaattgggaattaaaaatcaggactggggactgggagaccaaaaatttctgatcccatttctgatggatgtgtcacaccttttctgtcaaaataaaatgtcttggaggttatgactccttggtgaaa

SEQ ID NO: 419 - DNA, 910 bp, HOMO SAPIENS
ctcctcgccttcctccggctcagccgccgcgccgccgggctgctccttcttcctcctcgggcgcccgcggcgatgttcaaccgcgccgtgagccggctgagcaggaagcggccgccgtcagacatccacgacagcgatggcagttccagcagcagccaccagagcctcaagagcacagccaaatgggcggcatccctggagaatctgctggaagacccagaaggcgtgaaaagatttagggaatttttaaaaaaggaattcagtgaagaaaatgttttgttttggctagcatgtgaagattttaagaaaatgcaagataagacgcagatgcaggaaaaggcaaaggagatctacatgacctttctgtccagcaaggcctcatcacaggtcaacgtggaggggcagtctcggctcaacgagaagatcctggaagaaccgcaccctctgatgttccagaaactccaggaccagatctttaatctcatgaagtacgacagctacagccgcttcttaaagtctgacttgtttttaaaacacaagcgaaccgaggaagaggaagaagatttgcctgatgctcaaactgcagctaaaagagcttccagaatttataacacatgagcccccaaaaagccgggactggcagctttaagaagcaaaggaatttcctctcaggaccgtgccgggtttatcattgctttgttatttgtaaggactgaaatgtacaaaacccttcaatgggatgtgtgttttattaactgcttcaccagtaaattttgcatgatggctaagctaacataaaaaaagaataataataacttggaagttttagtttacaaaacagagattccttcaacactggacacgtcgagcattttgtagcttaattaaacctcatgtaaggccaaaaaaa

SEQ ID NO: 420 - DNA, 1388 bp, HOMO SAPIENS
ctggccaccaagcgcctccgtggacacgcacttcctgcgaggcctccgtgcgcaccttggccgagccgaaccgagccgagtcctgtccttccaggccgttcgcaatggtggatgagttggtgctgctgctgcacgcgctcctgatgcggcaccgcgccctgagcatcgagaacagccagctcatggaacagctgcggctgctggtgtgcgagagggccagcctgctgcgccaggtacgtccgccgagctgcccggtgcccttccccgaaacgtttaatggcgagagctcccggctccccgagtttatcgtgcagacggcgtcttacatgctcgtgaacgagaaccgattctgcaacgacgccatgaaggtggcattcctaatcagcctcctcaccggggaagccgaggagtgggtggtgccctacatcgagatggatagccccatcctaggtgattaccgggccttcctcgatgagatgaaacagtgctttggctgggatgacgacgaagacgacgacgacgaagaagaggaggatgattattaggccctcgaccctcgggcctcgggggggagggccctgcacgccgccaccccctccccgcagccctcaccccgccaggagccactgctctcccccttgccctccggtccccttacctacccgcgcccgtctgctctctctcttcatttctccgtagtgcttgtctttgttccaggaatagcgctccagttacctgctgctggggtcggggctggagcctcactcactcggaagtgcttggaagtgtcatctaccctggccatccccgggatccctcccctgctaatctgaactgtgtcctgaaccccagctattggccaggcccctgttacaaactgcgcagaccacccatagccctgctgctgccacctgccctgctgccaggcttacatcttcccagagaactatgctgccacttcacatccactcaccacatcccacctacagactaccacctttcgagatcaggaccaacctggaaaatgccagagttggctatgccttttcagacattgatttggacagctcaccaacccctgaaggggccgttcagcctggttagttttctacctactccgagtgtcctcccctgccccaccagattgctgcaggggcgcggtgtgcctggcagccaaattgttgacacttcttttttcctatgcactggttttacacagctgtcatttttctttcaaaattgcagcagtcccacagatgtgtgcatttggacaaatagtacttaaaaacaaaacaaacaagcactcagcccagctcctcaatactacctggaaaaagcattggcattattttcaataaatatcaagcactaaaaaaagaaaaaaaaaa

SEQ ID NO: 421 - DNA, 387 bp, HOMO SAPIENS
gcccagctactattcttattattcccaaatgccaccccaccatatttctaaaaactcccaaagaaagattctactttgcccagtttgtcctcaattgagcagttttgtctaagcccagagtttctgctgggccagagtatggatgagctgtctctccctggctggtgcccatgcctgcctgtagcctgggagggggagtggcgcccagggtcaggtggaacaaaacatgactgcctagggctgcctctgtctccatctcactgatcgcaaatcacagctcagacagccagctcttaagtgagacctgagtgccagagaggggtggatacaaggccaacagttactaaatgaatgaaaattgtgattccgatgaagcctgccagagaa

SEQ ID NO: 422 - DNA, 3475 bp, HOMO SAPIENS
gaggaggtcggctttgttctcgccccgccctctccccgcctcctccctagatatcgcgagagggcgggtccgcttggcttcggcgtcgcgtcgctcctgcgctggagctctaggccggcgtctctccgcgagccgcgggtcaagtggcagtggctaagggtgcgcgagtagccgccacccgttcggcgttggctctggcgtcggggtcgttgtgtcgtgacaaccgctgcggtagccgtttccgaggcagcagttgcggccgctttagccctgagcgggatctgcggctgcctgcgagtctctgctgtgccgacccttctcttcgcggaccccacgccaagcagcgaccctgagccgacagccggagcgcccggcaatggcggcctcgacggcctcgcaccggcccatcaaggggatcttgaagaacaagacctctacgacttcctctatggtggcgtcggccgaacagccccgcgggaatgtcgacgaggagctgagcaaaaaatcccagaagtgggatgaaatgaacatcttggcgacgtatcatccagcagacaaagactatggtttaatgaaaatagatgaaccaagcactccttaccatagtatgatgggggatgatgaagatgcctgtagtgacaccgaggccactgaagccatggcgccagacatcttagccaggaaattagctgcagctgaaggcttggagccaaagtatcggattcaggaacaagaaagcagtggagaggaggatagtgacctctcacctgaagaacgagaaaaaaagcgacaatttgaaatgaaaaggaagcttcactacaatgaaggactcaatatcaaactagccagacaattaatttcaaaagacctacatgatgatgatgaagatgaagaaatgttagagactgcagatggagaaagcatgaatacggaagaatcaaatcaaggatctactccaagtgaccaacagcaaaacaaattacgaagttcatagacgagatttgttcaacactgcaattgtttgttagatgtaaaccctgtgactatagtacgttgcttcttgttcttcacaattcatgacttaagtaccaaaatgcataccagttattatatattgccaagaattaaatgataaacttagagactgattagactgaaaatgcctaatcgatatatatattcttgtgcctagtactttaccacaaatacagtgtaatatcatcagtccaaaactgcattacttttgtaaaaacactggttaatttgtataagatattatagagctttttatgctttagaagttaaacaatatctttgggggggaactaatttattttcatcacttgaaatgtggtagctcttacaaagtttattgatttgatttttttaaaaatcaaaagccaattgaacaacaggatatatagactgataaatatttaggctgaatagtattttaacacttgtcttcaacttgatttgtctgtttaattgaaaagaattataagagttactgttgcattttctgacctactatttttaaaattcctgttgagtttctttgtgtttacaaggaaaggactgaactttttctcatcaaaactagcttttttccccacaaataaattatcaggttaaactttcaccaatgtctgctctgttttttgtttttggggggttttttgtttgtttttgttttttaatgtttttggtacactgggcagacttcagagcagttttttaaaaaaataaatattctaatgtagctatctcgccattccctttaaatacctgtcttaacctcctgcttttctttcctactcctttccacacatacgcacacaatcttctaccttttaaaggatcattaagactgtcaccacattaggagctctttctctcactcttctgtcatttgctgctatgttgaaattcttattttgaccatcaatgcctatgaattcttctaatacgtgaagaaaatagtttgagtagcagcagtgctataggtgggaaatacagtttagctgctgaatttctatacctctctgatttacagattgctaattaaatggctattattagtttggattaattagacttaagaaaacaactaactgagggttttttttgtttgttttttgagggttttctttgcatgagagttgtatgtaaccagtgatatgattattcctgaatgtacagacagaagtaagcctggacattgttaaatagtccctgctttaagggactacgataatgtgtactatgacaaacgtgctttattcttctaacgcagtaagaattaggtggaattttttccttcaaccaagtgcaggaaagccctgtgtgtcttggtttagttatggtttcatttctagccatacaattgatgaattgtgtacaacttttgttagtaccaaaataatctgttatatgaacagacttctaaaataacgtctgtatattttatatatagatacatatatgaaagaaggcttttattgaacagcttatcttccacttgcaggtttatggaaacagcagtatttgaaaataaataaaaagtgggagaattccttgctgttagaagaatgtggccattattttgattttttgaatgagatatataatcaaagtactgctgaactgtgagtgcagtattctaaacatttcagctaggaataccactgatttagaaacaaaactgtttgtctctggtttctgaatttaaaatgttgggattacctgtttaaatctgtcttgggggatgtagagattaagtctgtacatgtgcgtgcacatatattcatgcaccctctgattttggttttcttgtttctgagttcttagaaagtacccacatactcttttttttttttttgtagaagtagctgtcatagagtgaagaaaaggataagactttaaacagttgattctttttgtgttttctacaaactattttttgaaatttaaatcacaaactcattttctggtttttagaaagtagatgatgatttcagaggagtaaggcatgccaagcagcatgctcagtggggttttaggctgtcacatgcagctgagaaaaggtatgttcaagtcataagtaggtaattgatagggtatgaactagtcaaaatatgaaccattatgattcaagttagattttcctctggagagacagatctgaatgttcagttctagccaaggtagattttactttcaactttttaatcagtatcactttctgtgcttaactatttggtgttaccttgtctgttttcatttgtctaaaattctgcagagatgactaaaatttgacataatggtgtaaatggattgttaaggtaactttcagttgaagattaaagcaagatgccattttccccatgactttggttttgtttacatttttccctttcagttagtatacactacacgtactgtaataaaatacaataatatgacaaaaaaaaaa

SEQ ID NO: 423 - DNA, 10083 bp, HOMO SAPIENS
ctgcggggcgctgttgctgtggctgagatttggccgccgcctcccccacccggcctgcgccctccctctccctcggcgcccgcccgcccgctcgcggcccgcgctcgctcctctccctcgcagccggcagggcccccgacccccgtccgggccctcgccggcccggccgcccgtgcccggggctgttttcgcgagcaggtgaaaatggctgagaacttgctggacggaccgcccaaccccaaaagagccaaactcagctcgcccggtttctcggcgaatgacagcacagattttggatcattgtttgacttggaaaatgatcttcctgatgagctgatacccaatggaggagaattaggccttttaaacagtgggaaccttgttccagatgctgcttccaaacataaacaactgtcggagcttctacgaggaggcagcggctctagtatcaacccaggaataggaaatgtgagcgccagcagccccgtgcagcagggcctgggtggccaggctcaagggcagccgaacagtgctaacatggccagcctcagtgccatgggcaagagccctctgagccagggagattcttcagcccccagcctgcctaaacaggcagccagcacctctgggcccacccccgctgcctcccaagcactgaatccgcaagcacaaaagcaagtggggctggcgactagcagccctgccacgtcacagactggacctggtatctgcatgaatgctaactttaaccagacccacccaggcctcctcaatagtaactctggccatagcttaattaatcaggcttcacaagggcaggcgcaagtcatgaatggatctcttggggctgctggcagaggaaggggagctggaatgccgtaccctactccagccatgcagggcgcctcgagcagcgtgctggctgagaccctaacgcaggtttccccgcaaatgactggtcacgcgggactgaacaccgcacaggcaggaggcatggccaagatgggaataactgggaacacaagtccatttggacagccctttagtcaagctggagggcagccaatgggagccactggagtgaacccccagttagccagcaaacagagcatggtcaacagtttgcccaccttccctacagatatcaagaatacttcagtcaccaacgtgccaaatatgtctcagatgcaaacatcagtgggaattgtacccacacaagcaattgcaacaggccccactgcagatcctgaaaaacgcaaactgatacagcagcagctggttctactgcttcatgctcataagtgtcagagacgagagcaagcaaacggagaggttcgggcctgctcgctcccgcattgtcgaaccatgaaaaacgttttgaatcacatgacgcattgtcaggctgggaaagcctgccaagccatcctggggtctccagctagtggaattcaaaacacaattggttctgttggcacagggcaacagaatgccacttctttaagtaacccaaatcccatagaccccagctccatgcagcgagcctatgctgctctcggactcccctacatgaaccagccccagacgcagctgcagcctcaggttcctggccagcaaccagcacagcctcaaacccaccagcagatgaggactctcaaccccctgggaaataatccaatgaacattccagcaggaggaataacaacagatcagcagcccccaaacttgatttcagaatcagctcttccgacttccctgggggccacaaacccactgatgaacgatggctccaactctggtaacattggaaccctcagcactataccaacagcagctcctccttctagcaccggtgtaaggaaaggctggcacgaacatgtcactcaggacctgcggagccatctagtgcataaactcgtccaagccatcttcccaacacctgatcccgcagctctaaaggatcgccgcatggaaaacctggtagcctatgctaagaaagtggaaggggacatgtacgagtctgccaacagcagggatgaatattatcacttattagcagagaaaatctacaagatacaaaaagaactagaagaaaaacggaggtcgcgtttacataaacaaggcatcttggggaaccagccagccttaccagccccgggggctcagccccctgtgattccacaggcacaacctgtgagacctccaaatggacccctgtccctgccagtgaatcgcatgcaagtttctcaagggatgaattcatttaaccccatgtccttggggaacgtccagttgccacaagcacccatgggacctcgtgcagcctccccaatgaaccactctgtccagatgaacagcatgggctcagtgccagggatggccatttctccttcccgaatgcctcagcctccgaacatgatgggtgcacacaccaacaacatgatggcccaggcgcccgctcagagccagtttctgccacagaaccagttcccgtcatccagcggggcgatgagtgtgggcatggggcagccgccagcccaaacaggcgtgtcacagggacaggtgcctggtgctgctcttcctaaccctctcaacatgctggggcctcaggccagccagctaccttgccctccagtgacacagtcaccactgcacccaacaccgcctcctgcttccacggctgctggcatgccatctctccagcacacgacaccacctgggatgactcctccccagccagcagctcccactcagccatcaactcctgtgtcgtcttccgggcagactcccaccccgactcctggctcagtgcccagtgctacccaaacccagagcacccctacagtccaggcagcagcccaggcccaggtgaccccgcagcctcaaaccccagttcagcccccgtctgtggctacccctcagtcatcgcagcaacagccgacgcctgtgcacgcccagcctcctggcacaccgctttcccaggcagcagccagcattgataacagagtccctaccccctcctcggtggccagcgcagaaaccaattcccagcagccaggacctgacgtacctgtgctggaaatgaagacggagacccaagcagaggacactgagcccgatcctggtgaatccaaaggggagcccaggtctgagatgatggaggaggatttgcaaggagcttcccaagttaaagaagaaacagacatagcagagcagaaatcagaaccaatggaagtggatgaaaagaaacctgaagtgaaagtagaagttaaagaggaagaagagagtagcagtaacggcacagcctctcagtcaacatctccttcgcagccgcgcaaaaaaatctttaaaccagaggagttacgccaggccctcatgccaaccctagaagcactgtatcgacaggacccagagtcattacctttccggcagcctgtagatccccagctcctcggaattccagactattttgacatcgtaaagaatcccatggacctctccaccatcaagcggaagctggacacagggcaataccaagagccctggcagtacgtggacgacgtctggctcatgttcaacaatgcctggctctataatcgcaagacatcccgagtctataagttttgcagtaagcttgcagaggtctttgagcaggaaattgaccctgtcatgcagtcccttggatattgctgtggacgcaagtatgagttttccccacagactttgtgctgctatgggaagcagctgtgtaccattcctcgcgatgctgcctactacagctatcagaataggtatcatttctgtgagaagtgtttcacagagatccagggcgagaatgtgaccctgggtgacgacccttcacagccccagacgacaatttcaaaggatcagtttgaaaagaagaaaaatgataccttagaccccgaacctttcgttgattgcaaggagtgtggccggaagatgcatcagatttgcgttctgcactatgacatcatttggccttcaggttttgtgtgcgacaactgcttgaagaaaactggcagacctcgaaaagaaaacaaattcagtgctaagaggctgcagaccacaagactgggaaaccacttggaagaccgagtgaacaaatttttgcggcgccagaatcaccctgaagccggggaggtttttgtccgagtggtggccagctcagacaagacggtggaggtcaagcccgggatgaagtcacggtttgtggattctggggaaatgtctgaatctttcccatatcgaaccaaagctctgtttgcttttgaggaaattgacggcgtggatgtctgcttttttggaatgcacgtccaagaatacggctctgattgcccccctccaaacacgaggcgtgtgtacatttcttatctggatagtattcatttcttccggccacgttgcctccgcacagccgtttaccatgagatccttattggatatttagagtatgtgaagaaattagggtatgtgacagggcacatctgggcctgtcctccaagtgaaggagatgattacatcttccattgccacccacctgatcaaaaaatacccaagccaaaacgactgcaggagtggtacaaaaagatgctggacaaggcgtttgcagagcggatcatccatgactacaaggatattttcaaacaagcaactgaagacaggctcaccagtgccaaggaactgccctattttgaaggtgatttctggcccaatgtgttagaagagagcattaaggaactagaacaagaagaagaggagaggaaaaaggaagagagcactgcagccagtgaaaccactgagggcagtcagggcgacagcaagaatgccaagaagaagaacaacaagaaaaccaacaagaacaaaagcagcatcagccgcgccaacaagaagaagcccagcatgcccaacgtgtccaatgacctgtcccagaagctgtatgccaccatggagaagcacaaggaggtcttcttcgtgatccacctgcacgctgggcctgtcatcaacaccctgccccccatcgtcgaccccgaccccctgctcagctgtgacctcatggatgggcgcgacgccttcctcaccctcgccagagacaagcactgggagttctcctccttgcgccgctccaagtggtccacgctctgcatgctggtggagctgcacacccagggccaggaccgctttgtctacacctgcaacgagtgcaagcaccacgtggagacgcgctggcactgcactgtgtgcgaggactacgacctctgcatcaactgctataacacgaagagccatgcccataagatggtgaagtgggggctgggcctggatgacgagggcagcagccagggcgagccacagtcaaagagcccccaggagtcacgccggctgagcatccagcgctgcatccagtcgctggtgcacgcgtgccagtgccgcaacgccaactgctcgctgccatcctgccagaagatgaagcgggtggtgcagcacaccaagggctgcaaacgcaagaccaacgggggctgcccggtgtgcaagcagctcatcgccctctgctgctaccacgccaagcactgccaagaaaacaaatgccccgtgcccttctgcctcaacatcaaacacaagctccgccagcagcagatccagcaccgcctgcagcaggcccagctcatgcgccggcggatggccaccatgaacacccgcaacgtgcctcagcagagtctgccttctcctacctcagcaccgcccgggacccccacacagcagcccagcacaccccagacgccgcagccccctgcccagccccaaccctcacccgtgagcatgtcaccagctggcttccccagcgtggcccggactcagccccccaccacggtgtccacagggaagcctaccagccaggtgccggcccccccacccccggcccagccccctcctgcagcggtggaagcggctcggcagatcgagcgtgaggcccagcagcagcagcacctgtaccgggtgaacatcaacaacagcatgcccccaggacgcacgggcatggggaccccggggagccagatggcccccgtgagcctgaatgtgccccgacccaaccaggtgagcgggcccgtcatgcccagcatgcctcccgggcagtggcagcaggcgccccttccccagcagcagcccatgccaggcttgcccaggcctgtgatatccatgcaggcccaggcggccgtggctgggccccggatgcccagcgtgcagccacccaggagcatctcacccagcgctctgcaagacctgctgcggaccctgaagtcgcccagctcccctcagcagcaacagcaggtgctgaacattctcaaatcaaacccgcagctaatggcagctttcatcaaacagcgcacagccaagtacgtggccaatcagcccggcatgcagccccagcctggcctccagtcccagcccggcatgcaaccccagcctggcatgcaccagcagcccagcctgcagaacctgaatgccatgcaggctggcgtgccgcggcccggtgtgcctccacagcagcaggcgatgggaggcctgaacccccagggccaggccttgaacatcatgaacccaggacacaaccccaacatggcgagtatgaatccacagtaccgagaaatgttacggaggcagctgctgcagcagcagcagcaacagcagcagcaacaacagcagcaacagcagcagcagcaagggagtgccggcatggctgggggcatggcggggcacggccagttccagcagcctcaaggacccggaggctacccaccggccatgcagcagcagcagcgcatgcagcagcatctccccctccagggcagctccatgggccagatggcggctcagatgggacagcttggccagatggggcagccggggctgggggcagacagcacccccaacatccagcaagccctgcagcagcggattctgcagcaacagcagatgaagcagcagattgggtccccaggccagccgaaccccatgagcccccagcaacacatgctctcaggacagccacaggcctcgcatctccctggccagcagatcgccacgtcccttagtaaccaggtgcggtctccagcccctgtccagtctccacggccccagtcccagcctccacattccagcccgtcaccacggatacagccccagccttcgccacaccacgtctcaccccagactggttccccccaccccggactcgcagtcaccatggccagctccatagatcagggacacttggggaaccccgaacagagtgcaatgctcccccagctgaacacccccagcaggagtgcgctgtccagcgaactgtccctggtcggggacaccacgggggacacgctagagaagtttgtggagggcttgtagcattgtgagagcatcaccttttccctttcatgttcttggaccttttgtactgaaaatccaggcatctaggttctttttattcctagatggaactgcgacttccgagccatggaagggtggattgatgtttaaagaaacaatacaaagaatatatttttttgttaaaaaccagttgatttaaatatctggtctctctctttggtttttttttggcgggggggtggggggggttcttttttttccgttttgtttttgtttggggggaggggggttttgtttggattctttttgtcgtcattgctggtgactcatgcctttttttaacgggaaaaacaagttcattatattcatattttttatttgtattttcaagactttaaacatttatgtttaaaagtaagaagaaaaataatattcagaactgattcctgaaataatgcaagcttataatgtatcccgataactttgtgatgtttcgggaagatttttttctatagtgaactctgtgggcgtctcccagtattaccctggatgataggaattgactccggcgtgcacacacgtacacacccacacacatctatctatacataatggctgaagccaaacttgtcttgcagatgtagaaattgttgctttgtttctctgataaaactggttttagacaaaaaatagggatgatcactcttagaccatgctaatgttactagagaagaagccttcttttctttcttctatgtgaaacttgaaatgaggaaaagcaattctagtgtaaatcatgcaagcgctctaattcctataaatacgaaactcgagaagattcaatcactgtatagaatggtaaaataccaactcatttcttatatcatattgttaaataaactgtgtgcaacagacaaaaagggtggtccttcttgaattcatgtacatggtattaacacttagtgttcggggttttttgttatgaaaatgctgttttcaacattgtatttggactatgcatgtgttttttccccattgtatataaagtaccgcttaaaattgatataaattactgaggtttttaacatgtattctgttctttaagatccctgtaagaatgtttaaggtttttatttatttatatatattttttgagtctgttctttgtaagacatggttctggttgttcgctcatagcggagaggctggggctgcggttgtggttgtggcggcgtgggtggtggctgggaactgtggcccaggcttagcggccgcccggaggcttttcttcccggagactgaggtgggcgactgaggtgggcggctcagcgttggccccacacattcgaggctcacaggtgattgtcgctcacacagttagggtcgtcagttggtctgaaactgcatttggcccactcctccatcctccctgtccgtcgtagctgccacccccagaggcggcgcttcttcccgtgttcaggcggctccccccccccgtacacgactcccagaatctgaggcagagagtgctccaggctcgcgaggtgctttctgacttccccccaaatcctgccgctgccgcgcagcatgtcccgtgtggcgtttgaggaaatgctgagggacagacaccttggagcaccagctccggtccctgttacagtgagaaaggtcccccacttcgggggatacttgcacttagccacatggtcctgcctcccttggagtccagttccaggctcccttactgagtgggtgagacaagttcacaaaaaccgtaaaactgagaggaggaccatgggcaggggagctgaagttcatcccctaagtctaccacccccagcacccagagaacccactttatccctagtcccccaacaaaggctggtctaggtgggggtgatggtaattttagaaatcacgccccaaatagcttccgtttgggcccttacattcacagataggttttaaatagctgaatacttggtttgggaatctgaattcgaggaacctttctaagaagttggaaaggtccgatctagttttagcacagagctttgaaccttgagttataaaatgcagaataattcaagtaaaaataagaccaccatctggcacccctgaccagcccccattcaccccatcccaggaggggaagcacaggccgggcctccggtggagattgctgccactgctcggcctgctgggttcttaacctccagtgtcctcttcatcttttccacccgtagggaaaccttgagccatgtgttcaaacaagaagtggggctagagcccgagagcagcagctctaagcccacactcagaaagtggcgccctcctggttgtgcagccttttaatgtgggcagtggaggggcctctgtttcaggttatcctggaattcaaaacgttatgtaccaacctcatcctctttggagtctgcatcctgtgcaaccgtcttgggcaatccagatgtcgaaggatgtgaccgagagcatggtctgtggatgctaaccctaagtttgtcgtaaggaaatttctgtaagaaacctggaaagccccaacgctgtgtctcatgctgtatacttaagaggagaagaaaaagtcctatatttgtgatcaaaaagaggaaacttgaaatgtgatggtgtttataataaaagatggtaaaactacttggattcaaa

SEQ ID NO: 424 - DNA, 247 bp, HOMO SAPIENS
  misc_feature (69)..(69): n is a, c, g, or t
  misc_feature (161)..(161): n is a, c, g, or t
aatggcaatgactttgtacctggttgccacagaagttagaaaggcctcgagaaaaatgttagtgaatantggaaggacatcgaggagactgctggagagactgaaggacagtaaagaaaatactatggggggtggctgaagaaatgacctgtgttatgtantggcagaaagttttcgtctttgataatgtgggaaaatagaaaaggtgcccaatgaatgggaggatctggctaaggagattttcagc

SEQ ID NO: 425 - DNA, 275 bp, HOMO SAPIENS
ccccacctgcaacaggtcaggtctgttatggagagaaaagacaggacatttttaaattctaggtatagagcaataaaagaagaattcaaacaaagggatcaggaagaggattgctactaagaggcagagaaaccaatgaagccttttgccatctcacactggaaagacaaaaagtcatagaggcttgatttttataaggaaagagaagtgagaaactgacctcgatactttgttggacttgcctaaagacatttgctgaattctcgggctgtgct

SEQ ID NO: 426 - DNA, 869 bp, HOMO SAPIENS
ggccaccggaattaacccttcagggctgggggccgcgctatgccccgccccctccccagccccagacacggaccccgcaggagatgggtgcccccatccgcacactgtcctttggccaccggacatcatgcctcccaagaaggatgttcccgtgaagaaaccagcagggccctccatctccaaacctgctgctaagccagcagcagcaggggctcctccagccaagaccaaagctgagccagctgtcccccaggcccctcagaaaacccaggagcctccagtcgatctctccaaagtggtgatcgagtttaacaaggaccagctggaggagttcaaggaggccttcgagctgtttgaccgagtgggggatggcaagatcctgtacagccagtgtggggacgtgatgagggccctgggccagaaccccaccaacgccgaggtgctcaaggtcctggggaaccccaagagtgatgagctgaagtcgcggcgtgtggactttgagactttcctgcccatgctccaggcagtggccaagaaccgaggccaaggcacatatgaggactacttggaggggtttcgtgtgtttgacaaggaggggaacggcaaagtcatgggagcagagctcagacatgttctcaccacccttggagagaagatgactgaggaggaggtggagaccgttctggcaggacacgaggacagcaacggctgcatcaactacgaggccttcttgaaacacatcctaagcgtctgagtgctgcagatccagtggggtccggacactgggccccgcaggcgaaagcacgttccagccaccaggaggccacctattgtttcaaaataaagactgggttcctctcttggtttca

SEQ ID NO: 427 - DNA, 1485 bp, HOMO SAPIENS
tcagccaattagagctccagttgtcactcctacccacactgggcctgggggtgaagggaagtgtttattaggggtacatgtgaagccgtccagaagtgtcagagtctttgtagctttgaaagtcacctaggttatttgggcatgctctcctgagtcctctgctagttaagctctctgaaaagaaggtggcagacccggtttgctgatcgccccagggatcaggaggctgatcccaaagttgtcagatggagagtaaatacaaggagatactcttgctaacaggcctggataacatcactgatgaggaactggataggtttaagttctttctttcagacgagtttaatattgccacaggcaaactacatactgcaaacagaatacaagtagctaccttgatgattcaaaatgctggggcggtgtctgcagtgatgaagaccattcgtatttttcagaagttgaattatatgcttttggcaaaacgtcttcaggaggagaaggagaaagttgataagcaatacaaatcggtaacaaaaccaaagccactaagtcaagctgaaatgagtcctgctgcatctgcagccatcagaaatgatgtcgcaaagcaacgtgctgcaccaaaagtctctcctcatgttaagcctgaacagaaacagatggtggcccagcaggaatctatcagagaagggtttcagaagcgctgtttgccagttatggtactgaaagcaaagaagcccttcacgtttgagacccaagaaggcaagcaggagatgtttcatgctacagtggctacagaaaaggaattcttctttgtaaaagtttttaatacactgctgaaagataaattcattccaaagagaataattataatagcaagatattatcggcacagtggtttcttagaggtaaatagcgcctcacgtgtgttagatgctgaatctgaccaaaaggttaatgtcccgctgaacattatcagaaaagctggtgaaaccccgaagatcaacacgcttcaaactcagccccttggaacaattgtgaatggtttgtttgtagtccagaaggtaacagaaaagaagaaaaacatattatttgacctaagtgacaacactgggaaaatggaagtactgggggttagaaacgaggacacaatgaaatgtaaggaaggagataaggttcgacttacattcttcacactgtcaaaaaatggagaaaaactacagctgacatctggagttcatagcaccataaaggttattaaggccaaaaaaaaaacatagagaagtaaaaaggaccaattcaagccaactggtctaagcagcatttaattgaagaatatgtgatacagcctcttcaatcagattgtaagttacctgaaagctgcagttcacaggctcctctctccaccaaattaggatagaataattgctggataaacaaattcagaatatcaacagatgatcacaataaacatctgtttctcattcc

SEQ ID NO: 428 - DNA, 4118 bp, HOMO SAPIENS
gttgaagggctcagtgacaattaaagatggctgcgcccatgtaacatcactagcgaccggtgacctctttttcccccttgcctggctcctgtggtggcaggctgggcacgaggaccatgctgggccggagcctccgagaagtttctgcggcactgaaacaaggccaaattacaccaacagagctctgtcaaaaatgtctctctcttatcaagaagaccaagtttctaaatgcctacattactgtgtcagaagaggtggccttaaaacaagctgaagaatcagaaaagagatataagaatggacagtcacttggggatttagatggaattcctattgcagtaaaagacaatttcagcacttctggcattgagacaacatgtgcatcaaatatgctgaaaggttatataccaccttataatgctacagtagttcagaagttgttggatcagggagctctactaatgggaaaaacaaatttagatgagtttgctatgggatctgggagcacagatggtgtatttggaccagttaaaaacccctggagttattcaaaacaatatagagaaaagaggaagcagaatccccacagcgagaatgaagattcagactggctgataactggaggaagctcaggtgggagtgcagctgctgtatcggcgttcacatgctacgcggctttaggatcagatacaggaggatcgaccagaaatcctgctgcccactgtgggcttgttggtttcaaaccaagctatggcttagtttcccgtcatggtctcattcccctggtgaattcgatggatgtgccaggaatcttaaccagatgtgtggatgatgcagcaattgtgttgggtgcactggccggacctgaccccagggactctaccacagtacatgaacctattaataaaccattcatgcttcccagtttggcagatgtgagcaaactatgtataggaattccaaaggaatatcttgtaccggaattatcaagtgaagtacagtctctttggtccaaagctgctgacctctttgagtctgagggggccaaagtaattgaagtatcccttcctcacaccagttattcaattgtctgctaccatgtattgtgcacatcagaagtggcatcgaatatggcaagatttgatgggctacaatatggtcacagatgtgacattgatgtgtccactgaagccatgtatgctgcaaccagacgagaagggtttaatgatgtggtgagaggaagaattctctcaggaaactttttcttattaaaagaaaactatgaaaattattttgtcaaagcacagaaagtgagacgcctcattgctaatgactttgtaaatgcttttaactctggagtagatgtcttgctaactcccaccaccttgagtgaggcagtaccatacttggagttcatcaaagaggacaacagaacccgaagtgcccaggatgatatttttacacaagctgtaaatatggcaggattgccagcagtgagtatccctgttgcactctcaaaccaagggttgccaataggactgcagtttattggacgtgcgttttgtgaccagcagcttcttacagtagccaaatggtttgaaaaacaagtacagtttcctgttattcaacttcaagaactcatggatgattgttcagcagtccttgaaaatgaaaagttagcctctgtctctctaaaacagtaaacatatcttacaaattaaaatgacttttaggctgggtgcagtggctcacacctgtaatcccagcactttgggaggccaaggcgagcggatcatgaggtcagaagatctagaacagcctggtcaacatggtgaaaccccgtctctactaaaaatacaaaaattagccaggcttagtggcgggcatctgtagtcccagctactcaggaggctgaggcaggagaatcacttgaaccctggaggtggaggttgcagtgagccgagatcatgccactgcactgcactccagcctgggtgacaaagcaagactgtgtctcaaaataaataaataaaataaaataaaatgacgtacagagattctatattctagagagtcaaatggtcttgctcaattcttgtaattaggttcttgttaatacagtcattccatggaattactttttaaaattcctgtgacaattaataataaataacgtgtcagcatttagtaagcatccactaagtgtacaatacttctacaataacacaagatacctgttcctcaaagacaatgcattctgccataatgttcattaaagagtttacagtaaaaataagattagggataaacttctcaaaaattgtacatctgtgtaactaaagcactaacaaaaacatgaatagtccttctagaggtaacttggatagcctaggcaggcaacttatcatgtggtgaaggccgcctcaggggttgttaaaaatgcacagaaacaattgagtgcgattattggcttctgagcgctgagcagagcaggtggaagaggaactttgagcacaggaggaaatgcaaccagtcagggcccagaatcatgcaaatctcaggggtatgcctctctggggaggagctccacttgcagggactccttttatttccctaagaaagagctgaaatgactgagaactttcctttcctccttagagttacaattttacttctgctattccggagcccatgcctagaagccagaacaactccatgttacactgagttcatgctcctatttactgatcacaaatgagctcattaatgtcatcgaaacatttattgtaacctaacagaccatcacagattggaaacttggtagatagcagagcatggtattagtgaaaaaggttcaaaatacacaagtaacatacactctgaaaaacatgcagataatttgctgatgaagcagaagaggggatgcgcatggcaagaacttgccttaccccagattctctatatctcatggtttccttttcctcttgactgtctttacgagtgttttttatttgggaccctcgagcccagagatattaatggatatctgtattcaatatttgacaaaatctaatggaaaccatccatttactcatgataaggcttcatcactggatttctgtgtcttcactagaacaccattgtcatctcatattgatcaggtattttaatctagcacttacatattgttgataaatgaaagctgaattgttacttaataaattcactttgtttagtaaaaaaaaattgttttctaaatatgacgttcatgaagagaaaataatgagtcagaatcatctgcagaaccactggaatgtttcatcgtcacctgttagttttcataaacagttttctgtcctctctgagatcctcccgctcccaaatactcaacctgattaacttcacataaaagtcttatgtgccaggcttagtaatattcctatagattttgactctgaatccctgaaagaggaagaaatccatgagagaaaattgcattactttatagcaagaggaaaccgttttaagttttttaattgctcagacaccacaacatcctagatggaggaaaccattttagttgaaggagcaaatatgatgtcaaaagcaagtaaataaacaaaccgttgccccaatctgtttttatgtaatgaatttaaaaaaaaagagagagagagagagatgggctctccctgtgttgcccaggctagtctcaaactcctgggctcaagtgatctgcctccctcagcctcccaaagtgctgagattaaagacgtgagccaccacacctggccgaaataataatattcaatattatatattcaatgatattattcagtattcaatattatttcaaataatattaaatctcttgttcctgtatctctacatgagctgcactaataatttgaatctggaaattaaaaagtgaaacatttaccgttctcatatactgatacccaactaccatgaaatgatacctaatttgtttttcttttctcttcatttttactcttaatctagtaggtctcattttgccaagtcactgtctgggaatttaagtggcaaatactttctttgtctcagctaattaaactctaaaattattagcaacagaa

SEQ ID NO: 429 - DNA, 2082 bp, HOMO SAPIENS
agattgctgcctatgcaaagcaggtaagaagccgaactctgaggcctctcgccattgtctccgagtcggccagctggagcgttttcggggctgtaaagggagaatggcgcatgcgcatattcagggcggaaggcgcgctaagagcagatttgtggtctgcattatgtctggagccagaagtaagcttgctcttttcctctgcggctgttacgtggttgccctgggagcccacaccggggaggagagcgtggctgaccatcacgaggctgaatattatgtggctgccgtgtatgagcatccatccatcctgagtctgaaccctctggctctcatcagccgccaagaggccttggagctcatgaaccagaaccttgacatctatgaacagcaagtgatgactgcagcccaaaaggatgtacagattatagtgtttccagaagatggcattcatggattcaactttacaagaacatccatttatccatttttggacttcatgccgtctccccaggtggtcaggtggaacccatgcctggagcctcaccgcttcaatgacacagaggtgctccagcgcctgagttgtatggccatcaggggagatatgttcttggtggccaatcttgggacaaaggagccttgtcatagcagtgacccaaggtgcccaaaagatgggagataccagttcaacacaaatgtcgtgttcagcaataatggaacccttgttgaccgctaccgtaaacacaacctctactttgaggcagcattcgatgttcctcttaaagtggatctcatcacctttgataccccctttgctggcaggtttggcatcttcacatgctttgatatattgttctttgaccctgccatcagagtcctcagagactacaaggtgaagcatgttgtgtacccaactgcctggatgaaccagctcccactcttggcagcaattgagattcagaaagcttttgctgttgcctttggcatcaacgttctggcagctaatgtccaccacccagttctggggatgacaggaagtggcatacacacccctctggagtccttttggtaccatgacatggaaaatcccaaaagtcaccttataattgcccaggtggccaaaaatccagtgggtctcattggtgcagagaatgcaacaggtgaaacggacccatcccatagtaagtttttaaaaattttgtcaggcgatccgtactgtgagaaggatgctcaggaagtccactgtgatgaggccaccaagtggaacgtgaatgctcctcccacatttcactctgagatgatgtatgacaatttcaccctggtccctgtctggggaaaggaaggctatctccacgtctgttccaatggcctctgctgttatttactttacgagaggcccaccttatccaaagagctgtatgccctgggggtctttgatgggcttcacacagtacatggcacttactacatccaagtgtgtgccctggtcaggtgtgggggtcttggcttcgacacctgtggacaggaaatcacagaggccacggggatatttgagtttcacctgtggggcaacttcagtacttcctatatctttcctttgtttctgacctcagggatgaccctagaagtccctgaccagcttggctgggagaatgaccactatttcctgaggaaaagtaggctgtcctctgggctggtgacggcggctctctatgggcgcttgtatgagagggactaggaaaagtgtgtggtctgtggggcggactctggccatcatgttgacagccttgcacttccacaggctacaagccctgggaccatctttctgccttaagggcaggagcccacttctgtggcaccagattccaccctgggaactgtggaaaaagtaggagaggcagattccctcagtgtcttcctcttaaacctcaatcatcgagacattagggggtattttctgttcacatttatctttttcaagccacatcttcctctaacaaatctctcagtatgcgattggtctcaagctaaaacaaaaataaatgtcagtttatattttacacatccaaaaaaaaaaaaaaaaaa

SEQ ID NO: 430 - DNA, 1787 bp, HOMO SAPIENS
aaaaaaaaaaaaaagccgtgggtcaggagccagagccctctgctctagtcttagctgtgccaatgtgactccctgtgtgatttgggggtaaattactgcccctcactgggtctctgtctacccacctgcaaaatgagaggatctttggatgagtctccttaattcatttcctggacaaacttcctccaaggctcccccagatttatcagtgacgcccttccctaagtatcaacttagccgtactttgaactctggcccctcaggtttcaaggggacggccttgtctgggatcagctctgtctggggaaagaagctgcaccagcctctggatagcaggctgagtcacttgtttcttgtgccttgagtcagttctctcatcagctctcctcctaggccagtgttattacctccagtaaagatggaaaagttggggttcagagagggctagagacagacagcctgctgtgtcctgtcttttctcctgtgctgtacaggttcaccaatttttaaaatccaaatatatctcatggtacagtggaagaactggccagagagtctggaagtttgggttctggtcctggctgtgccactgactcactgtgaccttgggatcttgtgctgtgaagacatttcccaagtgcttcatgttagccagcaaatctgacccacaaggcctggaaagaggtgattgttaggttgcgcagaggtggtcttatccagctcagcttcccctgggacccaccgtgggacctgaggcagaactggggtggacttggcctcctccatggcacaccggctgcagatacgactgctgacgtgggatgtgaaggacacgctgctcaggctccgccaccccttaggggaggcctatgccaccaaggcccgggcccatgggctggaggtggagccctcagccctggaacaaggcttcaggcaggcatacagggctcagagccacagcttccccaactacggcctgagccacggcctaacctcccgccagtggtggctggatgtggtcctgcagaccttccacctggcgggtgtccaggatgctcaggctgtagcccccatcgctgaacagctttataaagacttcagccacccctgcacctggcaggtgttggatggggctgaggacaccctgagggagtgccgcacacggggtctgagactggcagtgatctccaactttgaccgacggctagagggcatcctggggggccttggcctgcgtgaacacttcgactttgtgctgacctccgaggctgctggctggcccaagccggacccccgcattttccaggaggccttgcggcttgctcatatggaaccagtagtggcagcccatgttggggataattacctctgcgattaccaggggcctcgggctgtgggcatgcacagcttcctggtggttggcccacaggcactggaccccgtggtcagggattctgtacctaaagaacacatcctcccctctctggcccatctcctgcctgcccttgactgcctagagggctcaactccagggctttgaggccagtgagggaagtggctgggccctaggccatggagaaaaccttaaacaaaccctggagacagggagccccttctttctccacagctctggacctttccccctctccctgcggcctttgtcacctactgtgataataaagcagtgagtgctgagctctcacccttcccccactaaccagaaaaaaaaaaaaaaaaaaaaaaaaaaaaaaaaaaaaaaaaaaaaaaaaaaaaaaaaaaaaaaaaaa

SEQ ID NO: 431 - DNA, 3195 bp, HOMO SAPIENS
atagtgcccccgcctccttgcgcgaagtgcgcaggctcctgggcagggctcgggttctgcccggggacgcagcccagttggtagcgtcgctccctgagcgtttctaagggggccgcccggccttgtctttcggcagtggccgagccaccgccgcctgccgcgcgttccagagctgggcgctgcagctgcactgccgatcgccgtgtttggtcgatagaatccccagtgtgcccagagagtgcgacccctcgcccggcccggcgagccccgggcgtgaaccgagctgagggaggatggcagcctctggggtggagaagagcagcaagaagaagaccgagaagaaacttgctgctcgggaagaagctaaattgttggcgggtttcatgggcgtcatgaataacatgcggaaacagaaaacgttgtgtgacgtgatcctcatggtccaggaaagaaagatacctgctcatcgtgttgttcttgctgcagccagtcatttttttaacttaatgttcacaactaacatgcttgaatcaaagtcctttgaagtagaactcaaagatgctgaacctgatattattgaacaactggtggaatttgcttatactgctagaatttccgtgaatagcaacaatgttcagtctttgctggatgcagcaaaccaatatcagattgaacctgtgaagaaaatgtgtgttgattttttgaaagaacaagttgatgcttcaaattgtcttggtataagtgtgctagcggagtgtctagattgtcctgaattgaaagcaactgcagatgactttattcatcagcactttactgaagtttacaaaactgatgaatttcttcaacttgatgtcaagcgagtaacacatcttctcaaccaggacactctgactgtgagagcagaggatcaggtttatgatgctgcagtcaggtggttgaaatacgatgaacctaatcgccagccatttatggttgatatccttgctaaagtcaggtttcctcttatatcaaagaatttcttaagtaaaacggtacaagctgaaccacttattcaagacaatcctgaatgccttaagatggtgataagtggaatgaggtaccatctactgtctccagaggaccgagaagaacttgtagatggcacaagacctagaagaaagaaacatgactaccgcatagccctatttggaggctctcaaccacagtcttgtagatattttaacccaaaggattatagctggacagacatccgctgcccctttgaaaaacgaagagatgcagcatgcgtgttttgggacaatgtagtatacattttgggaggctctcagcttttcccaataaagcgaatggactgctataatgtagtgaaggatagctggtattcgaaactgggtcctccgacacctcgagacagccttgctgcatgtgctgcagaaggcaaaatttatacatctggaggttcagaagtaggaaactcagctctgtatttatttgagtgctatgatacgagaactgaaagctggcacacaaagcccagcatgctgacccagcgctgcagccatgggatggtggaagccaatggcctaatctatgtttgtggtggaagtttaggaaacaatgtttctgggagagtgcttaattcctgtgaagtttatgatcctgccacagaaacatggactgagctgtgtccaatgattgaagccaggaagaatcatgggctggtatttgtaaaagacaagatatttgctgtgggtggtcagaatggtttaggtggtctggacaatgtggaatattacgatattaagttgaacgaatggaagatggtctcaccaatgccatggaagggtgtaacagtgaaatgtgcagcagttggctctatagtttatgtcttggctggttttcagggtgttggtcgattaggacacattctcgaatataataccgaaacagacaaatgggttgccaactccaaagttcgtgcttttccagtcacaagttgtttaatttgtgttgtcgatacttgtggagcaaatgaagagacccttgaaacatgaaaaatgagtggacttcagactcatcagagactctaaaatatagccaccagtgctttgttccaggagtttggtgacaaagttttggtttggtgttttggtaaagaaagtttcaagtgaaatgaggttcctataaaatagatgtttcttttatatggatttccttaattcaaagatcatattttagctggccacaaaaccaagaacatatctagcaagaaaacttgaaaaagtataagcatttgttaaaaatgtgaatttcttgaatgaatttcacatttgtaactatgattttggcagaatagaagattggctcatcagtgaagcgcagtatcttagctctagattctattttcatgcatcacagaagtgctatacggttaggtctgtttgtgctcagtcaagaactaagaaatagtatgaattgtaagtcaagatgggcaactcagatggagcagcttagtctcacagtttgcttgtctatttattttatttagtgccaaatgtattccattttaaaagtaagccagagtgagtcaaggcatatacacactttctcacaaaacttcctaaacagatttgggggtttaatatgtccaactcctcatgaaatatattcaatccacttaaatatattccatctttttaacataaaatgtaaagcttagcacccatcattaatttatgtctctgttttatccagtggttaaaaaaggattctgcctctttagtcctcactgttaaataaaacccaatcatagtaagtgattaactagcaaaaagtaaagctatttatagcaaatttctagatcattagaaaagcactggtagttgtacaatatcagtgttgactttgaacttctttaacgagatcatgaattcttttcccttagccaaaacatgaaatatttaacctagttgtctctaaaagttttgtaatcatgagttagatatatgtcatctcctattcattgcttttatgtgatcaataaatcttttacaaacccaactactcatttccttcctagtaatactttgcctttttcactgtgtatggaatgaaacatgtaaagctgtcacaatcaatgtttttatctgataatattaaatattttttaacttaaaaaaaaaaaaaaaaaaaaaa

SEQ ID NO: 432 - DNA, 5582 bp, HOMO SAPIENS
ggcgtggggggagcagatgccgctggctgccagcgggacgccggcgagcagagcgcagccgcgagggaggcgcgagggaggcgagccggagcccgagcactagcagcagccggagtcggcgtaaagcacccgggcgcagccggagccggtgccgcagctgcgatggccgtggccgtggggagaccgtctaatgaagagcttcgaaacttgtctttgtctggccatgtgggatttgacagcctccctgaccagctggtcaacaagtctacttctcaaggattctgtttcaacatcctttgtgttggtgagacaggcattggcaaatccacgttaatggacactttgttcaacaccaaatttgaaagtgacccagctactcacaatgaaccaggtgttcggttaaaagccagaagttatgagcttcaggaaagcaatgtacggctgaagttaaccattgttgacaccgtgggatttggagaccagataaataaagatgacagctataagccgatagtagaatatattgatgcccagttcgaggcctacctgcaagaggaattgaagattaaacgttctctcttcaactaccatgacacgaggatccatgcctgcctctactttattgcccctactggacattcactaaagtccctggatctggtcaccatgaaaaagctggacagtaaggtgaacatcattccaataattgcaaaagctgacaccattgccaagaatgaactgcacaaattcaagagtaagatcatgagtgaactggtcagcaatggggtccagatatatcagtttcccactgatgaagaaacggtggcagagattaacgcaacaatgagtgtccatctcccatttgcagtggttggcagcaccgaagaggtgaagattggcaacaagatggcaaaggccaggcagtacccctggggtgtggtgcaggttgagaatgaaaatcattgcgattttgtgaaacttcgagagatgctgatccgcgtgaacatggaggacttgcgagagcagactcacacccgccactatgaattgtaccgacgctgtaagcttgaagagatggggttcaaggacactgaccctgacagcaaacccttcagtcttcaggagacatatgaagcaaaaaggaatgaattcctgggagaactgcagaagaaagaagaagaaatgagacaaatgtttgttatgagagtgaaggagaaagaagctgaacttaaggaggcagagaaagagcttcacgagaagtttgaccttctaaagcggacacaccaagaagaaaagaagaaagtggaagacaagaagaaggagcttgaggaggaggtgaacaacttccagaagaagaaagcagcggctcagttactacagtcccaggcccagcaatctggggcccagcaaaccaagaaagacaaggataagaaaaatgcaagcttcacataaagcctggcaagccaaggatgttcccgcattcacctgcttttgcagtaatatcgtatctctgccatgtgtgttctttagttttattttattttattttatttttttacccttcctcaaacaccagtaactattattaactcgttttgctgaatgttgttgggtggtagaaaatgatagaacaagggaataaccgcgaatgctctgtgcagctggactctgtttccggaaagtaaatgatttgctttttatgcctgttctgaatggcagcacgaagcaggcctgttacttgtatgtcgctttggacagaggaaagtggggtaaaatgctacctgtacgtctgacatgaaaacttctcaccgcctcagcagctgaactaaaaacctgaatagccatgacaagagtttgcattttcttgatgattcatctccatgagtgcacaatccctgaactcactgtcttttctccacacttgtcctaagccaaggtagatttgtacgtagacagactggtgagcaagcattatattttatttttacccttgcatgacattttcattttaatcaataacattatttggcctgagcttgtgggtctgttcagactgtctcctctcatggtttgaaactgcatctgaatgcctgccttcaatcctggccaagttggagtagactggtatgagaaaactatgattagttcacatttactggtgcatccttgatcctctcacagatagaggtcttaaaggttggatcatgtaacattgcttagtagaagaatcttcttctaaggatgatgggctttctacagcctgcttaccactaacagtaaggaatctttcataaacacacctcagtttgttcccagtgggcttagagggaggacctgatgactgattccaggatacttgtacttctaataacatttttcatgaatcatgagaaaatttccacagatacttcccttagaaaatttgctataaactctgtatcattggtagcacaaatttgagcgaggccttgtcaattttaaggtggaaataggaaggaccacaacatgacccgtaagtcaagaaggtagacatttcatatccagcttccttgcttagtctcctttcagtatttggcaataaaagaaagaagaaatagaacagctgaagtctcaaatcattgtctggaattttcctcaccttggctagctccacctgctctttgtctaaggcccttgcctcatcagggattagaactggcccatatgccagaacctgtactaaatgcctaatttgtatggaagagtgcatatttaatctcttttctatactgctcctttctgatgcttatcctttcatctgtgtgattgttttttcccctctactaacaagatcctcccagctttctctctacatgtagaaaggataacatttctcatgaacccactgcccctctgcattttcctcactggttagagattaagtaaataggatagaatatgctgcgtctcccctgacacacactttcttttttgaatgagcaagtctccattttgatttcagcaaagattttttctccttttctttgtcctcaaccatacttagaggaaagaaggaatggtcttccatgaactgattatgcttaattaagcaaagtaaggaaattagtttcatggaagcctaaacaaagctggaatagaaactacacactagacacagcagtagtcatagtcttcacaggtttaggagctactggaccaacattcttgtttttgcttttgtttttttaaataattctagtctggagctaactgtggagcagccaaatagtagctggcatgttgattcaaaccatgggctgaatttgctcataggctgtgcatcagacaaaagcttgaatatttgtgttgtatgcttgttccaaccaccgcttgtgtgagcatttttgtggcttgtacagaaagtacacttttaaattgtctcttgcatcactaaaatttttttaaaatgagcataacaacgaaaggcatccagctgactttttgattccaagattattgattggattgacttttttgcattaaatttttcccagcaaaataaatcatatggcgagtcagggaataaaaagtcaaaagaaacaaatagaagcttttttttttaaaaaatgtattgcttctgaacttttttctgccactgctccctagccctgtttagtttgttattgctgcttttcttttttctttctgtatctatgcctttttttcacagtagtccttggctctgcacggaataaatgataccctcaaatctaattggatgtgctttcgcctttgcatgtaagtacggtagtaagaaacctttgagatctttctgacttttcaaaattagagaaagcaaatgggatggatagattttttttttcttttcaaggggggcaggaaggtaatggtttgagtagcctttgtttaaaaaaaagactaaatatatttaaaaggccacatttatatttttttcacaagaaccacataataaattccacttcttgacctgaatttggaaatccgaaattactaatccaggccaggtgtggtggctcatgcctgtaatcccagcactttgagaggccgaggtgggcagatcacttgaggcctggagttcaagaccaccttggcgaacacggtgaaaccccgtctctacaaaaaatacaaaaattagccaggcgtggtggcacgtgcctgtagtcccagctacttgggaggctaagtcaggagaattgcttgaacttgggagatggaggttgcagtgagccaagattgcaccactgcattccaacctgggtgatgaagtgagactctccaaaaaaaaaaaagaaattattaatccctgcctgtgctctacatagcctcatgggcatcattggatagctcagagggcccttgattctggcaaggcaaataaagccagaatgagaaattaccatcttctactagagaaaaccaagagaaaaatttttatgctaggatgcctttatgaccacttaattttttaatcttagtttaatggtctctccctggtgctaactgctgacagtggccacctcttttttggggattgaggggcctacataactagctggccttaccccatatcttttgttcaaacataataccatctttttgcttcttctgaactttagatctccataacacatgtactgtagaatgtgatggaaaagcattgatgagaatttattggcagttcagattgtgttttcccaacttaggctctttattaattggttaaggttttctccaaaaagggcatttcaacaatgggaattatttaatgtaacagtgggcacagattacttatcttccttctctgctttgtgactcaccagcagtaacacacacaatccacatcttgtgcacctcaaatgaacagacttggtttccttgctttcttgacatttccatgactgtttcacatacaaactattgggtgaggtttttcagctgttaccgacccacgtcctgctgtctctgtgtggtcctacaaaaactgtccattcccacccctttgctttgccatttgcaagagtctggaattgtcaggtctcagcttcgaaaagtcctggttccactgacaggacacattctttagtgggaattaagacctacaaagtctagtttgtatgtaggtatgaagggaattttttaaataaattgaaaagctgtgaacagcattagaactttgtctatttcttaattttaaaatatgctgatatgccttaaactgtagttgtagatccttgtcattttgctgtttgaaaataaccaatgtgttttctaaaactgtcgtgtaatctactttcattgttaatgcagaattgtcatatatgtaagctgcatgttagacatttgtcttttttaaactaaagtaattgtattgatgtgaagcatatcattttttcaaatatgaaagtgatcacttagcaacatgcttggtaatttggcatctgttaaggtaggagagtggtgaacagataatctatgcatatatcactagtgccaagacataaagcgggggaaaatatatttttacccaaacattaaaaaaaaaaaaaaaaaaaaaaaaaaaa

SEQ ID NO: 433 - DNA, 5493 bp, HOMO SAPIENS
gctgagctccagctgtgccagaggcacccgagccctgagagtccgccgccaacgcgcaggtgctagcggccccttcgccctgcagcccctttgcttttactctgtccaaagttaacatgtcactgaaaaacgagccacgggtaaatacctctgcactgcagaaaattgctgctgacatgagtaatatcatagaaaatctggacacgcgggaactccactttgagggagaggaggtagactacgacgtgtctcccagcgatcccaagatacaagaagtgtatatccctttctctgctatttataacactcaaggatttaaggagcctaatatacagacgtatctctccggctgtccaataaaagcacaagttctggaagtggaacgcttcacatctacaacaagggtaccaagtattaatctttacactattgaattaacacatggggaatttaaatggcaagttaagaggaaattcaagcattttcaagaatttcacagagagctgctcaagtacaaagcctttatccgcatccccattcccactagaagacacacgtttaggaggcaaaacgtcagagaggagcctcgagagatgcccagtttgccccgttcatctgaaaacatgataagagaagaacaattccttggtagaagaaaacaactggaagattacttgacaaagatactaaaaatgcccatgtatagaaactatcatgccacaacagagtttcttgatataagccagctgtctttcatccatgatttgggaccaaagggcatagaaggtatgataatgaaaagatctggaggacacagaataccaggcttgaattgctgtggtcagggaagagcctgctacagatggtcaaaaagatggttaatagtgaaagattcctttttattgtatatgaaaccagacagcggtgccattgccttcgtcctgctggtagacaaagaattcaaaattaaggtggggaagaaggagacagaaacgaaatatggaatccgaattgataatctttcaaggacacttattttaaaatgcaacagctatagacatgctcggtggtggggaggggctatagaagaattcatccagaaacatggcaccaactttctcaaagatcatcgatttgggtcatatgctgctatccaagagaatgctttagctaaatggtatgttaatgccaaaggatattttgaagatgtggcaaatgcaatggaagaggcaaatgaagagatttttatcacagactggtggctgagtccagaaatcttcctgaaacgcccagtggttgagggaaatcgttggaggttggactgcattcttaaacgaaaagcacaacaaggagtgaggatcttcataatgctctacaaagaggtggaactcgctcttggcatcaatagtgaatacaccaagaggactttgatgcgtctacatcccaacataaaggtgatgagacacccggatcatgtgtcatccaccgtctatttgtgggctcaccatgagaagcttgtcatcattgaccaatcggtggcctttgtgggagggattgacctggcctatggaaggtgggacgacaatgagcacagactcacagacgtgggcagtgtgaagcgggtcacttcaggaccgtctctgggttccctcccacctgccgcaatggagtctatggaatccttaagactcaaagataaaaatgagcctgttcaaaacctacccatccagaagagtattgatgatgtggattcaaaactgaaaggaataggaaagccaagaaagttctccaaatttagtctctacaagcagctccacaggcaccacctgcacgacgcagatagcatcagcagcattgacagcacctccaataccgggtccatccgtagtttacagacaggtgtgggagagctgcatggggaaaccagattctggcatggaaaggactactgcaatttcgtcttcaaagactgggttcaacttgataaaccttttgctgatttcattgacaggtactccacgccccggatgccctggcatgacattgcctctgcagtccacgggaaggcggctcgtgatgtggcacgtcacttcatccagcgctggaacttcacaaaaattatgaaatcaaaatatcggtccctttcttatccttttctgcttccaaagtctcaaacaacagcccatgagttgagatatcaagtgcctgggtctgtccatgctaacgtacagttgctccgctctgctgctgattggtctgctggtataaagtaccatgaagagtccatccacgccgcttacgtccatgtgatagagaacagcaggcactatatctatatcgaaaaccagtttttcataagctgtgctgatgacaaagttgtgttcaacaagataggcgatgccattgcccagaggatcctgaaagctcacagggaaaaccagaaataccgggtatatgtcgtgataccacttctgccagggttcgaaggagacatttcaaccggcggaggaaatgctctacaggcaatcatgcacttcaactacagaaccatgtgcagaggagaaaattccatccttggacagttaaaagcagagcttggtaatcagtggataaattacatatcattctgtggtcttagaacacatgcagagctcgaaggaaacctagtaactgagcttatctatgtccacagcaagttgttaattgctgatgataacactgttattattggctctgccaacataaatgaccgcagcatgctgggaaagcgtgacagtgaaatggctgtcattgtgcaagatacagagactgttccttcagtaatggatggaaaagagtaccaagctggccggtttgcccgaggacttcggctacagtgctttagggttgtccttggctatcttgatgacccaagtgaggacattcaggatccagtgagtgacaaattcttcaaggaggtgtgggtttcaacagcagctcgaaatgctacaatttatgacaaggttttccggtgccttcccaatgatgaagtacacaatttaattcagctgagagactttataaacaagcccgtattagctaaggaagatcccattcgagctgaggaggaactgaagaagatccgtggatttttggtgcaattccccttttatttcttgtctgaagaaagcctactgccttctgttgggaccaaagaggccatagtgcccatggaggtttggacttaagagatattcattggcagctcaaagacttccaccctggagaccacactgcacacagtgacttcctggggatgtcatagccaaagccaggcctgacgcattctcgtatccaacccaaggaccttttggaatgactggggagggctgcagtcacattgatgtaaggactgtaaacatcagcaagactttataattccttctgcctaacttgtaaaaagggggctgcattcttgttggtagcatgtactctgttgagtaaaacacatattcaaattccgtataccaaaatccatttcctttgtaacaagaatttaccagtaactgtgatctaggttgccaaaagttgtctgaatctccttattcttctctgatcttcatttatgcagccaatgtctagctggacctgccctcatcttgcagttcatacaggcactgtttgagagattgtttattattagatgttgtaatgctgcttcaagattcttcatggttacatgggatgcccctgctcatctggtcctgaagtagtaacattcacccaaatgaggatatagtcattattccttttcagtcactgtacgaacacggcagactttagcctacacagtagactgtgttaggcacttctggtaacattgacactgtatcttgacaccactaagcaacaggaaggaataaattccaatattgagacagagatttatttcattttgctcccaaaggcactgacaacatgagtccttgtgattaggcccacctgatcaaatgtaaaaacatgcatgggatatttgattacgtaacaaccagctaaaactgagagcacacagccttcggaaacccccaaggtgtcgaggaggatcagatccagataagagaagatgattccttctagtcctgtaaaatttcctgtcatccttagctgctgggttgattgaaatttgatctctacatttcaaaatcaaactagtgaatacagtttgtctttcaagagaatcagaggcatcgtaactcctaccaagttagtaagtatgagtctaaccttgtttgacattcaggtcttctgctacattatcttctttgagaaaaattaattgattataaaatatgtgctacttcacttacattattaaatatgtattaacgcctctcaccagggcttccagtgaagttacaatgccctagtctgtgaattagtctggaaacgtgtttttccttttcggatgttagagtaccctttgataaactaaattttactaagctgaacaactctgacagtctaaagagctaatgtgggttaccaaaaggcctgtacctgtaaaacaaaatgcaggtgtaatgattatacatgtctatggattacctggacatactctcatttgggttgttcttcaaagaagcaagcagccgatccctgttttcataaagctaatacttcagttggaaaaattaaacaggagcacaaagtcagggataggggttagcagaagagagaaatagtgtcacatcaagggcaggatctcatagctagggaacatttcacaaataaggtgagattttgtaaccaataataaaaatgaatgtttttataagtaaataacttatttttcatatggctaaagatggtaaaatgacttcattctatagccattgtaaataagaatttgctattgatgaaagaagttcagattggcatttgaagtattgagtgtatgggatctctaaggatttcttagattttatatttaaatattttttaaaccttagaggagtcaacaaactggctcttgattttcagcaccctactctcatgaaaaaagcctgaaaggaccctttcccttataagtaatttaatccaatttctccccattttatagatgaggaaactgaggctcagatcagatgagaactcacttaaatccactcaatgtgtagatggtagagctgggactagcaacattgctgcagcccattgttggcctctctcttcactttatcattgcccaagaatgaggatatgcagtaaacagaattcaggcaagatacctctaagctgttttgaaccctctgatattttgtatttatgtgtttgtctgtctccccctactagaatgtaagctccatggggcagggacttcactgtattttgttcatagtgtatccccagagcctggaccagtgcttggcacataggagatggcaataaatgcttgtagaattaataaacaaggtgaaggagagagctaatgaaatgaaaaaaaaaaaaaaaaaa

SEQ ID NO: 434 - DNA, 2017 bp, HOMO SAPIENS
agacggggcagcgctcgagttcctgcgcgggactgccaaggcacgaccacgggccggaaggctgccaggcccagtgggcaagcgaagaaatgaaccaccgcaacgcgggcgcttcggggcggggccgagtgcgaacctgagccccaaatcccgacccaggcaggggcggggcccggagcggggccttggaggcccagcccgcgcggcgacgtctccgcgtggcgtcacggcaccgactgacggccacccaccatggccgcagaccagcgcccgaaggccgacacgctggccctgaggcaacggctcatcagctcttcctgcagactcttttttcccgaggatcctgttaagattgtccgggcccaagggcagtacatgtacgatgaacagggggcagaatacatcgattgcatcagcaatgtggcgcacgttgggcactgccaccctctcgtggtccaagcagcacatgagcagaaccaggtgctcaacaccaacagccggtacctgcatgacaacatcgtggactatgcgcagaggctgtcagagaccctgccggagcagctctgtgtgttctatttcctgaattctgggtcagaagccaatgacctggccctgaggctggctcgccactacacgggacaccaggacgtggtggtattagatcatgcgtatcacggccacctgagctccctgattgacatcagtccctacaagttccgcaacctggatggccagaaggagtgggtccacgtggcacctctcccagacacctaccggggcccctaccgggaggaccaccccaacccagctatggcctatgccaacgaggtgaaacgtgtggtcagcagtgcacaggagaagggcaggaagattgcagccttcttcgctgagtctctgcccagtgtgggagggcagatcattccccctgctggctacttctcccaagtggcagagcacatccgcaaggccggaggggtctttgttgcagatgagatccaggttggctttggccgggtaggcaagcacttctgggccttccagctccagggaaaagacttcgtccctgacatcgtcaccatgggcaagtccattggcaacggccaccctgttgcctgcgtggccgcaacccagcctgtggcgagggcatttgaagccaccggcgttgagtacttcaacacgtttgggggcagcccagtgtcctgcgctgtggggctggccgtcctgaatgtcttggagaaggagcagctccaggatcatgccaccagtgtaggcagcttcctgatgcagctcctcgggcagcaaaaaatcaaacatcccatcgtcggggatgtcaggggtgttgggctcttcattggtgtggatctgatcaaagatgaggccacaaggacaccagcaactgaagaggctgcctacttggtatcaaggctgaaggagaactacgttttgctgagcactgatggccctgggaggaacatcctgaagtttaagcccccaatgtgcttcagcctggacaatgcacggcaggtggtggcaaagctggatgccattctgactgacatggaagagaaggtgagaagttgtgaaacgctgaggctccagccctaagccagccctgctctgcctaagtgtactccagaagaaactcatctcatccaaatacacgctattgagaaggcgagcctgacctccctcttacagataaagtcagctttcagaggctcagggtgggggggcctgcccgaggccataatgctacccaccccctcctcctaaccactggtctgttggaataacccagatgtctgcatcccctcaagtcagtcaatttcctttctgtccactgggggtggaatggggtagggtgggatactttaaagtgctcctgcttaaataaattagaccagaccagtgtatttctaaagaaaatcctgacatgcacacccattaaaaatagtacattttacagtgtcccagtcatacttttaattggcaaattaaaataatgcaatctgaaaaa

SEQ ID NO: 435 - DNA, 1512 bp, HOMO SAPIENS
gttaatgaaataaattgtctgctatatataggttttgtgtgaacatacaaatgaaatgtactgtctcagaataatgtggttggggaaatatctggagacaaatacaatgcaattgcaacataacagttacacaccagactcttaacaggaataatgtagtgtgatacttgaaagcctaaactctgaaatgagattgcctgagctgagatctcaattcctctaactatgtaaccctgggcaagttacttcaaagtgcctccgttttcttctctgcaaaataaccattgatttgaaatgtggaggattttgaaacctaagctaagaaatgtgggtttgatatgctgaaaaatagggagctacttaaaatttttgaacaagcaagtcacatgatgaaattaattgaggaacattgtatttgtgattgcatatggatggagtgggaggacctagaggcaaagacattagataggagaccaccagaacaaactagacgtgaaaggtgcagctgtggaaatggaaagagatgggcaaaaccaaaaatcaccacagagaaaaaaaatcatccagatttcatgatagattggatgtattttgaaacacctctctccatacaaatgaaataattcagcaaaattctagaaaatgctggtgtaggagctcagtggaaatctcccgtaagtgctgtgagaaattataaattctggggactccagctgatacagtgtgcattcacttacagcttcctttgcccctttgtacactagagcacaacaggaaatattggcttatctctgtaggaagtgtctctataggagttgcttactgaactgaatatctttgtttagaactaattgacctttctaaaacagcatttttaaagagcttactcaaataaggcagactttaaccatctgataagtcagagacaaatcagccctcttctaagcaaggttgacagtcagtgcaagagaaaagaaagcacagaaagaaaggcaccatcagacaaaagaacagtgtattagtaaaaaccagataattaagaaaattttatttaatgtgaacattgaattctaacacaaatccttttcctgcattatgatagtatctgtgtgaaccaaccttttttcagccctttttgttatggaatgttaagaatgttagtttacaaggttataaagtagaagagtctaattagaaaccagaaaatatctcagtcttttggtctgaatttgttttcctttggttagattcttaaagtagaaaaaaaaaaactactacttattttgtaaacattttgaggattttgattcagatattttaaattattatgagagataaagaataaccctgtccaaaaaagtaagaaaatgaataaaatttgtttaaaagaggattctcttaaaatataaccaaagggacagattttgacagcagtcttcattgttgttccatatgagtgttttctaaacctaacagatgtaagcaataaataagtaaaaaaaaaaaaaaaaa

SEQ ID NO: 436 - DNA, 1674 bp, HOMO SAPIENS
ggggcggggcgtgccggggcggggcgtagtacggactgggcctggcctggggcgtccccgcgaagcctgggcctgtcaggcggttccgtccgggtctcggccaccgtcgagttccgtcgagttccgtcccggccctgctcacagcagcgccctcggagcgcccagcacctgcggccggccaggcagcgcgatcctgcggcgtctggccatcccgaatgctatggccgccgtcgccgtcttgcgggccttcggggcaagtgggcccatgtgtctccggcgcggcccctgggcccagctccccgcccgcttctgcagccgggacccggccggggcggggcggcgggagtcggagccgcggcccaccagcgcgcggcagctggacggcataaggaacatcgtcttgagcaatcccaagaagaggaacacgttgtcacttgcaatgctgaaatctctccaaagtgacattcttcatgacgctgacagcaacgatctgaaagtcattatcatctcggctgaggggcctgtgttttcttctgggcatgacttaaaggagctgacagaggagcaaggccgtgattaccatgccgaagtatttcagacctgttccaaggtcatgatgcacatccggaaccaccccgtccccgtcattgccatggtcaatggcctggccacggctgccggctgtcaactggttgccagctgcgacattgccgtggcgagcgacaagtcctcttttgccactcctggggtgaacgtcgggctcttctgttctacccctggggttgccttggcaagagcagtgcctagaaaggtggccttggagatgctctttactggtgagcccatttctgcccaggaggccctgctccacgggctgcttagcaaggtggtgccagaggcggagctgcaggaggagaccatgcggatcgctaggaagatcgcatcgctgagccgtccggtggtgtccctgggcaaagccaccttctacaagcagctgccccaggacctggggacggcttactacctcacctcccaggccatggtggacaacctggccctgcgggacgggcaggagggcatcacggccttcctccagaagagaaaacctgtctggtcacacgagccagtgtgagtggaggcagaggagtgaggcccacgggcagcgcccaggagcccaccttcccctctggcccagccaccactgcctctcagcttcaacaggtgacaggctgctttcgtgacttgatattggtgtcatagcatttggcctacattaaaagccacaatttcatggggaaaggacaaaatggagagtgactgaggtgctgacctcagtgcaaggctggtgaaccctgcagcgggccagctatggtgggaagcctggcatttggggtgctccttgcaacgtcttaagcaagcgacccccctgacatagcaaaaggtggcaacccatggaggcagaaagaaggacgccagcctgacccttatctgaaacgtcctaagcagagttaatcctggctgctcaggagaggcgacacatttcaaatctccacgagatattctccacacagaaaatcttcttgattctatagagacttaatcatgcctatggctttgaataatcttatgtgatttaaataaattaaatctttataaaaaaaaaaaaaaaaaaaa

SEQ ID NO: 437 - DNA, 829 bp, HOMO SAPIENS
cctcttttccgtggcgcctcggaggcgttcagctgcttcaagatgaagctgaacatctccttcccagccactggctgccagaaactcattgaagtggacgatgaacgcaaacttcgtactttctatgagaagcgtatggccacagaagttgctgctgacgctctgggtgaagaatggaagggttatgtggtccgaatcagtggtgggaacgacaaacaaggtttccccatgaagcagggtgtcttgacccatggccgtgtccgcctgctactgagtaaggggcattcctgttacagaccaaggagaactggagaaagaaagagaaaatcagttcgtggttgcattgtggatgcaaatctgagcgttctcaacttggttattgtaaaaaaaggagagaaggatattcctggactgactgatactacagtgcctcgccgcctgggccccaaaagagctagcagaatccgcaaacttttcaatctctctaaagaagatgatgtccgccagtatgttgtaagaaagcccttaaataaagaaggtaagaaacctaggaccaaagcacccaagattcagcgtcttgttactccacgtgtcctgcagcacaaacggcggcgtattgctctgaagaagcagcgtaccaagaaaaataaagaagaggctgcagaatatgctaaacttttggccaagagaatgaaggaggctaaggagaagcgccaggaacaaattgcgaagagacgcagactttcctctctgcgagcttctacttctaagtctgaatccagtcagaaataagattttttgagtaacaaataaataagatcagactctg

SEQ ID NO: 438 - DNA, 813 bp, HOMO SAPIENS
acccgcgcctgaccgcggcagctcccaccatggcggagaccaagctccagctgtttgtcaaggcgagtgaggacggggagagcgtgggtcactgcccctcctgccagcggctcttcatggtcctgctcctcaagggcgtacctttcaccctcaccacggtggacacgcgcaggtccccggacgtgctgaaggacttcgcccccggctcgcagctgcccatcctgctctatgacagcgacgccaagacagacacgctgcagatcgaggactttctggaggagacgctggggccgcccgacttccccagcctggcgcctcgttacagggagtccaacaccgccggcaacgacgttttccacaagttctccgcgttcatcaagaacccggtgcccgcgcaggacgaagccctgtaccagcagctgctgcgcgccctcgccaggctggacagctacctgcgcgcgcccctggagcacgagctggcgggggagccgcagctgcgcgagtcccgccgccgcttcctggacggcgacaggctcacgctggccgactgcagcctcctgcccaagctgcacatcgtcgacacggtgtgcgcgcacttccgccaggcgcccatccccgcggagctgcgcggcgtacgccgctacctggacagcgcgatgcaggagaaagagttcaaatacacgtgtccgcacagcgccgagatcctggcggcctaccggcccgccgtgcacccccgctagcgccccaccccgcgtctgtcgcccaataaaggcatctttgtcgggagtgagggtgtcctgacatctgaagggc

SEQ ID NO: 439 - DNA, 6866 bp, HOMO SAPIENS
gcagatgcgctggccccagcccggggctgccgctcgccttcccccggagtctcctggacccccggagtctcctggacccccggagcgggaggcagcggccgcgcggcgctggactggagcagaaccccaggactgcgcccccgggagcgggcgcccagagaagcctccccagctttctgaggatgatatctggctaaaaagcgagggagacaactatagtgccaccctcctggagcctgctgccagctctctttccccagatcacaaaaacatggaaattgaggtgtctgttgcagaatgtaaaagtgttcctggaatcacctctaccccacatcccatggaccatccctccgctttctattcacccccgcataatggcctccttactgatcaccacgaatccctggataatgatgttgccagagagatccgctatctagatgaggtgctagaggccaactgctgtgattctgctgtggatggaacgtacaatggaacatcctccccagagcctggtgcagtggttctggtgggcggcctaagcccccctgtccacgaggcgacccagccagaacccactgaaagaacagctagccggcaggcacctcctcacatcgagctcagtaatagcagccctgaccccatggcagaggcagaaagaacaaatggccattcccccagccagcctagagatgcgctgggggacagcctgcaggtgcctgtcagccccagctccacaaccagctcacggtgttcttcccgagatggagagttcactctcaccacactgaaaaaggaggccaagtttgagctgcgtgccttccatgaggacaagaagccctccaagctctttgaggatgacgagcatgagaaagaacaatactgcattagaaaagtgaggccttcagaggagatgctggagctggaaaaggagaggagagagctcatccgcagccaggccgtcaagaagaatcctggcattgcagcaaaatggtggaatcccccgcaggaaaaaaccatcgaggagcagctggacgaggaacatctggagtcgcacaaaaagtacaaggagcgcaaagagagaagggcacagcaggaacagttgctgctgcagaagcagttacagcagcagcagcagcagcccccatcgcagctctgcacagcccctgcctcttctcatgaacgcgcaagcatgattgacaaagcaaaggaggacattgtcacagagcagatagatttctctgctgctcgcaaacaatttcagctgatggagaattccaggcaagcggtggccaagggccagagtacacccaggctgttctccatcaagcctttctacaggcctctggggtcagtcaactcagacaagccactgactaatccgagaccaccttctgtcgggggacctccagaagacagtggtgcctcagccgccaagggacagaaatcccccggtgccctggagaccccatcggcagcaggaagccagggcaacacagcctctcaggggaaggaagggccctacagcgagccttctaaacgtgggcccttatctaaactgtgggctgaggatggagaatttacgagcgcccgggctgtcctcactgtggtcaaggatgatgaccatgggattttggatcagttctcaagatctgtcaatgtctccttgacccaagaggagcttgactctggtctggacgaattgtcggtgaggtctcaggataccacagtcctggagaccctatccaatgatttcagcatggacaacatcagtgacagcggggcatccaatgagacaaccaatgccctccaggaaaattcactggctgatttttctctgccccagacaccacaaactgacaacccctcagagggccgaggagaaggcgtctccaagtcatttagtgatcatggtttctattccccttcctccacgctgggggactctccgttggttgatgaccccttggagtatcaggctggcctcctggtgcagaatgccattcaacaagccatagccgagcaggtggataaagctgtgtccaaaaccagcagggatggagcagagcaacagggacctgaagcgactgtagaggaagctgaagctgcggctttcggctcagaaaagcctcagagcatgtttgagccacctcaggtgtcttctcctgttcaagagaaaagggatgtattaccaaagattctgcctgctgaagacagggcgctcagggaaagggggcccccccagccactgccagctgtgcagcccagtggcccgattaacatggaggagaccaggcccgaaggaagctatttcagcaagtactcggaggcagctgagctgagaagcacagcctccctcctggccactcaagaatctgacgtgatggttgggcctttcaagctgaggtccaggaaacagcggactttgtccatgattgaggaagagatccgagcagctcaggaaagggaagaggagctgaagaggcagagacaagtcttgcagagtacgcagagccccaggacaaagaatgccccatcactgccctccagaacatgctacaaaactgctccagggaaaatagagaaagtcaaacctcctccatcccccaccactgaaggccccagcttgcagcctgacttagcccctgaagaggctgccggaacccagcggcccaagaatctgatgcagaccctcatggaagactatgagacacacaaatctaaaaggcgcgagagaatggatgatagtagtgtcctcgaggccacacgggttaatcgaagaaagagcgcactggctttgcgctgggaagcagggatctatgccaaccaggaggaagaagacaacgaataaacttccttcaacccaggaagcgtctttggtgcttgggagaccaagaaaccaagaaattaacaactgaaagcattttaatggactatttattaaagtgcaaacaaactcagcaatccttatgtagaccagaagctgcaatatacaatgatgaaaatgaaacgaaaaggaagtccccccatcagactctggacacccaggaatcaaaagagaaaggacttttttggtgactcaatcccagtgtctggtttggggccaatctacaatggatccaaaaggacaaaacatgttacaagcaaatcaacatagttgctgcaggcggaactgagaccagcctctctgggcgatgaaggacaatggtggtagggccacttagagagcagtagggcccaggctggtgcagcctacatggcacaggatatttccctgcaccagtttcccacctgtcacttgcagcatcagagggtgttgcattaactccattttctccagcagccataaaatgaatggcgtttctctccatatttgcccagaagaggcagttatgattccacttctcctacatttaattatttttaattgagaacaactcatgatcacaattcataaaatccatattttaagacaatagttcttcatgtcacaaacacaatctattctacatgaggaggctgagaaaggggaagagaaaaacaaaccaaatggatgatgttagctttaggatcgtgtctgcttataatattcactgatctgcagtttatgagaacacattttcacagttatgtttcttcataggaaaactatatttagtgggcaacaactatttttatgatgggatgggggagtatatacacgtatagaatctgtacgcgttgaacaacttggttcaagatggtgggggcatttttagagcggcaataattgaaaaaaaaggcgaactctgccttggagaggtagatgataagaaataaaaaggtgtttataactattttgtattataaagtgggccttagagataggaagaagaatgatggattccttttggatcaatcagaaaggaaacacgaaagaaaagtcaggaaggtagagagagaaaaagggagggaaggagaaagaatgggaataaaataaggaggtaagagatactatttttgctgagcaaccagtgtgtttcaggatgatacaaagaaaaatatagaatagaaataagtgcaggcttggaatcagctacaaatcctaaagatggggtgtgtgtggatgtgtgtgtgtgtgtgtgtacaccattgtgtgtttgtaaaatgtgtatgttcatgagtaagggtgtgtgtgtgtgtgtattaaaattccagagtgaccgtggcacttgggtgtacaggtaattcctccagagctgtttgctggcttcaggagtggagtgagaatttcttttttatgaaaagggatataaaggcaccgagctgatgcagtatttgtaatattaagttgacctaacaaggtatttgcatgagtcacaattacaaagttttgagcggttttgtaatttgacatttaggagagtctcctatttattctcatactttacattcatgcttagtatactatagaggatgccagctttaatctttctgtcatttaaagcaatatgataagggtattcaataattgggtgccctaaatttctggatgagaaaattttcaattctggccatgagaaagaaaaaaaaataaacagccttctttttttttcctttgttttaaaactgtggttttttaaaaaagcaataattaactcagacctcactaaaaatcatttttgtttttatattgttatgtcataagctctattatgttattctaacaagtagcaatttcacaaaatttgtatgtagatgttaacgcacatttcctttgcttcttttattagactagtgttgactttggggggggacatttattcacaaatgagaagtaggcacaaagtaaaaaatggaaccatctactaacaaggatcctttaaaactgccaagggagctctaacttgaagccacatcctacagatggcagcccaaatagcacatgggcaattggcaccatctttatatggttgagtctcctgaatattttgaatgaattctcaacaaaatgtgctagccactggggacgcaaaacaagtaagatccctgttgcaagaaattcattttatagtgagggaggttggcatggagactaaaattctcaggaaaatgagatccgtgttagattagaagtcctgatgtgaaatgggaggactcaggaaggaggatcgtctttacctgaggatttctagccagaggtcccagatgcctgggctgagaacccagcgataagggggcgttcccaaagcagacacagggataagaacagaggaggcagcagcattgcacagccccaggcacagtggcagttaggatggctggagagtaggatagttctatgggttgcccaaaaaatgtgatgcgcttcatgttttctctgactcatggatctggtagagaccatagacatgatatagactaacttccccatttttcacaagaggaaaccatccttatgacttaccttaaagttttttgttctgttttgaaggaaaccatgtgcttcatgaaacctacagttgacaagagaatgtacagctaagagaaaagcttaagaggccacactattcgcggaatggctttagaggcagatgaagtggtctttgaccacagttgattgaaccagagcacttattgcttaaagaataacagagttctagagctgggggttcttgggccatgctccgtgtgtggataaggaaagaaatactgtttctgggactctcccacagtcacaaagctgttttcactgtggcccctacatctcttaacttttgctattactcctatgctgccttccggattactgctgtctatcttcttgctccactcactgaagatcctattataatcccatgaaaatgtaaattacagtttacttgggagagccagattttctctgtgctcttgagttttttattcattcaagaaaccttgggccaccgctttgtacatagcaccgtgctaggctctgggatcccaaatggacccttttaactttctgaagatgggaccgtcccctggaggaaagtcattcctgcctaatccatcgagagaaagaggcttacgaaaaactttgcctctgatgctcagccccacccccaaatagcacacaagcttgttaaccccacctcttacaaaatgtttagattctgtaggtgttaaaagcctttctggaagtattgcattctgccgtgtttataggtgttcactttcctccagagctgattaactactgacatgacttggctttctcatccagaaattatggaaacagggtctgtcagtggcaggaggccgtgctgtgttttacttggatgacacaatgcagtttacttgcctcttcatacccatgcatgctgctcaccctagacaatgacatataagccgtatatagatcaatgtccacatatatatacacacacacatatatatatataaagtgtaacaaggaacactaaaacagtgttgattcttgtctctgaagacaaataattaaaccttttttttcccaactaaagaatggatttaattaaactatgtattgaaaaaaaagtagcctaagtgttagagatggtgaatatattccattttagttaaagaacaaatttcctgaattttaagcattcagtgagctgccaattttgattttgtgttgctctttacccaaattattttttctttgtttttctttttttgggggaggaggggaaaaaagcagcaatactgtgtttggaaattatactctgtatctggttttcctgtgtatgttaaccacttaaatgttattatcctgctttggttttagagtgattgtgaggcattcaatgcaagtatacagttattttctcattaaaatccaatgtgtgttgagtttttataaa

SEQ ID NO: 440 - DNA, 403 bp, HOMO SAPIENS
  misc_feature (72)..(72): n is a, c, g, or t
  misc_feature (89)..(89): n is a, c, g, or t
  misc_feature (99)..(99): n is a, c, g, or t
  misc_feature (116)..(116): n is a, c, g, or t
  misc_feature (236)..(236): n is a, c, g, or t
  misc_feature (264)..(264): n is a, c, g, or t
  misc_feature (324)..(324): n is a, c, g, or t
  misc_feature (341)..(341): n is a, c, g, or t
agagccctgactcctgtcagtaaacttgacagagtcttgaccctccggcctcatggtgactttgctgaaggnacacaaagatgcttccnaagttcattngcctaagagaagactgntgaaaatctgaatttccatctctgacttgttggaaatttggtgaattatccactcagattcccgagttaggacctctactccatccagtgcaggagttctgctacattctaacagttganccctagactctacctaaacactgtcagngctggtgcacatgcatcctttaggcctatttattccaagtgagacagctctgcttgttanaaggttatttcttcaantaagccagtctgtattctttgacttctttttacctcctcatcctcatggctattccatctca

SEQ ID NO: 441 - DNA, 328 bp, HOMO SAPIENS
gagccttaaaagtcagactttgctaaaagaaaacagtatttttttcactgtcctgaatataacattaaggaaataggatttggttaggtctagataacatttaataatttcaactgtgttaaagacaaaagtaatttttgatgtgaccatggacttgtcatgaaaaatataaaggtgaaagggattccatcccccttcctctaaacagaatggaacataagcacaggtttaggctaattcataacctggatttttaaagcttttacatagttgggtttcatgttgttcagatgtcttactaaaccaggtatctaaatgagtgtttttc

SEQ ID NO: 442 - DNA, 2206 bp, HOMO SAPIENS
gagccgcgtagaaggaacgcggcggtgtgccccggaagcggaagtagattctcctatagaaaggctggactacgcggagtggtgacgtttcctcattgggcggaaggttcgctggcactccgttggtcttccagctggtgggagttgacgacgtggtgctgggcgttgggaccctactttatctagttcgggaagttgggttgtggggtcatacctgtctgtctgctcccagctttcttgggtttcttccgacggcgtggggcctcgctaaggaattcccggcccctcagggccacggctttagcggtgtcttttgcgagttcttcgtaagtacatcttaaagctgtcaagatggttctagcagaccttggaagaaaaataacatcagcattacgctcgttgagcaatgccaccattatcaatgaagaggtctgctattgatcttgaagagatggcatctggtcttaacaaaagaaaaatgattcagcatgctgtatttaaagaacttgtgaagcttgtagaccctggagttaaggcatggacacccactaaaggaaaacaaaatgtgattatgtttgttggattgcaagggagtggtaaaacaacaacatgttcaaagctagcatattattaccagaggaaaggttggaagacctgtttaatatgtgcagacacattcagagcaggggcttttgaccaactaaaacagaatgctaccaaagcaagaattccattttatggaagctatacagaaatggatcctgtcatcattgcttctgaaggagtagagaaatttaaaaatgaaaattttgaaattattattgttgatacaagtggccgccacaaacaagaagactctttgtttgaagaaatgcttcaagttgctaatgctatacaacctgataacattgtttatgtgatggatgcctccattgggcaggcttgtgaagcccaggctaaggcttttaaagataaagtagatgtagcctcagtaatagtgacaaaacttgatggccatgcaaaaggaggtggtgcactcagtgcagtcgctgccacaaaaagtccgattattttcattggtacaggggaacatatagatgactttgaacctttcaaaacacagccttttattagcaaacttcttggtatgggcgacattgaaggactgatagataaagtcaacgagttgaagttggatgacaatgaagcacttatagagaagttgaaacatggtcagtttacgttgcgagacatgtatgagcaatttcaaaatatcatgaaaatgggccccttcagtcagatcttggggatgatccctggttttgggacagattttatgagcaaaggaaatgaacaggagtcaatggcaaggctaaagaaattaatgacaataatggatagtatgaatgatcaagaactagacagtacggatggtgccaaagtttttagtaaacaaccaggaagaatccaaagagtagcaagaggatcgggtgtatcaacaagagatgttcaagaacttttgacacaatataccaagtttgcacagatggtaaaaaagatgggaggtatcaaaggacttttcaaaggtggcgacatgtctaagaatgtgagccagtcacagatggcaaaattgaaccaacaaatggccaaaatgatggatcctagggttcttcatcacatgggtggtatggcaggacttcagtcaatgatgaggcagtttcaacagggtgctgctggcaacatgaaaggcatgatgggattcaataatatgtaaagaaaatgccttaatataaactgactcagttgaatacctaatttgctgagacctcagcgtttcccttctttttgcgaattggggggaaagtgtatttttcttgcttatcatgcactctttccttttcttctcgcccgcttttcccctccttttctttttccttccttctttcctccctttaatataagggagaaatacatggtttttgtggaaatcattatatgtttgctttagattttcttctgttttcaccatcataacacttaagttaaatcatgatgtaaaattttagtacttaaaggtttttaattatctcgaaggccaagcattgcatttgtaaacagtcctggtcagtagttaaataatgtttcaattaaagtgctgtaaaataaacttcaaagtggttataagttaaaaaaaaaaaaaaaaaaa

SEQ ID NO: 443 - DNA, 8720 bp, HOMO SAPIENS
agtggtcgagtgtcgggaggaaggactgcttgtgtgcggggtgggggggggtggtggagagcgggggcggggattcagcgcgtgtatgtaaaggtgcagcccgtgtgctaggcgctgggtgcgcgcgcggtgtctgctcgggtgcgcgcgcgcgccgctgcccgcctgcccgccggcccgcctgctcgcctgctggggctgctccgtgggtttgacgggcgagcgggcgcggaggagctctgtccggaatcacatagataccatcgtggaaacagcagcgcaggtcacggcgccgcgggccctgcaccagacgctgggctctagagattatttctctttattcagaagcatacagttgtttgctgattgcaagaagatgtttctgtggctgtttctgattttgtcagccctgatttcttcgacaaatgcagattctgacatatcggtggaaatttgcaatgtgtgttcctgcgtgtcagttgagaatgtgctctatgtcaactgtgagaaggtttcagtctacagaccaaatcagctgaaaccaccttggtctaatttttatcacctcaatttccaaaataattttttaaatattctgtatccaaatacattcttgaatttttcacatgcagtctccctgcatctggggaataataaactgcagaacattgagggaggagcctttcttgggctcagtgcattaaagcagttgcacttgaacaacaatgaattaaagattctccgagctgacactttccttggcatagagaacttggagtatctccaggctgactacaatttaatcaagtatattgaacgaggagccttcaataagctccacaaactgaaagttctcattcttaatgacaatctgatttcattccttcctgataatattttccgattcgcatctttgacccatctggatatacgagggaacagaatccagaagctcccttatatcggggttctggaacacattggccgtgtcgttgaattgcaactggaagataacccttggaactgtagctgtgatttattgcccttaaaagcttggctggagaacatgccatataacatttacataggagaagctatctgtgaaactcccagtgacttatatggaaggcttttaaaagaaaccaacaaacaagagctatgtcccatgggcaccggcagtgattttgacgtgcgcatcctgcctccatctcagctggaaaatggctacaccactcccaatggtcacactacccaaacatctttacacagattagtaactaaaccaccaaaaacaacaaatccttccaagatctctggaatcgttgcaggcaaagccctctccaaccgcaatctcagtcagattgtgtcttaccaaacaagggtgcctcctctaacaccttgcccggcaccttgcttctgcaaaacacacccttcagatttgggactaagtgtgaactgccaagagaaaaatatacagtctatgtctgaactgataccgaaacctttaaatgcgaagaagctgcacgtcaatggcaatagcatcaaggatgtggacgtatcagacttcactgactttgaaggactggatttgcttcatttaggcagcaatcaaattacagtgattaagggagacgtatttcacaatctcactaatttacgcaggctatatctcaatggcaatcaaattgagagactctatcctgaaatattttcaggtcttcataacctgcagtatctgtatttggaatacaatttgattaaggaaatctcagcaggcacctttgactccatgccaaatttgcagttactgtacttaaacaataatctcctaaagagcctgcctgtttacatcttttccggagcacccttagctagactgaacctgaggaacaacaaattcatgtacctgcctgtcagtggggtccttgatcagttgcaatctcttacacagattgacttggagggcaacccatgggactgtacttgtgacttggtggcattaaagctgtgggtggagaagttgagcgacgggattgttgtgaaagaactgaaatgtgagacgcctgttcagtttgccaacattgaactgaagtccctcaaaaatgaaatcttatgtcccaaacttttaaataagccgtctgcaccattcacaagccctgcacctgccattacattcaccactcctttgggtcccattcgaagtcctcctggtgggccagtgcctctgtctattttaatcttaagtatcttagtggtcctcattttaacggtgtttgttgctttttgccttcttgtttttgtcctgcgacgcaacaagaaacccacagtgaagcacgaaggcctggggaatcctgactgtggctccatgcagctgcagctaaggaagcatgaccacaaaaccaataaaaaagatggactgagcacagaagctttcattccacaaactatagaacagatgagcaagagccacacttgtggcttgaaagagtcagaaactgggttcatgttttcagatcctccaggacagaaagttgttatgagaaatgtggccgacaaggagaaagatttattacatgtagataccaggaagagactgagcacaattgatgagctggatgaattattccctagcagggattccaatgtgtttattcagaattttcttgaaagcaaaaaggagtataatagcataggtgtcagtggctttgagatccgctatccagaaaaacaaccagacaaaaaaagtaagaagtcactgataggtggcaaccacagtaaaattgttgtggaacaaaggaagagtgagtattttgaactgaaggcgaaactgcagagttcccctgactacctacaggtccttgaggagcaaacagctttgaacaagatctaggtcatgtaatcttacttcatacagaggacatttatttaatgatgaaagtgccttttgttgacttctaacttccaaatactatattatcaataggcatggaggcaggtgtttccaagggtgtctcattaactgtagctgcaaagatgtgtcaagtagaagagaatttgtttaatagattttactacataaaacctatactgtggagtcctgtggggatactgcaaactctattgccaaagggatgctttatacacataatactgaatttaacctcaagaggcaaatctgttttgtaccccaatgcaaaaccttcgtctctttgtgctttgtaaagcaaactcaagaaaactggtacacctgtaccagctgggtcctttatcttgcacgtagattaagttggtggaactggaataatccttttgatttgtggcattgtaacaactccgtgtaaagattatctgaaaagtaaaaaaaaaaaaaaaaaaaaaaaaaaaaaaaaaaaaaaaaaaaaaaagcatgcaaagagagaacactcgatagtatttgtaaattggtaacctttatggcctgcatcttgaaaccgctggatttataatgttaatttgtgcaaatacttgtttaaaatataacatacattacataactataaaataaatttgaacactttaagcattacctgtctatacataaaaatctaaaagaaaaaatcaacgtgagttagatagcatttgtgatgatctgaagaaatatgtgacgtttatcagaattaaacatggctcaaattaaactaacactagagtttgttctcagttacgtgaaacacccacaatccttcaaggttgtccaaaataagcagagtgcttactgtgtgagcgcacccaaagctatttttgtaacataattcatatttatgaagtactttgtatactaaataggaaaatatgtactccttaatatgtatttaatatgcctgacttgttttcctgatcacagtgaatttatcagtaagtataaatgtagacagaaagaaatatactaaactgaaacaagctggtgtgaacagaaatattctggactttgtgatcaggtgtaacttaaaaacaaaaaaattttaaaacaaacagaaaagaaaaaaatacaaaagaacagtcaattctgtgctattcttgtgaatttagcgtattatcttcagatttgttaccaattgtgcattcaaaaataagttccttagttttctagtattgtgtctggggcagttgttatttgccatcggttgtcttgcttttcaggattctatgagcttaattcaaatagttttcgctacaagtatttaaaaaataatgaataaggttaatagttatatcttgtatgcatcagtatcctgttctttcatcattcagactactatcagataatctagtagaactgtaaacatcatggtaatcttggctatgaaagccacactgtaaaaatgcttgcattggtttcagatgagttcacagtctgcaactacaaatgatatgcccctgtgtttgcttttgctaagatctaagtcaaaatttgttaaaggaataaagtaactgataatgggtgatgtcggaacttttgtaggagctcccgattaacaaagtgatattcagaaacacattgtcttcttggcctgcctgcatatatatatatagatatatagatatatatagatatacatatatatatatgtgtgtgtgtatatatatatgcgtgtgtatatatatgtgtgtgtatatatatacatatatgtatgtgtgtgtgtatacatatatatatagtgtgtgtgtgtgcatgtgtgagagtgtgtgtcctatctcttataattaccttatgaatcagtaagataaccaagaaggtaaacatagccattcctcatgattgcaagtggcatattttttctgttgcagcttccaaaatgatactatgtttatagttgcagtagctgttcctttattaatcactaatttcagggctttatgtgtttgttgcaagacaaaaaaagaagcttggctttcttgggtgtgtgtgtatgtgtgtgtgtgtctgagtgtgtgtatatatatatatgtgggtatatattcatacatatagataatttggaaatcttttttaaatagcaaaaaccgtctccatgtgtatgtgctggtgctcttaaaactttagtgtgtaattttaatttttatgacatctgtgaaaactttatatgaatataaaataattcaaacaaataattgctttctgatcttgaaagaaaagacaagatgtgtgcccaacagcttttttcatctacaatttcataaggacttttgatatgccattaccatgcatgcacacatccatggattaaagggctcctaatgtatactgacaggataaagatgcaaaggcttcaaagaaagtgttttagtttagtctgtcaataaagtatggcttgaaggatcttaaatagacacttataggaggaatcagaaagttccattcatggtctggggataataggtcatttgaatgatacttttattcagtgtggtgatgttctgaagatgtttcaaggtttctgcagaattctcaatggcaagagtacctgccaccatctcaaaagcttgctgtagcatattggctatctcatactcttctgctaaaaggtataaatgttcaactttttttaaaaagtaatttaacatatgtggttatttggaggttcaaattgtaaatgaaagtaacaaattcttggttaaggctaatatattttccttaactaaagtcattgtgcctacattatatagtgtacacaattttgcacctgtctctcattagttctagttgtacattttatgataatgtagttaggtataagttttgagttgagtacaagaacagttaaaatactgtatctacattttgttggcttcaactataaccttgatgttagtttaacccctggaggtatgatatgtacatcagtacagcatttttagtggaacttggatgcaaacctataaaatccaagaagtgctcatttctaatgtgggctgacacatcatgggcttcttggcactatagtcatgggtatggactacgttagaatgattgcaaacaaatttagatcttatgaaatcagtgaaggggttgagataatatattgtgtccatgtaatataaatcaagttttaaattatttttttatgaaatcaataaagatgattcaattctttaaaagtaagactttgtgtaattttatgagaaagcagctattaaagtagagtgattcaagtctataaggcaatttatattctatatttagtttttcattctgaatagactgaaaaaatatatgaattagaaatttatttaagaccatctttcttttgttgctttttttaaacatttacttttctttaagccataaggatgcataaattatacagggcatgaccttatgagtaacatcaacaggtatttcagaaataacagaacacgtctagaaatgtatggtggtaatattaatctataacattttttgcatgatttgtacattgacattgtatgaaatgagcacactgaggtttttttgttgttactgtcgcatccaaagagttggggagaaactatattaagaatgtatttataatcactattttaaaataaagtaaaaaaaatattgtattgtttttaccctgatttgattatcagtattttaggttaatttgtaagagaaaaatcaagtaatgctgtaaaagctcatgtaaatcacagaaaagaactgttttaatgacttttgtttgcttttaataacatcaaggtattagaatttattaattgccatttttatgaaagtattaataaaattgtttgctacaatgatatttctgaagccacagtttgttaaatatatttgtctttccattatttttcagaaaaatataaagcagtaaccaaactgatcatttcacccagatttgagggtaagatatagctttagcctactgtttatattcaacttaactgctaaatctctgttaaaaaaaaacgctttctttagaaacatattttcaatctgtgttccttcccactggcagcccctttggagaagagtctgacagtgccaagatcaacatgctttgattcttgcccattcttttgaatcagttggattctgacataacttcagataagcaaatactaatattcagtcttaactatctgctcaaatacttttagaaacccttcagtacctctgtattccattgccagtttgcctggttacaggttagttacccacttatggagtgaattgtgatttgtatttggttcttttaaagatgaccaaaattatcaatccatgactttacccaaattattactgttgtggaaaatgaactaattgcattacggttaacttgagggcagaaatgaatgtaactgactatattgaccaatacggtgggtttaaggttcatatatttatggtaagaaaagtaaacacagaaacagagagagagagagaatataaattaagattgttgttgctttacacgtatacataggtatgctgaaggtgtgaacagtatagatagcatatgcaagtacttttagactaaatgccttatgcatctgaggagatacaccgtaggattgtgttattttatttatttatgagtactgagcacagagctttgggttccagccacttctgttatgtagacaagtggcatcaaatcaaggtttggcatcatttctagtgctcatcccattagtcactgtggtcagatgggctgaactaaaataaaatatcctgtttgtggcttcacttacctagaataactggtgacatatatcaagttcacctgataattgttaactctcaatttcagatttcctaaggatctattctttgttaatttaaaagctaatgggaactcaaatgaattttaataacttactttgtacaaaactgcccttaatctaatttggaattttattttgttttatttatttatttatttatttatttaatgtctttttagtttctactggttgataggattgtgttttaaaagggaaaatcgaggaagggaaattgtgttgtttatcttataggaaatgatggttttttttaatttttaaaaattattttaacctgttgttcttatgtctacaaggggaaaataaagtagggctctgaggcatttgaatattttagaccaaataattgctattgagaataaagattcaagcttctcattaatccataattgacatttccactgactgtaggacccagaaccaggagagaattactcaaccctccacttcagtttacttttgtagacactgcctaaatagaaatagaaattctggtgatttcaataacatcaaaaatgacaaattacctgtttaacttaaaaaggtcatgaatgaggccttcagagaaataatattaataatataatgaataaccatagagcagtgcctttaaattagctataggaaggaaatagtcttttcaagtttctgaacaatatatttctcttagttggcacctcacaaatactagatcatgtcagacgctgctggttaatagctgcaggaaggcatgttgtgcagtggatattgctcatggaagtgtgtgaaaatcatagtaagctttgttctccctgctaagacttgctatgtatatttccatcattgtttcatgtaaactgaaccattgtggtaaacttttggagttgatatggaatcactttaatgctgttttcacaaataaaagttttttcttataggtcaaaaaaaaaaaaaaa

SEQ ID NO: 444 - DNA, 3108 bp, HOMO SAPIENS
gcctctggctcctcagggcattcccggcggctccgggtttggcaacgaggacgggggagtgcgactgcgtctcgggcagcatggccgagaagcggcacacacgggactccgaagcccagcggctccccgactccttcaaggacagccccagtaagggccttggaccttgcggatggattttggtggcgttctcattcttattcaccgttataactttcccaatctcaatatggatgtgcataaagattataaaagagtatgaaagagccatcatctttagattgggtcgcattttacaaggaggagccaaaggacctggtttgttttttattctgccatgcactgacagcttcatcaaagtggacatgagaactatttcatttgatattcctcctcaggagatcctcacaaaggattcagtgacaattagcgtggatggtgtggtctattaccgcgttcagaatgcaaccctggctgtggcaaatatcaccaacgctgactcagcaacccgtcttttggcacaaactactctgaggaatgttctgggcaccaagaatctttctcagatcctctctgacagagaagaaattgcacacaacatgcagtctactctggatgatgccactgatgcctggggaataaaggtggagcgtgtggaaattaaggatgtgaaactacctgtgcagctccagagagctatggctgcagaagcagaagcgtcccgcgaggcccgcgccaaggttattgcagccgaaggagaaatgaatgcatccagggctctgaaagaagcctccatggtcatcactgaatctcctgcagcccttcagctccgatacctgcagacactgaccaccattgctgctgagaaaaactcaacaattgtcttccctctgcccatagatatgctgcaaggaatcataggggcaaaacacagccatctaggctagtgtagagatgagcgctagccttccaagcatgaagtcggggaccaaattagcctttaactcataaagagagggtagggcttttctttttccatatgtcaattgtggtgttcccagaatgtatagcagttataaaaataggtgaaagaattgttagcttgtaaatactgagagattggtgatttatataaggtaatctgttagtcttaaaatagttaaaagtttgtatttttagattattatgtagtaggttagatccctcttgttttgacttccactgactcattctgaaccccctaagcacccaggccagaggcaagaacctgggctgtaactgccacctgacaccgctgactggctaaatgctttgcagaaagtgatgaccttacaccacaaccagcttctccaggtcatatgtgccttacctccagagagtctttttttttttttttctgagatggagtttcactcttgttgcccaggctggagtgcaatagcatgatctcggctcactgcaacctccgcctcctgggttcaagagattctcctgcctcagcctccccagtagctgggattacaggctcatgccaccatgcccagctaatttttgtattattattattgttttttagtagagacggggtttcaccatgttggccaggctagtcacgaactcctaacctcaggtgatccacccacctctgcctcccaaagtgctgggattacaggcatgagctaccacacctggtttggagagtcttaattaaggaaatttccctaatgttcatttattttctaaatccagaccgtgtttcagaataatccttacttgagagtagccattttcttgcctgtacttgtcagaactagaggaaatagccaagactaatgaaaaagattactctaacccttaaaagacttttaaattcactactagagtggtcattttaaaaatacatccatgttttaacttatttgagccttctttatgagtaaatgattcctccttgttctgtctttcaaaccagctaaatatttgtcacaaaagtgcttttttctcactgttgcctattttcatatatcaggttttaaatagttttaattttttaataaaattttctctacgttctatatgcaattgttatatatctatttgaatagctgaaggactaaaatacttttttaagagataacttcaggaaaccattatattttactatctgcatgctgttaactgtggtacactgtgaaatatgttgattacaaacccattcattacatagtataaggaattcacagtatattgactatatagtgtctaatgatcttgggcagatactgtcaaacttacaatatctatatagatgtaggtctttttaaatttacctagtcattcttctatcatgtatattgatgctgaaagaggaactggtcagctcctctggacaacaaattcttagtctataatattaggagacatcttctgttttgcaaatgtctgtgaatctgagcaacctggcattctgcttactggccagaaagctggcgggtgacatttgtaacatttcctctttgagactctgagttcacctagagaagtctaagcataacagctttctttcccagcacgagcctttatagctctctttagctcaaccactctgtccatccagccaatggatgtcccttcccctgtaccccaatttcaagcttattttaggaagccttgaactaccatgtatcctggctcctagctgagtttattagaggtatggagcagtgcaacttaaactcaagttgcacttacattttgaattttaaaatgatggttttatctgttgtgtgaagtggttcacccttgaggaccaggagcctccatatcctgactgaaaaccttttctgagacttagagtaacagtgcttttggttccttgagttctcctgtctccagataccaaatgaccttgacttttctgccttgtgaattcgtagtccaatcagctgaaattaaatcacttgggagggacgcatagaaggagctctaggaacacagtgccagtgcagaagtttctccaggtggcctccctttccaacaatgtacataataaagtgtatgcactttcactaataaaaaaaaaaaaaaaaaaaaaaaaaaaaaaaaaaa

SEQ ID NO: 445 - DNA, 6550 bp, HOMO SAPIENS
ggggttataattgcctctcaccccccggaggggttattttgggggtggttggaggcggtggcggcggcggcgaggaggggaatttccttgtgcctccattcccgggaggggggagcggcgttggaggccaccgtttccagcatcaacaacagcaacttgtgattggcggtgaccggatattcagttgcacatccccacatcaatgcactgccaatgggttatatcctgtgttgtgacctcatggtttaagtgggaataaagatgagtataagcagtgatgaggtcaacttcttggtatatagatacttgcaagagtcaggattttctcattcagcatttacctttggtatagaaagccatatcagtcagtccaatataaatggtgccctcgtcccacccgctgcattgatttctatcatccagaaaggtctacagtatgtagaagcagaagttagtattaatgaggatggtaccttgtttgatggtcgaccaatagagtctctgtccctgatagatgccgtaatgcctgatgtagtacaaacaagacaacaagcttatagagataagcttgcacagcaacaggcagcagctgctgcagctgccgcagctgcagccagccaacaaggatctgcaaaaaatggagaaaacacagcaaatggggaggagaatggagcacatactatagcaaataatcatactgatatgatggaagtggatggggatgttgaaatccctcctaataaagctgttgtgttgcggggccatgaatctgaagtttttatctgtgcctggaaccctgttagtgatctcctagcatcagggtctggagactcaacagcaagaatatggaatcttagtgagaacagcaccagtggctctacacagttagtacttagacattgtatacgagaaggagggcaagatgttccaagcaacaaggatgtcacatctctagattggaatagtgaaggtacacttctagcaactggttcctatgatgggtttgccagaatatggactaaagatggtaaccttgctagcaccttagggcagcataaaggccctatatttgcattaaaatggaataagaaaggaaatttcatcctaagtgctggagtagacaagactacaattatttgggacgcacatactggtgaagccaagcaacagtttccttttcattcagcaccagcattggatgttgattggcagagcaacaacacctttgcttcttgtagtacagatatgtgcattcatgtctgtaaattaggacaagacagacctattaaaacattccaaggacatacgaatgaagtaaatgctatcaaatgggacccaactggcaatctcttggcctcctgttctgacgacatgactttaaagatatggagtatgaaacaagacaattgtgtccatgatttgcaagcacataataaagaaatttatactatcaaatggagtccaacaggaccagggactaataatccaaatgccaaccttatgttagcaagtgcatcctttgattctactgttaggttatgggatgtagaccgagggatatgcatccataccttgacaaaacaccaagagcctgtgtacagtgtagctttcagtcctgatggcaggtatctggcaagtggttcttttgacaaatgtgtacacatctggaacacgcagacaggtgctctagttcacagctataggggaacaggtggaatatttgaagtttgctggaatgcagcaggagacaaagttggagccagtgcatcagatggttcagtttgtgtattagaccttcggaaatagcgctactagttggaagccatggaccgactatgaatgtgtacatagccaaaatgactgtccctgacccatgtactgctatagtcccacttgaaccatggccagtccactacagccaaatctaaaagaaatatatacatacagtgtatataaacaaaattgcaccctgaagatgacagagttttgtcacagcttgtgaattctgttcaccaagtgctggaatctaatctgctgtgcccctaaaatagcatttagaagttttggatatgaaaaacagaagagagaaaaatatacattataaaagcagaacatacatgtaccagtttttggatactaaatgacagccttgtttctcccctttgaatcagcagacaccatggattatattctttttttcccttcagtagtgagcagtttgtatgtacagagaaaatggacttacaaaaacttgcagcagtagtttgttcttgctttaaaatttcgtttttggtttagattatggatgcatgaagtaagggagtgaatcagtttcttgtttatatttttttcaccttttaaacaaaaaattctttaaaatattttaatgcattcttttgaagaggtagatgtttggtacattttatggctcccagagcatatattcagttggtgcatgttgtggaagggggaattggaaattaaatgaaaacctatgactttggtcatgtcaatctgtaagacacatcagtaaaagggtattatgctctgttggttttgtttttttgttttgctttttttttttttttttcttttttgttttttggtgatgtggcttaaatgcaatagtttcttttttgggacatatttctgccaattaaagactagaagggcacaactttttttttaattaccatagagaagatacattaaaaaaaatcttctgatgttttgtagccataactaaattatggtaaaaatgtgcactattgtgaaaaggagcaacgtagttttgggttttttgttgtttgtttgttttgctttgttttttaagagattaaaatgtttctggataaggattagcttctcgaagtgtccatcattctgtgtagaagcttaaatatgtaatgtaaccaaactccagtattaaaaatctctcatgttgttttctttatacaaagcaagataacggcatataacactgccattacatggcaaaatgtttgctaccttagtttaaaaaacaatctcaaacaaaagacttgcttcaaggtgtttttaaatagcagtgattcagaattttttttaatgaaagtataattgcactaaccttcttcctgctgctctgattctgcatttgtggtacttgtgactacgttttttcaaatatagatagatttaagctgctaatttttttttttttagtaatcactactatatcatgtcttttactctgtttataatatcaagtattttcttaaagatatagatattaaaccttgtgctcatgcaacttagagtaacatatacagacaaatgattgcatgaggccatgtttatatgtgtgactaataaggcttgtcatgattaacataatccaggtatgtcatttctgaagagaatagtcatcaaatttatatctcgaagattttaattaaggaattgcttattgttgagcttagcaaattaataacactatttctgtcactaattattttgaggccttttagtactaaaattttaacctgtgttctaagtagaaactgatttaacccaagtaatgcagctttgattgatttcagcattcgttgctttgctatttttacaaaacagcattgattgaagcaagtcttggttttactaaggtagggtagcatttgctattggtaaagagaataaatacacttaatttcacaatacattgttatatgtaccccagttgttgttagtggggactatgatactgtaataatatttttaaaaatttacatcaagagaggcagtcattcacgatggttttgtgccagctctttttagggttttggatcacattagagatatttagaacatattaccctgtgacttacgtaggaaacctaatatgctgagtatctggcacttgaattcctgcttttattgctggaggtccacatctgtggttgacctctgttattgtttaaaaaaaataaataaaaattaaaaaaatctgtgcaataattttaaaatgtgctcccaggaatagacacaaatgttttgagtatcttttaagctgcattttcctttagtgatgcatttgtcaattgcactgaatttaaatctgaaagtcagaggtgattattgatagtacttttgtattttgatatggacagtttattcatttgcatacagttattgactttttcccagctgattaaaagatagtcaagaaattctgcaatatagctgccaaaatagacagctacatttttatgatattgtcatcttttctgttttttttttcttttttttctttagctattttacttaagcataatagccacaataggacatataaaagattataaatacagagctttattatcctgacgtcttgggtcttttaagtatatacttttctgaaaggtatccattttgtaggcttgggttcttcatgagcatacgattgtttatttttgctgctgttctcaacatcatcattgcctgctgatgtgccacgatgctgctccaatagacagcaataagattgtctctaatttgagcagtaacatgattgcaagagaccaagtttcacagcttgtaaagttctgtatttgggattcttgcttatttttccgcctgtgtttttctgagaacttattcctgatgatcaattgaatccagtagtttttctatgctatttgttgttgtataagctactgtaagaaacttatcataaggaaaaatagaaaggaaaacttgaatcaatactcattgattaaaatggaataaagaaagagcagctgccacttttaaacaacataaaggaatatctttttttgtctccgtgtaggaaatcccataagttcttatatttgttccagttcccatttcctgccattgaccagataacatcattgactttcaaatgacttttagaagtgataactcttaatttcctaatagatactagattgtattgaattctgttttaattattctctaggtaagtatgttttaggattaaataccttttacagatactgaaagtgcctccttttgtggtgtaaaaaacaaattatggtgcaaaaagtaatcactagattgaaatacatgaaggttttttgctttttgacatacgaaaatgtcaagagaaaggccaaagatttgtactttttcacttacaaagcactcctttttcccttaaacttctttctgtcaaattagatttaatgagagagtactatttttaaggagctatctgtttatgtagaatgattttgttaagagtaatgtaaactattattgagtagaggcctaaagaggactgtgcatttttgctatttaaaggaatcacaaatgatcatacttaagtgagcaaaaatgacaagttttactagctaagtagagaaataaatctcaaatgcagcgctacaattttcattatcttaagtacattgtacatttctacagaacctgtgattattctcgcatgataaggatggtacttgcatatggtgaattactactgttgacagtttccgcagaaatcctatttcagtggaccaacattgtggcatggcagcaaatgccaacattttgtggaatagcagcaaatctacaagagaccctggttggtttttcgttttgttttctttgttttttcccccttctcctgaatcagcagggatggaaggagggtagggaagttatgaattactccttccagtagtagctctgaagtgtcacatttaatatcagttttttttaaacatgattctagttaaatgtagaagagagaagaaagaggaagtgttcacttttttaatacactgatttagaaatttgatgtcttatatcagtagttctgaggtattgatagcttgctttatttctgcctttacgttgacagtgttgaagcagggtgaataactagggcatatattttttttttttttgtaagctgtttcatgatgttttctttggaatttccggataagttcaggaaaacattctgcatgttgtatctagtctgatgtacttatccatctcattacaaacaaaaacacacagactgcatttgtagctctgtaatccttgaatacggaagtaaattttcttctttcctgactttgacattgtagctatactgtttccatttttgtttttacaaatcctttgggtctaattctgtgagcctacctatagcactggattaaaatgtctgcatcatttctttagttatccagttaactttaaaactgttgtaaaagtgtaaaccagcccatgacaggtttttgtacatgttaaagaacttcattgttcagttttcatgattattgtgtaaggaagactgatgtagatgttctgtgctgtcctggaccatgttaattacacttacgacgtattttagttccacatcacaatgatttgtccccagtgacccttttatcctttctaggcacatttcttgttgttgttgttgttgcagttcccctttgcattgtattgctttgacaactgtaatttgaatcagatctgaaagaggtccagaataaaatatattttgatatta

SEQ ID NO: 446 - DNA, 6312 bp, HOMO SAPIENS
gtttttaaacgattattaccacctctctctcccccccaacccccactttcacaacgcggccccccacctttacctccctaagttcttcatctctttcgacattttttttgaaggctgatgggggggagggtggaagagaaagagtgaagaaaagttgcgagcgtctcctctcttcctaagcctcccgccccaacccacccctcagagaaggagaagataatatactgaaaagaagaggaggaggagagcgacgggacgggacgcgagcgggagcgcagccgccctctcggctccgcggcggcgcctcgcaagtccgggaggcgaggggggcccgaggggagacgccgtgacaactttcgtttccctctgagggaattgggaggtcggcggccccaaaagctttcagtccagtgtaaagctgttggagcgcgggagcaaaggtaaagaatgatgtaatgcgctggctgctccaaagcatcttttgttgtggaatggttattccagtcatctctttatgaatcaaatgtgaggggctgctttgtggacggagtcctttgcaagagcacatcaacgggaaagagaaagagacattcacttggagggctcttgctgaaaatgggtttaactctccttttgccagtcaccaccagcctgacctcatacacttttagtacaatggagtggctgagcctttgagcacaccaccattacatcatcgtggcaaattaaagaaggaggtgggaaaagaggacttattgttgtcatggcccatgagatgattggaactcaaattgttactgagaggttggtggctctgctggaaagtggaacggaaaaagtgctgctaattgatagccggccatttgtggaatacaatacatcccacattttggaagccattaatatcaactgctccaagcttatgaagcgaaggttgcaacaggacaaagtgttaattacagagctcatccagcattcagcgaaacataaggttgacattgattgcagtcagaaggttgtagtttacgatcaaagctcccaagatgttgcctctctctcttcagactgttttctcactgtacttctgggtaaactggagaagagcttcaactctgttcacctgcttgcaggtgggtttgctgagttctctcgttgtttccctggcctctgtgaaggaaaatccactctagtccctacctgcatttctcagccttgcttacctgttgccaacattgggccaacccgaattcttcccaatctttatcttggctgccagcgagatgtcctcaacaaggagctgatgcagcagaatgggattggttatgtgttaaatgccagcaatacctgtccaaagcctgactttatccccgagtctcatttcctgcgtgtgcctgtgaatgacagcttttgtgagaaaattttgccgtggttggacaaatcagtagatttcattgagaaagcaaaagcctccaatggatgtgttctagtgcactgtttagctgggatctcccgctccgccaccatcgctatcgcctacatcatgaagaggatggacatgtctttagatgaagcttacagatttgtgaaagaaaaaagacctactatatctccaaacttcaattttctgggccaactcctggactatgagaagaagattaagaaccagactggagcatcagggccaaagagcaaactcaagctgctgcacctggagaagccaaatgaacctgtccctgctgtctcagagggtggacagaaaagcgagacgcccctcagtccaccctgtgccgactctgctacctcagaggcagcaggacaaaggcccgtgcatcccgccagcgtgcccagcgtgcccagcgtgcagccgtcgctgttagaggacagcccgctggtacaggcgctcagtgggctgcacctgtccgcagacaggctggaagacagcaataagctcaagcgttccttctctctggatatcaaatcagtttcatattcagccagcatggcagcatccttacatggcttctcctcatcagaagatgctttggaatactacaaaccttccactactctggatgggaccaacaagctatgccagttctcccctgttcaggaactatcggagcagactcccgaaaccagtcctgataaggaggaagccagcatccccaagaagctgcagaccgccaggccttcagacagccagagcaagcgattgcattcggtcagaaccagcagcagtggcaccgcccagaggtcccttttatctccactgcatcgaagtgggagcgtggaggacaattaccacaccagcttccttttcggcctttccaccagccagcagcacctcacgaagtctgctggcctgggccttaagggctggcactcggatatcttggccccccagacctctaccccttccctgaccagcagctggtattttgccacagagtcctcacacttctactctgcctcagccatctacggaggcagtgccagttactctgcctacagctgcagccagctgcccacttgcggagaccaagtctattctgtgcgcaggcggcagaagccaagtgacagagctgactcgcggcggagctggcatgaagagagcccctttgaaaagcagtttaaacgcagaagctgccaaatggaatttggagagagcatcatgtcagagaacaggtcacgggaagagctggggaaagtgggcagtcagtctagcttttcgggcagcatggaaatcattgaggtctcctgagaagaaagacacttgtgacttctatagacaatttttttttcttgttcacaaaaaaattccctgtaaatctgaaatatatatatgtacatacatatatatttttggaaaatggagctatggtgtaaaagcaacaggtggatcaacccagttgttactctcttaacatctgcatttgagagatcagctaatacttctctcaacaaaaatggaagggcagatgctagaatcccccctagacggaggaaaaccattttattcagtgaattacacatcctcttgttcttaaaaaagcaagtgtctttggtgttggaggacaaaatcccctaccattttcacgttgtgctactaagagatctcaaatattagtctttgtccggacccttccatagtacaccttagcgctgagactgagccagcttgggggtcaggtaggtagaccctgttagggacagagcctagtggtaaatccaagagaaatgatcctatccaaagctgattcacaaacccacgctcacctgacagccgagggacacgagcatcactctgctggacggaccattaggggccttgccaaggtctaccttagagcaaacccagtacctcagacaggaaagtcggggctttgaccactaccatatctggtagcccattttctaggcattgtgaataggtaggtagctagtcacacttttcagaccaattcaaactgtctatgcacaaaattcccgtgggcctagatggagataatttttttttcttctcagctttatgaagagaagggaaactgtctaggattcagctgaaccaccaggaacctggcaacatcacgatttaagctaaggttgggaggctaacgagtctacctccctctttgtaaatcaaagaattgtttaaaatgggattgtcaatcctttaaataaagatgaacttggtttcaagccaaatgtgaatttatttgggttggtagcagagcagcagcaccttcaaattctcagccaaagcagatgtttttgccctttctgcttcactgcatggatacagttggtaaaatgtaataatatggcagaattttataggaaacttcctagggaggtaaattatgggaagattaagaaaggtacaaattgctgaggagaagcaggaaacctgtttccttagtggcttttatcccctcggcatgcgatggggctgatgtttctatgattgcctcagactttcacatttactagtagggctgagagaggctttagtgaggaaggaatattcagaataaaacggttgagaaagctgagaagaccattgagttttgatcagttgtgaatagagtgcaaagccatggccaagctgtttttggaaacgctggccggcgtgtcttcagtggaaaaagcaaatcaaaatggagcgagagcaaaggggcgtcctcagtcctcaacctacaatcactgtatggaatcggtcctggcagctgaacataggaggtcactggaacaagtgatagtgcagattggctttcaaacatcctcctggcttgagttttatcagctacaatgtgggtcctcttttgaagccttaattcacaacagcagctttttgggggtggggctgggcgggtgttgtcattgttctttcccttcctgtaagtgtcgctagttgctgcctcgtatctcaggtttttctctgtttttgagaaatggacagttttttgaccaggatgtgacttcatgtttcctatggtgacttctaaaaccagcacagaatgatatgactcaacacagaccgacttggttatggggatgatgagccgcacagacctcactagttgtgcacaaataatgtgctatgatggggtgtaaagtgaaggcagaagagggtcagccgcattgttatgatactgggaaagtgctggtcaacgatttgagttagtttttagatatacattgaaatctttaatcagacattctcaagtttcacacagtagtttttgatgttatgtacacacacaccaaatgtgtaacagttcaccacttccagagtgtggtcatgcccaaaacatgtttaagaaaggaaagcagtagctccttgctaacgatgtttcaggaggtttgggggacttggttttaatgagcttctgtcatttagggcttctcttggccatggtcccccttccttctggaactgtgatgtagtcacatcctacagcctttagtgctggttcactagtgtcagataatcagttcttggaatcgagactgccgtggcgaaggggtggcctcggaggcaggctctggagctgcttggatgtctttaggtggggtggtggctggctctcttcagcatgtaattggggaaaccctcgcgtctactaggggtgatacagatggtgattttaaagagcaaaactagacttctatgtgagaagtgctggaaaatgatttaggacatgtgtaaagttagatggaaagactgtaaatgtttaatatgaatatagtgttcttttgaagtaaggccagctgttgaacggttaaactgtgcatttctcattttgatgtgtcatgtatgttaatgtatgaaatgattaaataaaatcaaaactggtacctgtttatacataaatacgagaaaagacctatctttgcagccataaactcggtgggaacaccaccactcaagttgccaaaggaggcagtggtgaaacctgtcctgttctcacttaaatgaggatttagctcaaaataaagtggtggtgtcatcaggtttattccgtgttctgtcattcacatggaacaccggatgattagctaacagtttagtgccagccttcattctttactgtgtacgttaaatgcacactacagtgaaaaagcctaagacacttggtaaatattttctagctgactgattccagaacacacaagtacatggtaggaaaaaaaaggccagctacacacacatggcccatttcgatataacatgtaaatgatgttacgattcctacaggaaaaacaggaagggcaattgttgaagagctgtcctttgtccttgccacatacatctcaacaacctctctgctcatgacactagatttgatgacttatgagactagaaacttagtctcatcagtttcataaaaattaggcattgaaggaataaagcttcagtgcaaacagatggaatattgactacagaaagaatcacaggtgaccttgaagttggttgagttgaagttacatttaagaaaatttataagaaagattgggccgggtgagctagactagaagagctatcttggccaggaccctgcagaaaaagaggtggaagtgagatagaggaataaagggaattagaataaatcagcctccagagatagagggtaacaggaggaacagttgtttcagtgagaggcttccaatgagaagatgcagatcttgggagagcctgaagttcaggccagttgctgacagtgctcggagccccttcatgaccagcctcagcaggctattgttggaggactggtttggatgtgacaactacaattagaccaggaattaaac

SEQ ID NO: 447 - DNA, 358 bp, HOMO SAPIENS
tgggaggcatctcccagtaggggggcgactggcacttcataaggctgggtgcccctctgagatgaagcttccagaggaaggattaggcagcaacatgagctccttgccagcagcggaacaaagctgtatggagaatgactttgacgagtcgagagaaggcggcttcagacaatcggtaataacaaacttctcccagctaaaggaggatgtttgaacccatcacaaagaagcttaaaaacctttagaaaagagtagacaaatggctaacgagaataaacagcatagataagtccataaatgacctgatggagctgaaaaccatggcacaagaactacgtgatgcatgcacaagcttcag

SEQ ID NO: 448 - DNA, 2101 bp, HOMO SAPIENS
acgaacaggccaataaggagggagcagtgcggggtttaaatctgaggctaggctggctcttctcggcgtgctgcggcggaacggctgttggtttctgctgggtgtaggtccttggctggtcgggcctccggtgttctgcttctccccgctgagctgctgcctggtgaagaggaagccatggcgctccgagtcaccaggaactcgaaaattaatgctgaaaataaggcgaagatcaacatggcaggcgcaaagcgcgttcctacggcccctgctgcaacctccaagcccggactgaggccaagaacagctcttggggacattggtaacaaagtcagtgaacaactgcaggccaaaatgcctatgaagaaggaagcaaaaccttcagctactggaaaagtcattgataaaaaactaccaaaacctcttgaaaaggtacctatgctggtgccagtgccagtgtctgagccagtgccagagccagaacctgagccagaacctgagcctgttaaagaagaaaaactttcgcctgagcctattttggttgatactgcctctccaagcccaatggaaacatctggatgtgcccctgcagaagaagacctgtgtcaggctttctctgatgtaattcttgcagtaaatgatgtggatgcagaagatggagctgatccaaacctttgtagtgaatatgtgaaagatatttatgcttatctgagacaacttgaggaagagcaagcagtcagaccaaaatacctactgggtcgggaagtcactggaaacatgagagccatcctaattgactggctagtacaggttcaaatgaaattcaggttgttgcaggagaccatgtacatgactgtctccattattgatcggttcatgcagaataattgtgtgcccaagaagatgctgcagctggttggtgtcactgccatgtttattgcaagcaaatatgaagaaatgtaccctccagaaattggtgactttgcttttgtgactgacaacacttatactaagcaccaaatcagacagatggaaatgaagattctaagagctttaaactttggtctgggtcggcctctacctttgcacttccttcggagagcatctaagattggagaggttgatgtcgagcaacatactttggccaaatacctgatggaactaactatgttggactatgacatggtgcactttcctccttctcaaattgcagcaggagctttttgcttagcactgaaaattctggataatggtgaatggacaccaactctacaacattacctgtcatatactgaagaatctcttcttccagttatgcagcacctggctaagaatgtagtcatggtaaatcaaggacttacaaagcacatgactgtcaagaacaagtatgccacatcgaagcatgctaagatcagcactctaccacagctgaattctgcactagttcaagatttagccaaggctgtggcaaaggtgtaacttgtaaacttgagttggagtactatatttacaaataaaattggcaccatgtgccatctgtacatattactgttgcatttacttttaataaagcttgtggccccttttacttttttatagcttaactaatttgaatgtggttacttcctactgtagggtagcggaaaagttgtcttaaaaggtatggtggggatatttttaaaaactccttttggtttacctggggatccaattgatgtatatgtttatatactgggttcttgttttatatacctggcttttactttattaatatgagttactgaaggtgatggaggtatttgaaaattttacttccataggacatactgcatgtaagccaagtcatggagaatctgctgcatagctctattttaaagtaaaagtctaccaccgaatccctagtccccctgttttctgtttcttcttgtgattgctgccataattctaagttatttacttttaccactatttaagttatcaactttagctagtatcttcaaactttcactttgaaaaatgagaattttatattctaagccagttttcattttggttttgtgttttggttaataaaacaatactcaaatacaaaaaaaaaaaa

SEQ ID NO: 449 - DNA, 4470 bp, HOMO SAPIENS
aattcgcagcggggcactgactttacactcgtgtgtcttctgtgtttatttatggtctgtttctggaatgtccgctcctgggactgggaccatgattttctggcgcagtgcgggtgtctcggcgtccgggatcgggcgggtcgcagtagggctccacatttgttgagtgactgaacaccgttcccggccggggagagcgccgcagccgggtccacttcaggtaggggctgggctttcccggccccgcctaggccccgcccccagcgcgaacccgctcccacctcgcctgtccacggagcagcagggggtttgactgtgcttttccctcttgcttccctcgctctttctgcagctgccacgaaaacccggaacggcggagcggcgccgcccctcgcggcacctccctggcagcccttggaggccgcgctgggcatgctcagtcagctgggccgcctcagctctcggagtaggaagctcgggcgctccggctgtaaggagccgcggcggggggaaaatggagcccttcaccaatgatcggcttcagctccccaggaatatgattgaaaacagcatgtttgaggaagaaccagatgtggtggatttagccaaagagccttgtttacatcctctagagcctgatgaggtggaatatgagccccggggttcccgactgctggtgcggggtcttggtgagcatgagatggaggaggatgaagaggattatgagtcatcagcaaagctgctgggcatgtccttcatgaatagaagctcaggccttcggaacagtgcaactggttacaggcagagcccagatggggcttgttcagtaccctctgcaaggaccatggtggtctgtgcttttgtcatcgtggttgctgtttctgtaatcatggtgatttacttactgcccagatgtacctttaccaaagaaggctgccataaaaaaaaccagtcaattggactaattcagccatttgcaacaaatgggaaattgtttccatgggcacagatcaggcttcccactgccgttgtgccactacgctatgaactcagcctacacccgaacctaacctcgatgacattcaggggttctgtgacaatttcagttcaggctcttcaggtcacatggaatatcattcttcatagcacaggtcataatatttcaagagtgacctttatgtcagcagtttcaagccaagaaaaacaagctgagatcctggaatatgcatatcatggacagatcgccattgttgcccccgaagcccttctagcagggcacaattatacgttgaagatagagtactcggcaaatatatctagttcttattatgggttttatggcttctcctacacagatgaaagtaatgagaaaaagtactttgcagcaactcagtttgaacccctggcagcaagatctgcttttccttgttttgatgaaccagcatttaaagccacttttatcatcaagatcataagggatgagcaatacaccgctttatcaaatatgcctaagaagtcatcagtcgttctagatgatggacttgttcaggatgagttttctgagagtgtgaagatgagcacttacttggttgctttcattgtgggagagatgaagaacctgagtcaggacgtaaatggaaccctggtttctatatatgctgtaccagaaaagattggtcaagttcattatgccttggaaacaactgtgaagcttcttgagttttttcaaaactactttgaaattcagtacccacttaagaaattggatttggtggctattcctgactttgaagcaggagcaatggaaaattggggtttgctcaccttccgagaggagacacttctgtatgacagtaacacttcttcaatggcggatagaaagctggtgactaaaatcattgctcatgagctggcccaccagtggtttggcaatctggtaacaatgaagtggtggaatgacctatggctaaatgaaggttttgccactttcatggagtatttctctttggaaaaaatattcaaagagctttctagttatgaagatttcttagatgctcgatttaaaaccatgaagaaagattccttaaattcatctcatccaatatcatcatctgttcagtcttcagaacaaattgaagaaatgtttgattctctttcctattttaagggatcttctctcttgttgatgttgaaaacttaccttagtgaagatgtgtttcaacatgctgttgtcctttacctgcataatcacagctatgcatctattcaaagtgatgatctgtgggatagttttaatgaggtcacaaaccaaacactagatgtaaagagaatgatgaaaacctggaccctgcagaaaggatttcctttagtgactgttcaaaagaaaggaaaggaactttttatacaacaagagagattctttttaaatatgaagcctgaaattcagccttcagatacaagctacctgtggcatattccactatcctatgtcactgaaggaagaaattattcaaaatatcaatcggtatcattactggataagaaatcaggtgtcatcaatcttacagaagaagtgctgtgggtcaaagtgaatataaacatgaatggttattatattgtacactatgcagatgatgattgggaagcactaatccatcagttgaaaataaatccttatgttctgagtgacaaagaccgagccaaccttatcaacaacatctttgaacttgcaggcctaggcaaggtacctctcaagagggcctttgatttgattaattatcttggaaatgagaaccatactgcacccatcaccgaagccctgtttcagacagacctcatctataacctccttgaaaaactgggatacatggatctggcctcaagactggtgactagggtatttaaattacttcaaaaccaaattcaacaacaaacttggactgatgagggcactccatctatgcgagagcttcggtcagccctgctagagtttgcttgcacccacaacctggggaactgctctactactgccatgaaactgtttgatgactggatggcatccaatggaactcaaagcctacctactgatgtcatgacaactgtgttcaaagttggagcaaaaactgacaaaggctggtcattccttttgggcaaatacatttctataggctctgaagcagagaagaacaaaatactagaagcacttgccagctcagaggatgtgcggaagctttactggttaatgaaaagtagcctgaatggagataacttccgaacacagaagctgtcttttatcattagaacagtgggtcgacattttcctggacacttactggcatgggattttgtcaaagagaactggaataagcttgtacagaagttccctctggggtcctataccatacaaaatattgttgctggatcaacttacctgttttcaacaaagacacatttatctgaggttcaggcattctttgaaaatcagtcagaggcaaccttccggcttcgttgtgtccaggaggctttggaagtcattcagttgaatatccagtggatggagaagaacctcaaaagtctcacatggtggctgtagcatgcacaaccgcacctcattttgttgcccattcagagagcttgtaagcttgggctctgccgcttttgcaaaagccaaggtaaagccaggatcgctgccaagttgtttgcactctttggagttctagttagctcagggcctgactgtatttttcatccatcttttctgaagtgtctttgggcagtatgtagttatttattacaaaattatattcacctaaatgccaaccatctacaaaaacaatgagtaatttttctactttgaagatacacagatggggacaaaaaccctgttttggaattctgttctattcctcagtatccagaaagttactgacacagtaaaacaaggaaagttctaccctaagagccgccatcacttcaggccgctggtttgtcagccatctgttgcttcttattgatagatggcattggaatgtggtacaaagttagctctgaagaatatggtaacgaagacaataaagcatgcactgtaagaactgacctcaggtgtgcagatctactttgatttggggttttgattaattctttatttttctgaaaaaaagtttaaataatgtctgtaactattgtgtttttttcctgccgaatagccaggtgctacagatttttaaaatttttgttgtattgaaaagctaaacaaggccaaaaggttaaattttttgaatatttaagactttctttttcatcttttatagcgttaccataggaaactgttccaaactgagttagctttaattataattattttattcataaatggtgatagtccccagatctgtacacctttatcactccctgccgtagatatactttaggttagtatttctacattcgtggcaagcattttggtaacac

SEQ ID NO: 450 - DNA, 4355 bp, HOMO SAPIENS
gcctccttcggttggcggcctcgggcttcgggagtcctccaagaggccaggtgaggccgtcccgtgatgccccgcgccccggccgctctggcctgcaacgtgtctctggggcggaggcagcggcagtggagttcgctgcgcgctgttgggggccacctgtcttttcgcttgtgtccctctttctagtgtcgcgctcgagtcccgacgggccgctccaagcctcgacatgtcgtacaactacgtggtaacggcccagaagcccaccgccgtgaacggctgcgtgaccggacactttacttcggccgaagacttaaacctgttgattgccaaaaacacgagattagagatctatgtggtcaccgccgaggggcttcggcccgtcaaagaggtgggcatgtatgggaagattgcggtcatggagcttttcaggcccaagggggagagcaaggacctgctgtttatcttgacagcgaagtacaatgcctgcatcctggagtataaacagagtggcgagagcattgacatcattacgcgagcccatggcaatgtccaggaccgcattggccgcccctcagagaccggcattattggcatcattgaccctgagtgccggatgattggcctgcgtctctatgatggccttttcaaggttattccactagatcgcgataataaagaactcaaggccttcaacatccgcctggaggagctgcatgtcattgatgtcaagttcctatatggttgccaagcacctactatttgctttgtctaccaggaccctcaggggcggcacgtaaaaacctatgaggtgtctctccgagaaaaggaattcaataagggcccttggaaacaggaaaatgtcgaagctgaagcttccatggtgatcgcagtcccagagccctttgggggggccatcatcattggacaggagtcaatcacctatcacaatggtgacaaatacctggctattgcccctcctatcatcaagcaaagcacgattgtgtgccacaatcgagtggaccctaatggctcaagatacctgctgggagacatggaaggccggctcttcatgctgcttttggagaaggaggaacagatggatggcaccgtcactctcaaggatctccgtgtagaactccttggagagacctctattgctgagtgcttgacataccttgataatggtgttgtgtttgtcgggtctcgcctgggtgactcccagcttgtgaagctcaacgttgacagtaatgaacaaggctcctatgtagtggccatggaaacctttaccaacttaggacccattgtcgatatgtgcgtggtggacctggagaggcaggggcaggggcagctggtcacttgctctggggctttcaaggaaggttctttgcggatcatccggaatggaattggaatccacgagcatgccagcattgacttaccaggcatcaaaggattatggccactgcggtctgaccctaatcgtgagactgatgacactttggtgctctcttttgtgggccagacaagagttctcatgttaaatggagaggaggtagaagaaaccgaactgatgggtttcgtggatgatcagcagactttcttctgtggcaacgtggctcatcagcagcttatccagatcacttcagcatcggtgaggttggtctctcaagaacccaaagctctggtcagtgaatggaaggagcctcaggccaagaacatcagtgtggcctcctgcaatagcagccaggtggtggtggctgtaggcagggccctctactatctgcagatccatcctcaggagctccggcagatcagccacacagagatggaacatgaagtggcttgcttggacatcaccccattaggagacagcaatggactgtcccctctttgtgccattggcctctggacggacatctcggctcgtatcttgaagttgccctcttttgaactactgcacaaggagatgctgggtggagagatcattcctcgctccatcctgatgaccacctttgagagtagccattacctcctttgtgccttgggagatggagcgcttttctactttgggctcaacattgagacaggtctgttgagcgaccgtaagaaggtgactttgggcacccagcccaccgtattgaggacttttcgttctctttctaccaccaacgtctttgcttgttctgaccgccccactgtcatctatagcagcaaccacaaattggtcttctcaaatgtcaacctcaaggaagtgaactacatgtgtcccctcaattcagatggctatcctgacagcctggcgctggccaacaatagcaccctcaccattggcaccatcgatgagatccagaagctgcacattcgcacagttcccctctatgagtctccaaggaagatctgctaccaggaagtgtcccagtgtttcggggtcctctccagccgcattgaagtccaagacacgagtgggggcacgacagccttgaggcccagcgctagcacccaggctctgtccagcagtgtaagctccagcaagctgttctccagcagcactgctcctcatgagacctcctttggagaagaggtggaggtgcacaacctacttatcattgaccaacacacctttgaagtgcttcatgcccaccagtttctgcagaatgaatatgccctcagtctggtttcctgcaagctgggcaaagaccccaacacttacttcattgtgggcacagcaatggtgtatcctgaagaggcagagcccaagcagggtcgcattgtggtctttcagtattcggatggaaaactacagactgtggctgaaaaggaagtgaaaggggccgtgtactctatggtggaatttaacgggaagctgttagccagcatcaatagcacggtgcggctctatgagtggacaacagagaaggagctgcgcactgagtgcaaccactacaacaacatcatggccctctacctgaagaccaagggcgacttcatcctggtgggcgaccttatgcgctcagtgctgctgcttgcctacaagcccatggaaggaaactttgaagagattgctcgagactttaatcccaactggatgagtgctgtggaaatcttggatgatgacaattttctgggggctgaaaatgcctttaacttgtttgtgtgtcaaaaggatagcgctgccaccactgacgaggagcggcagcacctccaggaggttggtcttttccacctgggcgagtttgtcaatgtcttttgccacggctctctggtaatgcagaatctgggtgagacttccacccccacacaaggctcggtgctcttcggcacggtcaacggcatgatagggctggtgacctcactgtcagagagctggtacaacctcctgctggacatgcagaatcgactcaataaagtcatcaaaagtgtggggaagatcgagcactccttctggagatcctttcacaccgagcggaagacagaaccagccacaggtttcatcgacggtgacttgattgagagtttcctggatattagccgccccaagatgcaggaggtggtggcaaacctacagtatgacgatggcagcggtatgaagcgagaggccactgcagacgacctcatcaaggttgtggaggagctaactcggatccattagccaagggcagggggcccctttgctgaccctccccaaaggctttgccctgctgccctccccctcctctccaccatcgtcttcttggccatgggaggcctttccctaagccagctgcccccagagccacagttcccctatgtggaagtggggcgggcttcatagagacttgggaatgagctgaaggtgaaacattttctccctggatttttaccagtctcacatgattccagccatcaccttagaccaccaagccttgattggtgttgccagttgtcctccttccggggaaggattttgcagttctttggctgaaaggaagctgtgcgtgtgtgtgtgtgtatgtgtgtgtgtgtatgtgtatctcacactcatgcattgtcctctttttatttagattggcagtgtagggagttgtgggtagtggggaagagggttaggagggtttcattgtctgtgaagtgagaccttccttttacttttcttctattgcctctgagagcatcaggcctagaggcctgactgccaagccatgggtagcctgggtgtaaaacctggagatggtggatgatccccacgccacagcccttttgtctctgcaaactgccttcttcggaaagaagaaggtgggaggatgtgaattgttagtttctgagttttaccaaataaagtagaatataagaagaaaggtaaaaaaaaaaaaaaaaaa

SEQ ID NO: 451 - DNA, 443 bp, HOMO SAPIENS
  misc_feature (281)..(281): n is a, c, g, or t
  misc_feature (296)..(296): n is a, c, g, or t
  misc_feature (303)..(303): n is a, c, g, or t
  misc_feature (339)..(339): n is a, c, g, or t
  misc_feature (356)..(356): n is a, c, g, or t
gccgactcacggtattttttgatagaggaatgagttctctcattaggcacctcctataatgtatataacaccatgttttaaacgtgtaggttaaaaataacactgtgtatgcttagcttggtgagttaaatcactcacattctccaccaagcgctccagctggggaattatgggggatgcagagcagctgaggctccgtttggcaccacccctctgagggtgccctccgaggccccatcccaggggctgcggggaagccgggcctggggaccccctcccancctgggctgagcccncaccccnctgcctgtgctgcctgtccccggcttccaggtctcngctcctgcgcgccaggnagcgctccacttccgcggcttcgcccttgacagcgccctgtggatcttccgattcggtaccccgaacccctgtagacgtggcctagg

SEQ ID NO: 452 - DNA, 1535 bp, HOMO SAPIENS
cttgcgtcacgtccggcctgcgagttaccgcccactcgctgcggcgcttctggctccagaccgccctccggatcggaccctgcgaatggttttggctatatcttcatgctgggcttcatcaccaggcctcctcacagattcctgtcccttctgtgtcctggactccggatacctcaactctcagtactttgtgctcagcccaggcccagagccatggctatctcctcttcctcctgcgaactgcccctggtggctgtgtgccaggtaacatcgacgccagacaagcaacagaactttaaaacatgtgctgagctggttcgagaggctgccagactgggtgcctgcctggctttcctgcctgaggcatttgacttcattgcacgggaccctgcagagacgctacacctgtctgaaccactgggtgggaaacttttggaagaatacacccagcttgccagggaatgtggactctggctgtccttgggtggtttccatgagcgtggccaagactgggagcagactcagaaaatctacaattgtcacgtgctgctgaacagcaaaggggcagtagtggccacttacaggaagacacatctgtgtgacgtagagattccagggcaggggcctatgtgtgaaagcaactctaccatgcctgggcccagtcttgagtcacctgtcagcacaccagcaggcaagattggtctagctgtctgctatgacatgcggttccctgaactctctctggcattggctcaagctggagcagagatacttacctatccttcagcttttggatccattacaggcccagcccactgggaggtgttgctgcgggcccgtgctatcgaaacccagtgctatgtagtggcagcagcacagtgtggacgccaccatgagaagagagcaagttatggccacagcatggtggtagacccctggggaacagtggtggcccgctgctctgaggggccaggcctctgccttgcccgaatagacctcaactatctgcgacagttgcgccgacacctgcctgtgttccagcaccgcaggcctgacctctatggcaatctgggtcacccactgtcttaagacttgacttctgtgagtttagacctgcccctcccacccccaccctgccactatgagctagtgctcatgtgacttggaggcaggatccaggcacagctcccctcacttggagaaccttgactctcttgatggaacacagatgggctgcttgggaaagaaactttcacctgagcttcacctgaggtcagactgcagtttcagaaaggtggaattttatatagtcattgtttatttcatggaaactgaagttctgctgagggctgagcagcactggcattgaaaaatataataatcataaagtctgtgtctggacatcgcctttgggaactagaaggggagttggtattgtaccagctggactaagctccagttctagacctcctggctcattcaacatgcctccctacctaaataaaagtgcaacactcaaaaaaaaaaaaaaaaaa

SEQ ID NO: 453 - DNA, 4435 bp, HOMO SAPIENS
cattttggtcaacaccctgcttactgcgcacggccaatcctatgagaactcagcatcccagctcatctgagcagatcctggaagtgatttctgcagctcaggattttttttttaagctacattgaaaatataggtttattttttgttcaggtttttcttttatattttttttctgcacaaaggaggaggatttttcacttactcatatcgaggccagatttttaaagccagctaaggcagcatcagctgtgcgggatttaaagcctatagctcagctgaaaaaaaaggtggggggcagggaagggaagataaaaggagaggaagctgggagaagacaagcatcatcttattttgctatgtggtaggaactgtctataagatagtgtagaattgtttatcttgagcagtttgttcttaacctataaggtatttttccttttttttttttttaaacctcccccacccttttcctgaaagctttgtttcagagctttgtattgggtttttttggtgaggaggttgtatttatttttttggtgtgtgtgtgtgagtgtgtgtgtgtctgtgtgtgtgttgtggtcccagctgagtcatcatgtctgctctgacgcctccgaccgatatgccaacccccaccactgacaagatcacacaggctgccatggagaccatctacctttgcaaattccgagtgtccatggatggagaatggctctgcctgcgagagctggatgacatctcacttacacctgacccagagcctacccatgaagatcctaattatctcatggctaatgaacgcatgaacctcatgaacatggccaagctgagtatcaagggcttgattgaatcagctctgaacctggggaggactcttgactctgactatgcacctctccagcaattctttgtggtgatggagcactgtctgaaacatggcttgaaagctaaaaaaacttttctcggacaaaataaatccttctgggggcctctagaactggtagaaaagcttgttccagaagccgcagagataacagcaagtgttaaagatcttccaggacttaagacaccagtaggtagaggaagagcctggcttcgtttggcattaatgcaaaagaaactttcagaatatatgaaagctttgatcaataagaaagaacttctcagtgaattctacgaacccaatgccctcatgatggaagaagaaggagccataattgctggtctgttggtgggtctgaatgtcattgatgccaatttctgtatgaaaggagaagacttggactctcaggttggagttatagatttttcaatgtatctcaaggacgggaacagcagtaaaggtactgaaggagacggtcagattactgcaattctggaccagaagaactatgtagaagaactgaacagacatttgaatgctactgtaaacaaccttcaggcaaaagtagatgcattagaaaaatccaacactaaactgacagaggagcttgcagttgcaaacaacaggatcattaccttacaagaagaaatggaacgagttaaagaggaaagttcctacatactggaatccaatcggaagggtcccaagcaagacagaactgcagaagggcaagcactaagtgaagcaagaaagcatttaaaagaagagacacaattacgattggatgttgagaaagaactggagatgcagatcagcatgaggcaggagatggaattggctatgaagatgctggagaaggatgtctgtgagaagcaggatgccctggtatctcttcggcagcagctggatgacctcagagctctcaagcatgaacttgcctttaagctgcagagttcagacttaggagtaaaacagaaaagtgaactaaacagtcgcttggaagagaagactaatcagatggctgctaccattaaacaacttgaacaaagattgcgccaggctgagcgaagccgccaatctgctgagttggacaaccggctcttcaaacaggactttggagacaagatcaacagtctgcagctggaagtcgaggagctcaccaggcagcggaaccagcttgagttagaactaaaacaggaaaaagaaagaagattacaaaacgacaggagcatcccaggaaggggttcccagaagtcagaatccaagatggatgggaagcacaaaatgcaagaggaaaatgttaaactaaaaaagcccctggaagaaagccacaggctgcaaccccaccctatggatgaacaggatcagctgctgctctctgaaaagccacagttgtgtcagctatgccaggaagacggcagcctaacaaagaatgtgtgtaagaactgcagcggaaccttctgtgatgcctgttcaacaaatgaactgcctcttccttcaagtatcaagcttgagcgagtttgcaatccctgtcacaagcatctgatgaagcaatattctaccagcccatcataagactggaggccaagacctggaccaaaacgtttatgcaggctcctctgtacctgtgttttagctgtcaggatctcatagagcccagttcttagagtcaactaaagagttgataggaatttactaggtccagggagaaaaggcagtggttggggttactggaaattttgctcattttctctaatgactgtatgaataaaagtgaacttacttgagcctttctcttctaaatctaaacaacctgatattgaaggtttgctttatagcatatctttggaaaggcaactcatttttatgattagtgatactggggtggatttaataggagagagaatccaggcagataagaataaaaaggaaaatgatcatctccttctatagcatttgcagattcaagggggagaggtagatgctgagatcaaaatgacagttgttacttatttttccaggtgctgttagtataaacattgtttcctcttcacccctgctaactacctctttaaagtatttctaccaaactgtgaacccaatctcagggaaaagaaattaaaaagtaatataaattctgcatatattaaaaacaatattgtaatatgttataatttcaggaccagaattttctggtctttacctacaagggttttcattatcaaaaaaaagaacatttgtttttctactttatgacttcaaagtaaataactgcccttttcagaatctccttccacaaaacaagccaactcttccccattccctccatcttcctttccaagtcataatggaaattgtaaggagttttaaaaatagggtttggcttttgcaaatagaagatattgattaaagcaaagtcaaatatagagtaaaataagtttaatttgttttcttaagacagggtcttgctctgttgcacaagctggagggcagtagtgcaatcacagctcactgaatccctgttctcccgggcctcaagcaatcttcccaccttagcctcccaagtagctgggactggctttttttttttttttttggccggggagggggtctcattggttgctcagcctggtctcaaactcctgggcttaagcagtcctcccaccttgacttccacagtgccgagattacaggcatgagccaccacacctggccaagtttaatttgttcatggctgagaacagttagctcggaatacttacattgttttttgaataaggaattccttattctgagtgagtcacgaatgagagctgatagatgctttcttgaaaagggcaatacagtcatcccttggtatccatgggggattggttccaggaacccaacttgatatcagaatccatgggtgctcaagtcccattatagagaatgggttatatggtatttgcatataacctacatacatcctcctgtgtactttaaatcatctgaagatgattacttatacctaataaaatacctacacatcacttcatttgcatggattcaacatagtgcttggtgttcagtaaattcaagttttgcttttttggaactttgtggaatttttctttttctgaatatttttgattggcagttggttgaagccatggatgcagaacccatggatatggagggctgactgtacttacttacatatctatctatctttgagtaacaaactctttgggggaaaagagggaagtgtattgagcaagagaaggcaaaaaacattacataatattttgattctgttacgtgtgtctatagattgtttcattctaatcaagacctaagaaggtatgattctgtgactgatttagaattctggggtggaaatatcctggaaccatgttttttaataaattctgtctcttggaaagagttaacaacagcctgggaaagagttgttattccaaaagtcagcctgttacttggtgaagctgaagtttaagagttctggggaaaaataaaatctagtaattccagcctaaaaaaaaaaaaaaaaaa

SEQ ID NO: 454 - DNA, 3618 bp, HOMO SAPIENS
gctttctccgcgccgccaaacccgttttcttcctggtggcgtttgggcttaatacagctttggcgaggtcggatgacgggtgggagccagcggtggaaggggtggcgaaagtaccggtttgccccaggccgccgaggggcctccttagagagaccttgcctgctccgctcgcgtccgccggggccgcgcgggtcctcctggcgccgccaggttcaaaaagccactcgagttgtcactgcgacggccctgggccaggagccgtttcgggatctgtcaaacaacgagttttcgtcgttcgaatcaggttgactggtccttcatccccccaatctcccgtacctggcgagtccagctcgtcgcggcaatgctaagaaaagagtgatatgcaagctgagaccaaaaatatggtatgatttagccatactgaaggggaaggaaataagagctgggcaaagcattctgtgaattggctgactccacttctatggtgagagagaggagtgcatcaaagattactcccagtagagatggtttcagcatgttggccagtctggtctcagactcctgacctcaagtgatccacccacctcggcctcccaaaatgctgggattacaggtataagccactgtgcctggccaaagataccgttaaccctggataaagagaatggaggttacctctgtccgtgtagattcctaagctgtcctggagtgatccttggagtaaaggaaaggtgctttgaagcacattcagccatcagccctgtgggatggcagccactgatttgtcctatggtctttacagggacccagtctgccttcaagaaaagacagaagtagaaagggtggtggctgactgtctgacaaattgttatcaggtatgcaggaagtatatccttctccaaaatatcatacttgcatcaccaggtagacacatttccttctacacagaattatcttcagagcttcttaaagcaaataaagcctgcttcaaggactgagtccctagtcgaattcccggaaggagtggagcctgtcatattgtgtttatctagcatctgctcaagagtgtgctgcagtggagggaaatcagatgacctcccagtctggttgtgttacatacaatcatgtgtaagaagtgccattcaagccgtgtcactggaggggactgacagtgagattcagtgacttttgatgatctggctgtggacttcaccccagaagaatggactttactggacccaactcagagaaacctctacagagatgtgatgctggagaactacaagaatttggccacagtaggatatcagctcttcaaacccagtctgatctcttggctggaacaagaagagtctaggacagtgcagagaggtgatttccaagcttcagaatggaaagtgcaacttaaaaccaaagagttagcccttcagcaggatgttttgggggagccaacctccagtgggattcaaatgataggaagccacaacggaggggaggtcagtgatgttaagcaatgtggagatgtctccagtgaacactcatgccttaagacacatgtgagaactcaaaatagtgagaacacatttgagtgttatctgtatggagtagacttccttactctgcacaagaaaacctctactggagagcaacgttctgtatttagtcagtgtggaaaagccttcagcctgaacccagatgttgtttgccagagaacgtgcacaggagagaaagcttttgattgcagtgactctgggaaatccttcattaatcattcacaccttcagggacatttaagaactcacaatggagaaagtctccatgaatggaaggaatgtgggagaggctttattcactccacagaccttgctgtgcgtatacaaactcacaggtcagaaaaaccctacaaatgtaaggaatgtggaaaaggatttagatattctgcataccttaatattcacatgggaacccacactggagacaatccctatgagtgtaaggagtgtgggaaagccttcaccaggtcttgtcaacttactcagcacagaaaaactcacactggagagaaaccttataaatgtaaggattgtgggagagccttcactgtttcctcttgcttaagtcaacatatgaaaatccatgtgggtgagaagccttatgaatgcaaggaatgtgggatagccttcactagatcttctcaacttactgaacatttaaaaactcacactgcaaaggatccctttgaatgtaagatatgtggaaaatcctttagaaattcctcatgcctcagtgatcactttcgaattcacactggaataaaaccctataaatgtaaggattgtgggaaagccttcactcagaactcagaccttactaagcatgcacgaactcacagtggagagaggccctatgaatgtaaggaatgtggaaaggcctttgccagatcctctcgccttagtgaacatacaagaactcacactggagagaagccttttgaatgtgtcaaatgtgggaaagcctttgctatttcttcaaatcttagtggacatttgagaattcacactggagagaagccctttgagtgcctggaatgtggtaaagcatttacgcattcctccagtcttaataatcacatgcggacccacagcgccaaaaaaccattcacgtgtatggaatgtggcaaagcttttaagtttcccacgtgtgttaaccttcacatgcggatccacactggagaaaaaccctacaaatgtaaacagtgtgggaaatccttcagttactccaattcgtttcagttacatgaacgaactcacactggagagaaaccctatgaatgtaaggagtgcgggaaagccttcagttcttccagttcctttcgaaatcatgaaagaaggcatgcggatgagagactgtcagcataaggaatgtgggaaaacctaaaggtgtccctgttctctctgaagacatgaaaactcactggggagaaaccctatgaatgtaaaaatgtggaagcaactttgtatctcaggtcttaatgaacacatatgaattcacagtggagaagaccctgcatcagggaatgtggaaatgactttgctgaattctcaagccttaccaaacacatcagaaatctcactggagagaaactgtatgaatgtagagaatctgggaatacctttctgaatcccacaaaccttaatgtgtgtatgtgaactcacattggagagaaaccctgcaatttaaatggtatggtctggatgatgccccactccatatttgtaagccctaagtcctagttccttacactataactgtatttggacatagggttttcaaacaggtgagtaacttcaaatgaggttgttgggttcgatccctaatctgacatcactggtgtccctataagggaaactgaaggaaggatacacatggagaagactgtgtggatccaccagaagatggccatctacaagccaaggacagagacctggaacagatgctttcattatggcctccagaggaaaccaaccctgtctccaccttgatattgcacttccaggctccagaactgtgaggcaataaatttctcttggttaaatcaaaaaaaaaaaaaaaaaa

SEQ ID NO: 455 - DNA, 3301 bp, HOMO SAPIENS
gtgcctcttgcagcagcctaacccagaagcaggggggaatcctgaatcgagctgagagggcttccccggttctcctgggaaccccatcggccccctgccagcacacacctgagcagcatcacaggacatggccccctcagccacctagctggggcccatctaggagtggcatcttttttggtgccctgaaggccagctctggaccttcccaggaaaagtgccagctcacagaactgcttgaccaaaggaccggctcttgagacatcccccaacccacctggcccccagctagggtgggggctccaggagactgagattagcctgccctctttggacagcagctccaggacagggcgggtgggctgaccacccaaaccccatctgggcccaggccccatgccccgaggaggggtggtctgaagcccaccagagccccctgccagactgtctgcctcccttctgactgtggccgcttggcatggccagcaacagcagctcctgcccgacacctgggggcgggcacctcaatgggtacccggtgcctccctacgccttcttcttcccccctatgctgggtggactctccccgccaggcgctctgaccactctccagcaccagcttccagttagtggatatagcacaccatccccagccaccattgagacccagagcagcagttctgaagagatagtgcccagccctccctcgccaccccctctaccccgcatctacaagccttgctttgtctgtcaggacaagtcctcaggctaccactatggggtcagcgcctgtgagggctgcaagggcttcttccgccgcagcatccagaagaacatggtgtacacgtgtcaccgggacaagaactgcatcatcaacaaggtgacccggaaccgctgccagtactgccgactgcagaagtgctttgaagtgggcatgtccaaggagtctgtgagaaacgaccgaaacaagaagaagaaggaggtgcccaagcccgagtgctctgagagctacacgctgacgccggaggtgggggagctcattgagaaggtgcgcaaagcgcaccaggaaaccttccctgccctctgccagctgggcaaatacactacgaacaacagctcagaacaacgtgtctctctggacattgacctctgggacaagttcagtgaactctccaccaagtgcatcattaagactgtggagttcgccaagcagctgcccggcttcaccaccctcaccatcgccgaccagatcaccctcctcaaggctgcctgcctggacatcctgatcctgcggatctgcacgcggtacacgcccgagcaggacaccatgaccttctcggacgggctgaccctgaaccggacccagatgcacaacgctggcttcggccccctcaccgacctggtctttgccttcgccaaccagctgctgcccctggagatggatgatgcggagacggggctgctcagcgccatctgcctcatctgcggagaccgccaggacctggagcagccggaccgggtggacatgctgcaggagccgctgctggaggcgctaaaggtctacgtgcggaagcggaggcccagccgcccccacatgttccccaagatgctaatgaagattactgacctgcgaagcatcagcgccaagggggctgagcgggtgatcacgctgaagatggagatcccgggctccatgccgcctctcatccaggaaatgttggagaactcagagggcctggacactctgagcggacagccggggggtggggggcgggacgggggtggcctggcccccccgccaggcagctgtagccccagcctcagccccagctccaacagaagcagcccggccacccactccccgtgaccgcccacgccacatggacacagccctcgccctccgccccggcttttctctgcctttctaccgaccatgtgaccccgcaccagccctgcccccacctgccctcccgggcagtactggggaccttccctgggggacggggagggaggaggcagcgactccttggacagaggcctgggccctcagtggactgcctgctcccacagcctgggctgacgtcagaggccgaggccaggaactgagtgaggcccctggtcctgggtctcaggatgggtcctgggggcctcgtgttcatcaagacacccctctgcccagctcaccacatcttcatcaccagcaaacgccaggacttggctcccccatcctcagaactcacaagccattgctccccagctggggaacctcaacctcccccctgcctcggttggtgacagagggggtgggacaggggcggggggttccccctgtacataccctgccataccaaccccaggtattaattctcgctggttttgtttttattttaatttttttgttttgatttttttaataagaattttcattttaagcacatttatactgaaggaatttgtgctgtgtattggggggagctggatccagagctggagggggtgggtccgggggagggagtggctcggaaggggcccccactctcctttcatgtccctgtgccccccagttctcctcctcagccttttcctcctcagttttctctttaaaactgtgaagtactaactttccaaggcctgccttcccctccctcccactggagaagccgccagcccctttctccctctgcctgaccactgggtgtggacggtgtggggcagccctgaaaggacaggctcctggccttggcacttgcctgcacccaccatgaggcatggagcagggcagagcaagggccccgggacagagttttcccagacctggctcctcggcagagctgcctcccgtcagggcccacatcatctaggctccccagcccccactgtgaaggggctggccaggggcccgagctgcccccacccccggcctcagccaccagcacccccatagggcccccagacaccacacacatgcgcgtgcgcacacacacaaacacacacacactggacagtagatgggccgacacacacttggcccgagttcctccatttccctggcctgccccccacccccaacctgtcccacccccgtgccccctccttaccccgcaggacgggcctacaggggggtctcccctcacccctgcacccccagctgggggagctggctctgccccgacctccttcaccaggggttggggccccttcccctggagcccgtgggtgcacctgttactgttgggctttccactgagatctactggataaagaataaagttctatttattctaaaaaaaaaaaaaaaaaa

SEQ ID NO: 456 - DNA, 1553 bp, HOMO SAPIENS
gtgttccccaaagttcatgtgttggaaactcaacccctaatgcaacagtgttgaccagtggaacctttaagaggtgattaggtcatgaaggctctgccctcatgaatggatgaagctagagtgggttagttatcttgggagggggttcctgataaaaggatgaggttggcttccttccctttctctttccccctcccccctctcacatgtggtcactctcttgcccttccaccttccaccataggacggcacagtgagaccttcaccagatgcaggcccctcactttcccagtgttcagaaccgtaaaccaagtgaactcttgcttataaatcacccagtctgtggtattctgttatagcaacacaaacggactaagagagggacactcagtgggctcttctacttgatggagcactccctgcgtggtgccttgtatttgtagacatgatgctgtaaatgctctttgaatgtcttgaaggcttttatgtttgaggagtttacagagaagcacctacaggcttcaggtcccttcttctgttgcttctttgctccttagttcctcccctaacctggtgctaaattagatcatagtgtggtccttggaccaacagtatcaatagcacctgaaaatcatgctggaaatacagattcacaggctgctccctagaatactgaagaagaaactctaggagtgagacccaacaatctgtatttaacaagtccccaggtgagtctgatgcacacagaaatgtgagctgctgtattagatggtgttgagttcatgccaccgaatcactgacacacacgtctgctcactgcttgctctttgcacaggcccctggatcctcctggaatccccgatccctcttgctccctggcagagttttctagtccctcttacttgaagcatgtctttcagagcccggcaccacccatcttgagtatctggtgagttctgtggtctgcatgtccatgtttgggacattctgggaagggtggcccaggctgtgatttgccatctactgcaggctatggatggtattcagaagggaggggagatgctgtgtgcgtgttctgaagggtttcccactaaacagatcaaccctctccataactatttgatttttactttatctcctcgttgacttcacagtgtcagtgcagtttgtgtaaacatctctatggggtgatgcatgcagataaatgtttatgtgaacatataaagtctgcatgtgtgggtgaacactccacatcaggtcattgtccatcattacatatctgtggtgtctggctcattcgtctcgttttctgtcattttacctacttttacctgaagtacaatgactatttaataactattaaatgtttcatttcagctacacctctatggtatttttttcacctcatatcataccttcctccctcactggacttcagtgtgggacctgcaggtctcaggccttctgggaagtcccagcttttcttgaatgttttctctctctggccagctcaggctggagcagtgggtgttggtgccatcctgtggctatag

SEQ ID NO: 457 - DNA, 475 bp, HOMO SAPIENS
gtcactggccagtttgaggtgcttccattggtctgggtaactagccatttcttcctgattgtgcctagtatatcccagacagtttgtttctatgcagaagaattttatatgaaattttcatttctttgcaaaaacttgttccttctttcagttcatgacatcatccatgctaaagtctgagtcatctgcttccatttttgttattccccacatccagtcttcagctaagtcctgtcagttctacctcaagtctttcccgtctttcttcctcacctatgtaatttcagtagtctctcagcttcacttaacctcttactccagcctactttatacacaatgttagattcatcttactgaaacatagttctgaccatgtattccatgtatgtgttctctctcccctattagactgtaagctccttatgggcaggatctgtgtctgagtcatctttgtatcttgcctagcacctatcaa

SEQ ID NO: 458 - DNA, 2183 bp, HOMO SAPIENS
gagcgcacgcgtacacgcgtgcgcaggggaagaccgagtgccaggggctgaaccgcagggaagggggcgcggcgcacgcagtatggcgcccaacatctacttggttcgccagcggatcagtcgactcggccagaggatgtccggcttccagatcaacctcaacccgctcaaggagccactcggcttcatcaaggtcctcgagtggattgcttctatctttgcttttgccacctgtggaggttttaagggccaaacagaaattcaagtgaattgtcctcctgcagttactgagaataaaactgttacagctacttttggttatccattcaggttgaatgaggcatcatttcagccacctccaggtgtaaacatatgtgatgtaaattggaaagattacgtcctcataggcgattactcttcttctgcacaattctatgttacctttgcagtctttgtgttcctgtactgcattgctgcccttctgctttatgttggctacacgagtctgtatctggatagtcgtaaacttcctatgatagactttgttgttacacttgttgccacttttttgtggttggtgagcacttcagcctgggctaaagctctgacagatattaaaatagctactggtcacaatattattgatgaacttccgccttgtaagaagaaagcagtactgtgttactttggctctgtgaccagtatgggatccctaaatgtatctgtgatatttggctttctaaatatgatactctggggaggaaatgcttggtttgtgtacaaggagaccagcctacacagtccatcaaatacatctgcccctcatagccaaggaggtattccacctcctaccggaatataattaaagggagaaatacactgtatgaagtatatgttgatactatgacatgttgccaacaccttgagaagcattatttgtttctaataaaagtaatggctttgtcaatatattggtgggtttaaaactttgctgcttttttacataaagcctgtgcctttcctagaaagttaagatgtaaatgtattctcacatgtaaatttgaaagttcaggggtctattatgaaatgatacacatttttaaatgaaccataatttttttcactaagctgtttgccttccaaagtgtttacaccttaagccttaacatgtatcttcattcagaaaacagttatattgtcataccatagtaggaagaaaaacctttatttggaatatacactactgtaagtttgtacagatcatatacctaccacctgtctttgcttaaagagccttgattacataaatatgtaggaaaaaacatattgagttcaaaatttatatctaacattgtttatgttatgatttttttttaattgcaaagactaggtgtatatttttttctgtttttctaaatgacccgtggtacttaataggtgtactaaaattgtgttgggagcagggatttggaaatttctgagagatgtgtagttaatttagtaattctgtttcatgagatatgatctgttatgctagtggtttaataggcttgctatgtaagtagaacgtggctcaactagatatctttatatgtatgggcattactcttagtgatatttgtttcctgtcctttgttgctcatgctgtttaagtgcaggctgagacccagcctctttgtaagtacagtaaaataatccaccgttttttacagaccctagtcaaagggttaaaaaaattaagattgctttccatgtttgaaatttaccattgagagtcaatgaagttgctattttgagtttagcattgatattgtgaaaataagtgcaatttggatttcatgtttcttaatattcattcttgtttcacaaatgaatgattaaggaattatgcatcataaaggaacctaagtgaggtatatgatgagtgtattgtctttgcacacacatataggtatattctgaatacaagcttattcacattttgcttcctaatctttttgttgtacagggattcaggtttcttattcttacaacatgattgtttatatgtgaagcacatcttgctgttgccttatttttgatgcttttattcatgacaagaattgtcaatataagaatgtatatcttttttgcaaccaatttaataaaggagttgaaagaaaaaaaaaaaaaaaaaaaaaaaa

SEQ ID NO: 459 - DNA, 4443 bp, HOMO SAPIENS
ggacactcccaacttgagactgaaagctgggcgaaagcggtttgtgaagctaacctaaaagacaaaatggtctagagccaccttttccccgcaaataacagaggattaaggatctgaaatcttcaagcctccaggaccacggtgcaagccctcagcaaaaatttctgctggaggccggagcgccttttgatttcgggagactggcccaggaactctagtcacttggaaggcggaagagaaggtggtacctgagccaggtaggagccactcagaggcagcccggggccgccactcacctaggagaggaggtggagtccgatgacctggactgagaggaaacgcgagactgagtctaccaggtgaggtaaaaaacacccacctgctcacctcggaaggggcgggcgaggtgcggctcccggtgacccgcgggggtgcagcgcacctgggcggaggcggaactgggagggtgtgggcactgctcgtagggcctggaactaaactcacctgtgacggaggcagaggaggggcccgggcaaaaacccacctgagctggcgggaaacccgacccgcgagcagtccccgggcttgcgcggcgcggagagggaggcgccccgcggcggggcccccactcggtcagcccgcgcgtcggtccccgcgcggccgccatgacctggagcgccacggcccggggcgcccaccagcccgacaacaccgccttcactcagcagcgcctccccgcctggcagccgctgctgtcggccagcatcgcgctgccgctcttcttctgcgcgggcctggccttcatcggcctgggcctgggcctctactactcctccaacggcatcaaggagctggagtacgactatacaggcgacccgggcaccggtaactgctcggtgtgcgccgcggctggccagggccgggcgctgccgcccccctgctcgtgcgcctggtacttctcgctgcccgagctcttccagggcccagtgtacctctactacgagctgaccaacttctaccagaacaaccggcgctacggcgtgtcccgcgacgacgcgcagctgagcggactccccagcgcgctgcgccaccctgtcaacgagtgcgccccctaccagcgcagcgcggccggcctgcccatcgcgccctgcggcgccatcgccaacagcctcttcaacgactccttctcgctttggcaccagcgccagcccggcgggccctacgtcgaggtgccgctcgaccgctccggcatcgcctggtggaccgactaccacgtcaagttccgcaacccgccgctggtcaacggcagcctggcgttggccttccagggcacggcgcccccgcccaactggcgccggccagtctacgagctcagccccgaccccaacaacaccggcttcatcaatcaggacttcgtggtgtggatgcgcacggcggcgctgcccacgttccgcaaactgtacgcgcgcatccgccagggcaactactcggccgggctgccgcggggcgcctaccgcgtcaacatcacctacaactacccggtgcgcgcgttcggcggccacaagctcctcatcttcagcagcatctcgtggatgggtggcaagaaccccttcctgggcatcgcctacctggtcgtcggctccctctgcatcctcaccggctttgtcatgctggtcgtctacattcgctaccaggaccaggacgacgacgacgaggagtgattccggctttccagggatccctcctgcttcttgccaaaactcttgcaaggtgcttttggcatctcctcctcgcccgtcacccaattccaacctcgcctagcttttcctccctttgtgaatgaggggaccagataagggaattaccccccttgctcttggggggctgctagactgtcttgccgcggggagggatgttgactgcagagtgaaacatccttgcaaactcttcccacctccttcacgacactgagttgccatgtgaggttcttcaagtctgagagtggaagggatccctatggagactcctattaaacccctattagaggaagagattgagagacctagcaatgtgaagtaacaaagatcaggcagctgcaagtgactcctgaatcttgagtccagggctttcgccactacagtacagtggttttcttttctttggtcggggagagtgggctggaatggagagtgaggcccacaaattacctgcagagacgtggaggcgtgagggagaacatgcttgttaaatatgcaggtagattaggagacaccaaacagagattcagacacagtaaggctgggatgagatcctcgaagctgtgttttaacaaactccactggagagtcccatattccctcaaatttgggaatcacgaccctgaaccaggttgggcctgaagcagtcaactgaattcactttttcggatagtaatttgttcccaggggcagtgacaaccatgatgttccaggtttggtctggcactctgccttgaacgtaggaagctcttgatgatttgtggaatgaatttttaaaaaattactatctggggaaaactagttggcatacagagttgtaggacagggtttatgtgattcatttgatattttagtattttggtgtaaaagccaacaggcaaactttgccaggtactgtgtagaaactcgaaaatgtgaggccagtttgtacagttcagaggaaatgctttaacgtagaatcagatagctggaagagatcttcgagggaaagtaagttccctaaagtcacatctatgtctcctagctcagtgttctttgtcattgtgtgtgtgtgtgtgtgtgtgtgtgtgtgtgtgtgtgattagaaagggcttcattcataccttttcccttggacctggaaaaaaaattttttttatcttttcaaatgaaatctattgatttctagtaatcatatttgaatcaatgttaaagcatatatagtcttatatgtaaactagattcttaagattatttgaacctttgagatgaagtttacactcaactaaaatcattccattgattttattgattaacatcaatcagtatgtttaaagttattctaagaagcaatagtttatttttaaaaaccttgtatagcaaaataacttaaaaccctttgtgatatcatcttaccagtttatttggtaaaaacaaacagttatttggtatttgtcagaattcttcagtgcctgctattacagctattttccaattactaacttgattatactcactcaaggcagtgcaagatcttgaagtactttttagcagttaagtaatattgaattgtattgaatagtttacatagtttattctagtctttgaaaattactgaacatggacaatgtgcatgtcattgacatctgccttagaacttctgggacaatcctgattcgagagattctatcccattatttacatataccaaaaatactttgttaatttaatgtgttggcttcccaactcctgaacacgacacaattttattattagattttgtatggtgattttaggctatgaaaacatgatcattatatgtatatagatacatttttatttgttacaaatgtttgagcagctcactagcccacccctcctctattttgggtaagagaatttactaccttttttaactatgtagttgagagcaacatgtattttgttatttttagaatggtcagtatattgctataaaattttaaatgagactatgaaagttaaagtattctgattctggttaaattaacgaatatggttccaggccctgttctctgggtttttgagagagaataaaggttatgtttgtcttacctttgttatcgagtttgctgaattcttttgaacgatgatcttaaaggcacaaacaccaccagccactttgctaatttcttaatagcagatttacattgcagcaagaaaaccatcttttatagtaacattcagttaaaatgaactcaattcattgttaacttcctaaaacagaatttgaactttatcaacctcaacgtgtatataaactagatagtcctcaatactttatcaacctcaacatgtatataaactagatagtcctcaaatactgtttgaatttaataaatgtcaatttaaaaatttttgtagtagtcttctgcattttacttcaattataaattgcaattatttattggatattttggacttcaaagcagcagaaactttaaaactgaaatgggaaacgttttcctgcaatgatccctgtgctgtaacattttgtctggtgtctcaggcttccaggttcttgttggcctgaattcccttgttgcccagtaaatgttcactagctagaagtatcttcaggaagtgagatagaaaagagtgaacctcaacaattggactggaaatgagctttgacctaactttgtaaaataaaagcataaaagagaaa

SEQ ID NO: 460 - DNA, 4741 bp, HOMO SAPIENS
ttgtccgccatttgcaaggggcccggagcgggatcgcggcacctgccgagcgggtcgccgcctctgccgcggtccttggaccccgccgccgccctggcctgggagcttgccccgccgcagcggccggcagcgcggcgctccgcgggcggcaggcacgggccccgggccccctcacggcgcccagccgcgggcctcccgaggcaaaagcccgtgggccgccgcgatggccctcaagatggtgaagggcagcatcgaccgcatgttcgacaagaatctgcaggacttggtccgcggcatccgtaaccacaaggaggacgaggcaaaatacatatctcagtgcattgatgagatcaagcaggagctgaagcaggacaacatagcggtgaaggcgaacgcggtctgcaagctgacgtatttacagatgttgggatacgacatcagctgggccgccttcaacatcatagaagtgatgagtgcctccaagttcaccttcaagcgaattggctacctcgctgcttcccagagctttcacgaaggcaccgacgtcatcatgctgaccaccaatcagatccgtaaggacttgagcagccccagccagtacgacacaggtgttgcactgacgggtctgtcctgcttcgtcaccccagaccttgccagagacctggcaaatgacatcatgacactgatgtcacacaccaagccctacatcaggaagaaggctaagctgatcgagcccctcaccaatctcatccacagcacgtctgccatgtctctcctctatgaatgtgtgaacaccgtgattgcagtgctcatctcgctgtcctccggcatgcccaaccacagcgccagcatccagctttgtgttcagaaattaaggatattgatcgaggactccgatcagaacttgaagtacctggggctgctggcaatgtccaagatcctgaagacccaccccaagtccgtgcagtcccacaaggacctcatcctgcagtgcctggacgacaaggacgagtccatccggctgcgggccctggacctgctctatgggatggtgtccaagaagaacctgatggagatcgtgaagaagctgatgacccacgtagacaaggcagagggtaccacctaccgtgacgagctgctcaccaagatcattgacatctgcagccagtccaactaccagtacatcaccaacttcgagtggtacatcagcatcctggtggagctgacccggctggagggcacacggcacggccacctcatcgccgcccaaatgctggacgtggccatccgcgtgaaggccatccgcaagttcgccgtgtcccagatgtctgcgctgcttgacagtgcacacctgctggccagcagcacccagcggaacgggatctgtgaggtgctgtacgctgccgcctggatctgcggggagttctcagagcatctgcaggaaccacaccacactttggaggccatgctgcggcccagagtcaccacgctgccaggccacatccaggccgtgtatgtgcagaacgtggtcaagctctacgcctccatcctgcagcagaaggagcaggccggggaggcagagggcgctcaggccgtcacccagctcatggtggaccggctgccccagtttgtgcagagcgcagacctggaggtgcaggagcgggcgtcctgcatcctgcagctggtcaagcacatccagaagcttcaggccaaggacgtgcctgtggcagaggaggtcagcgctctctttgctggggagctgaacccagtggcccccaaggcccagaagaaggttccagtccccgaaggcctggacctggacgcctggatcaatgagccactctcggacagcgagtcagaggacgagaggcccagggccgtcttccacgaggaggagcagcggcgtcccaagcaccggccgtcggaggcggacgaggaagagctggctcggcgccgagaggcccggaagcaggagcaggccaacaaccccttctacatcaagagctcgccatcgccacagaagcggtaccaggacaccccgggcgtggagcacattcccgtggtgcagattgacctctccgtccccttgaaggttccagggctgcctatgtcagatcagtatgtgaagctggaggaggagcggcggcaccggcagaagctggagaaggacaagaggaggaaaaagaggaaggagaaggagaagaagggcaagcgccgccacagctcgctgcccacggagagcgacgaggacatcgcccctgcccagcaggtggacatcgtcacagaggagatgcctgagaatgctctgcccagcgacgaggatgacaaagaccccaacgacccctacagggctctggatattgacctggataagcccttagccgacagcgagaaactgcctattcagaaacacagaaacaccgagacctcaaaatcccctgagaaggacgttcccatggtagaaaagaagagcaagaaacccaagaagaaagagaaaaaacacaaagagaaagagagagacaaggagaagaagaaggagaaggagaagaaggctgaggacctggacttctggctgtctaccaccccaccgcctgcccccgcccccgcccccgcccccgttccatccacggacgagtgtgaggacgccaagacggaggcgcagggcgaggaggacgatgccgaggggcaagaccaggacaagaaatctcccaagcctaagaagaagaagcacaggaaggagaaggaggagcggaccaaaggcaagaagaagtccaagaagcagcctccaggcagcgaggaggcagcgggggagccggtgcagaatggcgcgccagaggaggagcagctcccgcctgagtccagctactccctcctcgctgaaaattcctatgttaaaatgacctgtgacatccggggcagtctgcaggaggacagccaggtcactgtggccatcgtgctggagaacaggagcagcagcatcctcaagggcatggagctcagcgtgctggactcactcaatgccaggatggcccggccgcagggctcctccgtccacgatggcgtccccgtgcctttccagctgcccccaggcgtctccaacgaagcccagtatgtgttcaccatccagagcatcgtcatggcgcagaagctcaaggggaccctgtccttcattgccaagaatgacgagggtgcgacccacgagaagctggacttcaggctgcacttcagctgcagctcctacttgatcaccactccctgctacagtgacgcctttgctaagttgctggagtctggggacttgagcatgagctcaatcaaagtcgatggcattcggatgtccttccagaatcttctggcgaagatctgttttcaccaccatttttccgttgtggagcgagtggactcctgcgcctccatgtacagccgctccatccagggccaccatgtctgcctcctggtgaaaaagggtgagaactctgtctcagtcgacgggaagtgcagtgactccacgctactgagcaacttgttagaagagatgaaggcgacgctggccaagtgttgagagctgcctgcgagccccgcaccaccccgcggagcacgtacccagggaccgcagccctgacgtgtctcgcctctcctcagtcgtgtgtactgtacccaagcctgagtgttaatttaactctatgttgtccgccgtgtagacatccgaggtcatttgttgcgttgaattatctgaccatccttttttactgtgactcttcccattctctttggcaagaagtccccttctcgcccccaaaccagcaagggactcccccacctgggtctgtgccctgccccgcgctgggggccgagtccttgaatgtggcttcaggggctcctgtcctgggccagggcctgatgggcaccacgtgaggggcacttggtggacagggcggggctgacgtggcctcctctggggtcgcctgcttttgacccaaaggtcctgacggttgcgtccgggggaggggaaggaagggccgctgtcgccaaggttttctctcccagaacccacagtgggaaagcggtcttgccaggcgttgtccattgtcagtgtgctcgtgggctggtgactgggtcttgggatcccaggccacgcgccagccaggctgtgggcagggcggggccagggacgccaaagagaggttgcagtcagaaccgtggacggggtgggttgaggcctctctgccacccgtcttcctggtcagcagaagtgcatctcggcttgggtttggggtggtccgcatcccctgcttgccactatgcgcaccaaggtttccccacatccttcccagcacccttaggaaggcccaggcagggcctggaagcagcggacctgggctgttctgtgttgaaggagtgtgcccagtgcccttgggcaggacctgtgagagccacctcacaggcagagcccccaccaggcagggcaaggagactccgctcactccccacggccagcgtgggcacaggactgacccttcttcagagataatgacattttatcttctccttttgatgaaaactgtcactttagcatgtaatccattacagaatcccatgcagtgattccaggatttgaaattgtatgatgtgttacataagaatttatttgctatcgacattcccgtataaagagagagacatatcacgctgctgtcatgattttgtgtcaagatgatccaataaagttgtaaaacaggca

SEQ ID NO: 461 - DNA, 2914 bp, HOMO SAPIENS
acatgctgcccaggctgcgcgggtgattggcttggctggacctgaatgatgcggctgtgattgctgaattgtctgggcaggtttggagtctctggcaagctcccctgactgtgcatccctctggagacgaagaggagggggaggcctgtcctctctgggatccattggtcacatccccctgaggattcccgaatgcctacctccagtgtcgtcaacatggagttctgaagtccatgtggctcttcacagtgaatcaggtgttaaggaagatgcagagacgccacagcagcaacacggataacattccacctgaaagaaaccgcagccaggcgctcagctccgaggcgagtgtggatgaaggtggcgtctttgagagtctgaaggcagaggcagcctccccaccagcgctcttctcgggcttatcaggcagcctccccaccagctcgttcccctccagcctggtgctgggctcctcggctggcggcggggacgtgttcatccagatgcccgcgtccagggaggaaggagggggccggggcgaggggggcgcctaccaccaccgccagccccaccaccatttccaccatggcggccaccgcgggggctccctgctgcagcacgtgggtggggaccaccgggggcactcggaggagggaggcgacgagcagcctgggacgcccgcccccgccctgtccgagctgaaggctgtgatctgctggctccagaaaggactccccttcatcctgatcctcctggccaaactgtgctttcagcataagctcggcattgctgtgtgcatcgggatggccagcaccttcgcctatgccaactccacgcttcgagaacaggtctcactgaaggagaagaggtcagtgctggtcatcttgtggatcctggcctttctggcggggaacaccctctatgtgctttatacattcagctcccagcagctgtacaacagcctcatattcctgaagcccaacctggagatgctggacttctttgacctgctatggattgtggggatcgcagactttgttctgaagtacatcaccatcgccctcaagtgcctcatcgtggccctgcccaagatcatcctggctgtcaagtccaagggaaagttctatctggtcatcgaggagctgagccagctgttccgatcccttgtccccatccagctgtggtacaaatacatcatgggtgacgactcctccaacagctacttcctgggcggggtcctgatcgttctctacagcctctgcaagtccttcgacatctgtggacgtgtgggcggagttaggaaagccctgaagcttctctgtacctctcagaactatggagtccgagccaccgggcagcagtgcacagaagctggtgacatctgcgccatctgtcaggccgagttccgagagcctctgattctcctgtgccagcacgtgttctgtgaggagtgcctctgcctgtggctggaccgtgagcgcacctgcccgctctgccgctcggtcgccgtggacaccctgcgctgctggaaggacggcgccacgtccgcacacttccaggtgtactaggaccgaacactgaggacacccagaaggacgccaaggattcaggacatttgcccctgtgtgccaccaaaccaggactttccccttggcttggcatccctggctctctcctggtacccagcaagacgtctgttccagggcagtgtagcatctttcaagctccgttactatggcgatggccatgatgttacaatcccacttgcctgaataatcaagtgggaaggggaagcagagggaaatggggccatgtgaatgcagctgctctgttctccctaccctgaggaaaaaccaaagggaagcaacaggaacttctgcaactggtttttatcggaaagatcatcctgcctgcagatgctgttgaaggggcacaagaaattggagctggagaagattgatgaaagtgcaggtgtgtaaggaaatagaacagtctgctgggagtcagacctggaattctgattccaaactctttattactttgggaagtcactcagcctccctgtagccatctccagggtgacggaacccagtgtattacctgctggaaccaaggaaactaacaatgtaggttactagtgaataccccaatggtttctccaattatgcccatgccaccaaaacaataaaacaaaattctctaacactgcaaagagtgagccatgcctgttaacactgtaaagaatgtaacatgtgggggacacacaggggcagatgggatggtttagtttaggattttattagtgcatgccctaccctctgggggaacgtcccatctgaggttttcttctcggtggggggatttaacttctgtcctagggaaaacagtgtctgatgaggagtgtttccaacacaggctacatgaattcccctataccagtgcgaaagcagccaggagtccccgttggaaaagaacaatgccactctcttttatgtatcttggttctgcaactcatttgttgtaagtagggttaatcgagtatcaggttcacagtatcctgcccttattattttatgattcactgactcaagttccacgaagtccttagaaatggacctcttcatgtaaaatatcttgagaataataaatgtgagggaataagaaaggcaagctttggacacagatatgataggtgcatcagcttcggaagagaagaatgatgtgcagagtgttaggaagacatccgggctgctgagactcgggattagaagaaagagaggtaaataaagtgggtcctggaatcttttaggacttctgctgtaggacaaacagctgcctttggtgttttaatgtctcccaaagtacccttcagccaataaataccatctgttggtgcaaaaaaaaaaaaaaaaaa

SEQ ID NO: 462 - DNA, 1834 bp, HOMO SAPIENS
aaacagcaagcagggctctggcagctgctgcagacggcttcacacagggacgcgggctgccatcttgctctaagtgaaagtgaaagaaaagtcggcagcagagggaacagggaagaaacctaaaggctgcaggctgccaggtgtgcttggagagcccccttcttccgccgggcctcgcaagcagcgtaggactgtggagaagggcggtgggcaaggagggaactcgagagcagcctccatgggcacacaggagggctggtgcctgctgctctgcctggctctatctggagcagcagaaaccaagccccacccagcagaggggcagtggcgggcagtggacgtggtcctagactgcttcctggcgaaggacggtgcgcaccgtggagctctcgccagcagtgaggacagggcaagggcctcccttgtgctgaagcaggtgccagtgctggacgatggctccctggaggacttcaccgatttccaagggggcacactggcccaagatgacccacctattatctttgaggcctcagtggacctggtccagattccccaggccgaggccttgctccatgctgactgcagtgggaaggaggtgacctgtgagatctcccgctactttctccagatgacagagaccactgttaagacagcagcttggttcatggccaacatgcaggtctctggagggggacctagcatctccttggtgatgaagactcccagggtcaccaagaatgaggcgctctggcacccgacgctgaacttgccactgagcccccaggggactgtgcgaactgcagtggagttccaggtgatgacacagacccaatccctgagcttcctgctggggtcctcagcctccttggactgtggcttctccatggcaccgggcttggacctcatcagtgtggagtggcgactgcagcacaagggcaggggtcagttggtgtacagctggaccgcagggcaggggcaggctgtgcggaagggcgctaccctggagcctgcacaactgggcatggccagggatgcctccctcaccctgcccggcctcactatacaggacgaggggacctacatttgccagatcaccacctctctgtaccgagctcagcagatcatccagctcaacatccaagcttcccctaaagtacgactgagcttggcaaacgaagctctgctgcccaccctcatctgcgacattgctggctattaccctctggatgtggtggtgacgtggacccgagaggagctgggtggatccccagcccaagtctctggtgcctccttctccagcctcaggcaaagcgtggcaggcacctacagcatctcctcctctctcaccgcagaacctggctctgcaggtgccacttacacctgccaggtcacacacatctctctggaggagccccttggggccagcacccaggttgtcccaccagagcggagaacagccttgggagtcatctttgccagcagtctcttccttcttgcactgatgttcctggggcttcagagacggcaagcacctacaggacttgggctgcttcaggctgaacgctgggagaccacttcctgtgctgacacacagagctcccatctccatgaagaccgcacagcgcgtgtaagccagcccagctgacctaaagcgacatgagactactagaaagaaacgacacccttccccaagcccccacagctactccaacccaaacaacaaccaagccagtttaatggtaggaatttgtattttttgcctttgttcagaatacatgacattggtaaatatgccacatgcctttggtggaagtacaaaaaaaaaaaaaaaaaa

SEQ ID NO: 463 - DNA, 4830 bp, HOMO SAPIENS
caaccggttccgagtttgaggcactaggaggagggggagaagcggctgcagcggccgcggcaggagcagcgggagctacagcatcagcaagagcaacagtagctacagccccggcggcggtgcctgttccagtctttgctgctgcagtccgtgcaaccacccagagggggaggggggaaccaccagtcgctgaggaacaagagaaggggggaaagtttaggcgagccttgggggggggggggccagcgccggagccgcgtgagagagggagccgtgttttggtaggggggagtcggactgcaactggcagcagagcgtctccccggccgtgtggactctacaccccctactcctgccgcttctgctgctgcctgtggctggagggtccccctggggctgaatctttgggacttgaccccgttccctcccccttccctcactccccagccgggcgggagcatttattccccagattaattccccttttgggggggggcgggtgtgtgtgtgtgtgtgtgtgtgtgtgtgtgttgggggaagcgtccctgaaatagtaaatattattgagctctttttgcccttttcctgtccgtttttttaatttccttttttgaggtgggaaaactgaaacccaccttgattcgtcccctctcccccctccccaccttccctcgccctaatcccccaacgaggaaggaaggagcagttggttcaatctctggtaatctatgccagcaattatgacaatgttagcagaccatgcagctcgtcagctgcttgatttcagccaaaaactggatatcaacttattagataatgtggtgaattgcttataccatggagaaggagcccagcaaagaatggctcaagaagtactgacacatttaaaggagcatcctgatgcttggacaagagtcgacacaattttggaattttctcagaatatgaatacgaaatactatggactacaaattttggaaaatgtgataaaaacaaggtggaagattcttccaaggaaccagtgcgaaggaataaaaaaatacgttgttggcctcattatcaagacgtcatctgacccaacttgtgtagagaaagaaaaggtgtatatcggaaaattaaatatgatccttgttcagatactgaaacaagaatggcccaaacattggccaacttttatcagtgatattgttggagcaagtaggaccagcgaaagtctctgtcaaaataatatggtgattcttaaactcttgagtgaagaagtatttgatttctctagtggacagataacccaagtcaaatctaagcatttaaaagacagcatgtgcaatgaattctcacagatatttcaactgtgtcagtttgtaatggaaaattctcaaaatgctccacttgtacatgcaaccttggaaacattgctcagatttctgaactggattcccctgggatatatttttgagaccaaattaatcagcacattgatttataagttcctgaatgttccaatgtttcgaaatgtctctctgaagtgcctcactgagattgctggtgtgagtgtaagccaatatgaagaacaatttgtaacactatttactctgacaatgatgcaactaaagcagatgcttcctttaaataccaatattcgacttgcgtactcaaatggaaaagatgatgaacagaacttcattcaaaatctcagtttgtttctctgcacctttcttaaggaacatgatcaacttatagaaaaaagattaaatctcagggaaactcttatggaggcccttcattatatgttgttggtatctgaagtagaagaaactgaaatctttaaaatttgtcttgaatactggaatcatttggctgctgaactctatagagagagtccattctctacatctgcctctccgttgctttctggaagtcaacattttgatgttcctcccaggagacagctatatttgcccatgttattcaaggtccgtttattaatggttagtcgaatggctaaaccagaggaagtattggttgtagagaatgatcaaggagaagttgtgagagaattcatgaaggatacagattccataaatttgtataagaatatgagggaaacattggtttatcttactcatctggattatgtagatacagaaagaataatgacagagaagcttcacaatcaagtgaatggtacagagtggtcatggaaaaatttgaatacattgtgttgggcaataggctccattagtggagcaatgcatgaagaggacgaaaaacgatttcttgttactgttataaaggatctattaggattatgtgaacagaaaagaggcaaagataataaagctattattgcatcaaatatcatgtacatagtaggtcaatacccacgttttttgagagctcactggaaatttctgaagactgtagttaacaagctgttcgaattcatgcatgagacccatgatggagtccaggatatggcttgtgatactttcattaaaatagcccaaaaatgccgcaggcatttcgttcaggttcaggttggagaagtgatgccatttattgatgaaattttgaacaacattaacactattatttgtgatcttcagcctcaacaggttcatacgttttatgaagctgtggggtacatgattggtgcacaaacagatcaaacagtacaagaacacttgatagaaaagtacatgttactccctaatcaagtgtgggatagtataatccagcaggcaaccaaaaatgtggatatactgaaagatcctgaaacagtcaagcagcttggtagcattttgaaaacaaatgtgagagcctgcaaagctgttggacacccctttgtaattcagcttggaagaatttatttagatatgcttaatgtatacaagtgcctcagtgaaaatatttctgcagctatccaagctaatggtgaaatggttacaaagcaaccattgattagaagtatgcgaactgtaaaaagggaaactttaaagttaatatctggttgggtgagccgatccaatgatccacagatggtcgctgaaaattttgttccccctctgttggatgcagttctcattgattatcagagaaatgtcccagctgctagagaaccagaagtgcttagtactatggccataattgtcaacaagttagggggacatataacagctgaaatacctcaaatatttgatgctgtttttgaatgcacattgaatatgataaataaggactttgaagaatatcctgaacatagaacgaactttttcttactacttcaggctgtcaattctcattgtttcccagcattccttgctattccacctacacagtttaaacttgttttggattccatcatttgggctttcaaacatactatgaggaatgtcgcagatacgggcttacagatactttttacactcttacaaaatgttgcacaagaagaagctgcagctcagagtttttatcaaacttatttttgtgatattctccagcatatcttttctgttgtgacagacacttcacatactgctggtttaacaatgcatgcatcaattcttgcatatatgtttaatttggttgaagaaggaaaaataagtacatcattaaatcctggaaatccagttaacaaccaaatctttcttcaggaatatgtggctaatctccttaagtcggccttccctcacctacaagatgctcaagtaaagctctttgtgacagggcttttcagcttaaatcaagatattcctgctttcaaggaacatttaagagatttcctagttcaaataaaggaatttgcaggtgaagacacttctgatttgtttttggaagagagagaaatagccctacggcaggctgatgaagagaaacataaacgtcaaatgtctgtccctggcatctttaatccacatgagattccagaagaaatgtgtgattaaaatccaaattcatgctgttttttttctctgcaactcgttagcagaggaaaacagcatgtgggtatttgtcgaccaaaatgatgccaatttgtaaattaaaatgtcacctagtggccctttttcttatgtgtttttttgtataagaaattttctgtgaaatatccttccattgtttaagcttttgttttggtcatctttatttagtttgcatgaagttgaaaattaaggcatttttaaaaattttacttcatgcccatttttgtggctgggctggggggaggaggcaaattcgatttgaacatatacttgtaattctaatgcaaaattatacaatttttcctgtaaacaataccaatttttaattagggagcattttccttctagtctatttcagcctagaagaaaagataatgagtaaaacaaattgcgttgtttaaaggattatagtgctgcattgtctgaagttagcacctcttggactgaatcgtttgtctagactacatgtattacaaagtctctttggcaagattgcagcaagatcatgtgcatatcatcccattgtaaagcgacttcaaaaatatgggaacacagttagttatttttacacagttctttttgtttttgtgtgtgtgtgctgtcgcttgtcgacaacagctttttgttttcctcaatgaggagtgttgctcatttgtgagccttcattaactcgaagtgaaatggttaaaaatatttatcctgttagaataggctgcatctttttaacaactcattaaaaaacaaaacaactctggcttttgagatgacttatactaatttacattgtttaccaagctgtagtgctttaagaacactacttaaaaagcaaaataaacttggtttacattta

SEQ ID NO: 464 - DNA, 435 bp, HOMO SAPIENS
  misc_feature (26)..(26): n is a, c, g, or t
  misc_feature (229)..(229): n is a, c, g, or t
  misc_feature (345)..(352): n is a, c, g, or t
  misc_feature (355)..(358): n is a, c, g, or t
  misc_feature (360)..(361): n is a, c, g, or t
  misc_feature (364)..(364): n is a, c, g, or t
  misc_feature (366)..(372): n is a, c, g, or t
cctgaccccaggtctcttcaaatatnttaccatctcagttttctttcttaatctctctatataaaaaactacatcaaaatctttttcccttatcttgctttattttttctccatagcatttagcaccagctgatatattaccatgtttatttgtttgctgtttgtcctactagaatgctagttttttgaaggcaagggctctgtctgcttggttcctgctgttggccancttcgtaacccagattctggcacataacagacccttgctacatatttgttgaatagctgaactcttagacacaatatcctaagactttgatagagatcttacttctgatagattgnnnnnnnntgnnnnannacngnnnnnnntataaatctggggaaggaagaaaaggtgactgatcactttttacctctcatcttttgccaagg

SEQ ID NO: 465 - DNA, 2053 bp, HOMO SAPIENS
ggtgatgctgcagccaagatggcgcccgcggcggccgtggcggcctgagcgtgatgctccgggttctcggcggcggctgtggccttggccggggccttgggtctctcccggtcgtgagcgatcagcgcctctccgccggccgggctagccgggacagagaggagacggccacgaagagaggaggcagtgagcaacaggacgagaccgcggcgtctccagcctcggtaccatggccgggatcatcaagaaacaaatcttgaagcacctctccagatttaccaaaaatttatctcctgacaagataaatctaagtacccttaaaggagaaggtgaactgaagaatttggagttggatgaagaagtactccagaatatgttggatttgccaacatggcttgctatcaacaaagttttttgtaataaagcgtccattaggatcccatggacaaaactgaaaacacatcccatctgtttgtccctggataaagtaataatggaaatgagtacatgtgaagaaccaagaagccctaatggcccatcaccaattgcaactgcttcaggacaaagtgaatacggctttgctgaaaaagtagttgagggaatttctgtttctgtaaattctatagtcatcagaattggagcaaaagccttcaatgcatcatttgaactttctcagcttcggatctatagtgtaaatgcacactgggaacatggagatttgagatttactcgtattcaggatccacagagaggagaggttttgacttttaaagaaataaattggcagatgataagaatagaggcagatgccacccaaagttcacatcttgaaattatgtgtgctcctgttcgattaataaccaaccaatcaaaaatcagagtcacacttaaaagaaggttaaaggactgcaatgtcatagcaacaaagttagttctaatattggatgacttattatgggttttgactgattcccagttgaaagctatggtacaatatgcaaagtctcttagtgaagcaatagaaaaatcaacagaacaaaggaagagtatggctcctgaacctacacagagctctacagtagtcgcatctgcccagcaagtgaagacaacgcaaacttcaaatgctcctgatgtaaatgatgcaattgtgaaactattcaatgattttgatgttaaggaaacctcccatcatttagtgatttctcatctagatctacacatatgtgatgacattcatgctaaagaaaaagagtcaaacagacgtattactggaggggcaatgcaactctcttttacacagctaactatagattattatccttatcataaagcaggagatagttgtaatcattggatgtattttagtgatgcaaccaaaacaaaaaatggatgggccaatgagttattgcatgaatttgagtgcaacgttgaaatgcttaaacaggctgtgaaggatcataatgtaggttcacctcctaaatccccaacacatgcctctccccagcacacacaaacagagaaggactaccctctgaaagggacatgcagaacaccttcagtattatctcaacaatcaaaagctaagctaatgtctagttctgttgtggttagacttgcagatttcaatatataccaggtctctacagcggaacaatgtcgttcttcccccaaaagcatgatttgctgcaataaaaaatccctatatcttccacaagaaatgtcagctgtctatatagaattcacagaatattactatccagatggaaaggattttccaactgccttcctaagcagatgagaaaactcaagatagatgaaggaagacatctgctctgcatctcatagggagtaaaatggcacagttgaaactcaagcattgtcttgtaaatctaaattcattgttttttctccactgtattacactgctcccctttgcccctgtattcaccacggccattgtctgttattgcataatcatagtattccagccatgcccccataattgtttttcttaaataaaatatatcattgaacaagtaaaaaaaaaaaaaaa

SEQ ID NO: 466 - DNA, 3743 bp, HOMO SAPIENS
tctgccccttccccccgcccccgcccgcctcggctcccgcagcgctagtgtgtccgcctagttcagtgtgcgtggagattaggtccaagcgcccgcccagaggcaggcagtccgcgagcccagccgccgctgtcgccgccagtagcagccttcgccagcagcgccgcggcggaaccgggcgcaggggagcgagcccggccccgccagcccagcccagcccagccctactccctccccacgccagggcagcagccgttgctcagagagaaggtggaggaagaaatccagaccctagcacgcgcgcaccatcatggaccattatgattctcagcaaaccaacgattacatgcagccagaagaggactgggaccgggacctgctcctggacccggcctgggagaagcagcagagaaagacattcacggcatggtgtaactcccacctccggaaggcggggacacagatcgagaacatcgaagaggacttccgggatggcctgaagctcatgctgctgctggaggtcatctcaggtgaacgcttggccaagccagagcgaggcaagatgagagtgcacaagatctccaacgtcaacaaggccctggatttcatagccagcaaaggcgtcaaactggtgtccatcggagccgaagaaatcgtggatgggaatgtgaagatgaccctgggcatgatctggaccatcatcctgcgctttgccatccaggacatctccgtggaagagacttcagccaaggaagggctgctcctgtggtgtcagagaaagacagccccttacaaaaatgtcaacatccagaacttccacataagctggaaggatggcctcggcttctgtgctttgatccaccgacaccggcccgagctgattgactacgggaagctgcggaaggatgatccactcacaaatctgaatacggcttttgacgtggcagagaagtacctggacatccccaagatgctggatgccgaagacatcgttggaactgcccgaccggatgagaaagccatcatgacttacgtgtctagcttctaccacgccttctctggagcccagaaggcggagacagcagccaatcgcatctgcaaggtgttggccgtcaaccaggagaacgagcagcttatggaagactacgagaagctggccagtgatctgttggagtggatccgccgcacaatcccgtggctggagaaccgggtgcccgagaacaccatgcatgccatgcaacagaagctggaggacttccgggactaccggcgcctgcacaagccgcccaaggtgcaggagaagtgccagctggagatcaacttcaacacgctgcagaccaagctgcggctcagcaaccggcctgccttcatgccctctgagggcaggatggtctcggacatcaacaatgcctggggctgcctggagcaggtggagaagggctatgaggagtggttgctgaatgagatccggaggctggagcgactggaccacctggcagagaagttccggcagaaggcctccatccacgaggcctggactgacggcaaagaggccatgctgcgacagaaggactatgagaccgccaccctctcggagatcaaggccctgctcaagaagcatgaggccttcgagagtgacctggctgcccaccaggaccgtgtggagcagattgccgccatcgcacaggagctcaatgagctggactattatgactcacccagtgtcaacgcccgttgccaaaagatctgtgaccagtgggacaatctgggggccctaactcagaagcgaagggaagctctggagcggaccgagaaactgctggagaccattgaccagctgtacttggagtatgccaagcgggctgcacccttcaacaactggatggagggggccatggaggacctgcaggacaccttcattgtgcacaccattgaggagatccagggactgaccacagcccatgagcagttcaaggccaccctccctgatgccgacaaggagcgcctggccatcctgggcatccacaatgaggtgtccaagattgtccagacctaccacgtcaatatggcgggcaccaacccctacacaaccatcacgcctcaggagatcaatggcaaatgggaccacgtgcggcagctggtgcctcggagggaccaagctctgacggaggagcatgcccgacagcagcacaatgagaggctacgcaagcagtttggagcccaggccaatgtcatcgggccctggatccagaccaagatggaggagatcgggaggatctccattgagatgcatgggaccctggaggaccagctcagccacctgcggcagtatgagaagagcatcgtcaactacaagccaaagattgatcagctggagggcgaccaccagctcatccaggaggcgctcatcttcgacaacaagcacaccaactacaccatggagcacatccgtgtgggctgggagcagctgctcaccaccatcgccaggaccatcaatgaggtagagaaccagatcctgacccgggatgccaagggcatcagccaggagcagatgaatgagttccgggcctccttcaaccactttgaccgggatcactccggcacactgggtcccgaggagttcaaagcctgcctcatcagcttgggttatgatattggcaacgacccccagggagaagcagaatttgcccgcatcatgagcattgtggaccccaaccgcctgggggtagtgacattccaggccttcattgacttcatgtcccgcgagacagccgacacagatacagcagaccaagtcatggcttccttcaagatcctggctggggacaagaactacattaccatggacgagctgcgccgcgagctgccacccgaccaggctgagtactgcatcgcgcggatggccccctacaccggccccgactccgtgccaggtgctctggactacatgtccttctccacggcgctgtacggcgagagtgacctctaatccaccccgcccggccgccctcgtcttgtgcgccgtgccctgccttgcacctccgccgtcgcccatctcctgcctgggttcggtttcagctcccagcctccacccgggtgagctggggcccacgtggcatcgatcctccctgcccgcgaagtgacagtttacaaaattattttctgcaaaaaagaaaaaaaagttacgttaaaaaccaaaaaactacatattttattatagaaaaagtattttttctccaccagacaaatggaaaaaaagaggaaagattaactatttgcaccgaaatgtcttgttttgttgcgacataggaaaataaccaagcacaaagttatattccatcctttttactgatttttttttcttctatctgttccatctgctgtattcatttctccaatctcatgtccattttggtgtgggagtcggggtagggggtactcttgtcaaaaggcacattggtgcatgtgtgtttgctagctcacttgtccatgaaaatattttatgatattaaagaaaatcttttgaaatggctgttttttaaggaagagaatttatgtggcttctcatttttaaatcccctcagaggtgtgactagtctctttatcagcacacacttaaaaaatttttaatattgtctattaaaaataggacaaacttggagagtatggacaactttgatattgcttggcacagatggtattaaaaaaaccacactcctatgacaaaaaaaaaaaaaaaaaaa

SEQ ID NO: 467 - DNA, 5876 bp, HOMO SAPIENS
agaacccgccccggaggggagggacgcagggaagagtcgcacggacgcactcgcgctgcggccagcgcccgggcctgcgggcccgggcggcggctgtgttgcgcagtcttcatgggttcccgacgaggaggtctctgtggctgcggcggcggctgctaactgcgccacctgctgcagcctgtccccgccgctctgaagcggccgcgtcgaagccgaaatgccgccaccccggaccggccgaggccttctctggctgggtctggttctgagctccgtctgcgtcgccctcggatccgaaacgcaggccaactcgaccacagatgctctgaacgttcttctcatcatcgtggatgacctgcgcccctccctgggctgttatggggataagctggtgaggtccccaaatattgaccaactggcatcccacagcctcctcttccagaatgcctttgcgcagcaagcagtgtgcgccccgagccgcgtttctttcctcactggcaggagacctgacaccacccgcctgtacgacttcaactcctactggagggtgcacgctggaaacttctccaccatcccccagtacttcaaggagaatggctatgtgaccatgtcggtgggaaaagtctttcaccctgggatatcttctaaccataccgatgattctccgtatagctggtcttttccaccttatcatccttcctctgagaagtatgaaaacactaagacatgtcgagggccagatggagaactccatgccaacctgctttgccctgtggatgtgctggatgttcccgagggcaccttgcctgacaaacagagcactgagcaagccatacagttgttggaaaagatgaaaacgtcagccagtcctttcttcctggccgttgggtatcataagccacacatccccttcagataccccaaggaatttcagaagttgtatcccttggagaacatcaccctggcccccgatcccgaggtccctgatggcctaccccctgtggcctacaacccctggatggacatcaggcaacgggaagacgtccaagccttaaacatcagtgtgccgtatggtccaattcctgtggactttcagcggaaaatccgccagagctactttgcctctgtgtcatatttggatacacaggtcggccgcctcttgagtgctttggacgatcttcagctggccaacagcaccatcattgcatttacctcggatcatgggtgggctctaggtgaacatggagaatgggccaaatacagcaattttgatgttgctacccatgttcccctgatattctatgttcctggaaggacggcttcacttccggaggcaggcgagaagcttttcccttacctcgacccttttgattccgcctcacagttgatggagccaggcaggcaatccatggaccttgtggaacttgtgtctctttttcccacgctggctggacttgcaggactgcaggttccacctcgctgccccgttccttcatttcacgttgagctgtgcagagaaggcaagaaccttctgaagcattttcgattccgtgacttggaagaggatccgtacctccctggtaatccccgtgaactgattgcctatagccagtatccccggccttcagacatccctcagtggaattctgacaagccgagtttaaaagatataaagatcatgggctattccatacgcaccatagactataggtatactgtgtgggttggcttcaatcctgatgaatttctagctaacttttctgacatccatgcaggggaactgtattttgtggattctgacccattgcaggatcacaatatgtataatgattcccaaggtggagatcttttccagttgttgatgccttgagttttgccaaccatggatggcaaatgtgatgtgctcccttccagctggtgagaggaggagttagagctggtcgttttgtgattacccataatattggaagcagcctgagggctagttaatccaaacatgcatcaacaatttggcctgagaatatgtaacagccaaaccttttcgtttagtctttattaaaatttataattggtaattggaccagttttttttttaatttccctctttttaaaacagttacggcttatttactgaataaatacaaagcaaacaaactcaagttatgtcatacctttggatacgaagaccatacataataaccaaacataacattatacacaaagaatactttcattatttgtggaatttagtgcatttcaaaaagtaatcatatatcaaactaggcaccacactaagttcctgattattttgtttataatttaataatatatcttatgagccctatatattcaaaatattatgttaacatgtaatccatgtttctttttcaaatctaaagttaaaaaaaaatagcagaagccagtgtcttaaagtctatcttttgtttctaagaccatgggatttcataatctcaagataaaatatgtatgaagtaattaatgtagaatttttacaccaaataataaataatgcttaataaactagagatatgagatgtgtaggaaatttggttaaacttttttcagatactttctggcccaaataataatttgttagcaaataatatgacccttgaactcaatggccatctattaaaagactgttgttcacactggaaaacatttaaagatgtgactatatccatgggtggattgaatcactcaaaatatattagtatccttctttagggatggttggttacagacatgtatttattcaggaggcagaaaatattccattttaattgcttattaaagaaaacattaaattctaaattattttgaggactgtgaagacttttcattagtgtaatattaggtcattgtcaatctcccagaatgtagttctatattctctaaatatgaaagtatccagaaaggccagtggtagtaaaaagcttagtgtatataatctcaaaagggatggaatatttacagctcatatttataacatgttgaatcttctcagttatcagtagtcatcagaagtgtcaatagctttctaaataaatattaaatatctactgtcctgtagtgaaggagtaatttttagtaattttctctttacaaagtctccagtgtttccaggtaaatatttgtgaaacaaaatacagcaaactacattgttacttcagtgtattgttgccaaaaatgacaagatattatattaaaatcagtaaattttagacagattttaaaaattaattagcctacaatagaggttatatggtaacacggtgatcttctaagcagttaagtgactgactgttctggcaacaacgacttctccgtgactgaagggccctgttcatttcctgatcctgaagctcgtctctcttttgagcctccgcttgctttggtcgatggtttccctcagctttttctttgctgttcttcatcctcgttgttgctgtcatcatgttcactgtggcttttacaatacagcctgtaaattccttatgacatagttcagtgcatttggctttatcgcctgctccacagttctttacctttacttggcttagagaaactgtatctttgttgcttcatataacctttccccaaccccactaagctggacataacttattagtggtcctcccgtcactttatttgtagaaatctctctttcacatgagcaggggttctttcatgtggtttagctgacagcagaactagtgattctagacattttgcatggccctcattcagtggctcacaaacatgagggagcatcagaactacttgaggggcttgttaaaacccagtgcgttagaagtcggatgcggtggctcacacctgtaatcccagcactttgggaggcccaggcaggcggatcacttgaggttaggagttcaagaccagcctggccaacatggtgaaaccccgtctctactaaaaatacaaaagttagccgggtgtggtggtgcatgcctgtaatcccagcttcttgggaggccaaggcacaagaatcgcttgaaccaggagacggaggtttcagtgaatgaagatcgtgccattgtattccagcctcggcaacacagcaggactgtgattttctttggagactcctagattttctgtggttttgaactgaatttgttggatgttggcaagtgcctcttatgagctgtttctttatcctgcatttgccccacaaagacttatctggaggtgagcaaagtatgtttggtagtgaggtcacaaaggcaatcagccccttcctccccactcccattgccatcttctcagtccttctccctttctttccaagtagtttacccacccctcctctttcctcccctgtccctaaaataatccacgtgtcttcctaaaatctctctttgatcctgtcctttgataacaccgtcagtgcctactactgggtctagacagacctctgttgagcagtcagagtcttccctgactccacaatgcccctttccttggctgaccagtatgactactggtccccacctttcccttgcctatccctacctccctcctactaggttgtcccatccctctcttcacccattcattcatgaccatttttcactaccaagctccccccctcccgaaggaggctgaggtttttgtgactctctagactctattgtgggatggaatgaacattgctaaagaatcttgtgttcgctttactttaaaaaggtatttttttcctaattataaaactgatgtgtcagttacggaaaaattagaaatgcagcacaaatacatgaatattttaccacgaaattgccatataatatcttgtcttttttgggggtgtgaattttttgcattgttctgatcatattctttatcatgtaatttatgttcttttttactaagtattatgtgtggttattatagattttcacaaagatatattgctggtaatatattttattgtgtagtcttataatttacttaaccttctttcaattgttagaaatttaggctatttccagattttcagtattgtaaataatgctgtgatgaccaattttgtgaataaaatgtttttatgtatttcagattattcccttaggatagtctctcagtgccaagttgtcaaaaacatctctattttgcttatcttcctgctctcttgctgccttagggggtagtaaactgaaacataaagtaaacatgcatacaaataaaaaacataaaacaaaaataagcaacctgatggtaataggtgaaagtggtaacctgttttaactttgaattcttgccgggcgcggtggctcacgcctgtaatcccagcactttgggaggctgaggcgggtggatcacgaggtcaggagttcaaaaccagcctggccaagatggtgaaatcccgtctctactaaaaatacaaaaattagccgggcgtggtggcgggcgcctgtaatcccagctacttgggaggctgaggcagagaattgcttgaacccaggaggcggaggttgcagtgagccaagatcgcgccactgcactccagcctgggtgacagagcgagactccgtctcaaataaaaaacaacaaaaaacaaaaaaaacttaaaattctttgcttgttagtgaccttgatcatggttctctttgtacgatagttgggcatctgtatttccacttgtgtgaatttgcctttaaattttggttatgggtttcaccttttaaaataatcaaacatatttatcttttcctgtgtgataggtttttttctgtatcttttcctgttaaacacacagacccctccccaatctggacattgaataaatattcattttcctttgcattgttaaaaaaaaaaaaaaaaaaaaaaaa

SEQ ID NO: 468 - DNA, 1027 bp, HOMO SAPIENS
gggcaagagttgggcaaaaaaatcaaggtatttggtcccggaacaaagcttatcattacagataaacaacttgatgcagatgtttcccccaagcccactatttttcttccttcaattgctgaaacaaagctccagaaggctggaacatacctttgtcttcttgagaaatttttccctgatgttattaagatacattggcaagaaaagaagagcaacacgattctgggatcccaggaggggaacaccatgaagactaacgacacatacatgaaatttagctggttaacggtgccagaaaagtcactggacaaagaacacagatgtatcgtcagacatgagaataataaaaacggagttgatcaagaaattatctttcctccaataaagacagatgtcatcacaatggatcccaaagacaattgttcaaaagatgcaaatgatacactactgctgcagctcacaaacacctctgcatattacatgtacctcctcctgctcctcaagagtgtggtctattttgccatcatcacctgctgtctgcttagaagaacggctttctgctgcaatggagagaaatcataacagacggtggcacaaggaggccatcttttcctcatcggttattgtccctagaagcgtcttctgaggatctagttgggctttctttctgggtttgggccatttcagttctcatgtgtgtactattctatcattattgtataacggttttcaaaccagtgggcacacagagaacctcactctgtaataacaatgaggaatagccacggcgatctccagcaccaatctctccatgttttccacagctcctccagccaacccaaatagcgcctgctatagtgtagacatcctgcggcttctagccttgtccctctcttagtgttctttaatcagataactgcctggaagcctttcattttacacgccctgaagcagtcttctttgctagttgaattatgtggtgtgtttttccgtaataagcaaaataaatttaaaaaaatgaaaagtt

SEQ ID NO: 469 - DNA, 2914 bp, HOMO SAPIENS; identical to SEQ ID NO: 461

SEQ ID NO: 470 - DNA, 3417 bp, HOMO SAPIENS
atctggctgcgcctagtgggccgttgccttacagttgctgagaggaggcgagaggcgggggcgctagggccgagatcatgtctgactgggagaggtttccttggcagcagaggacgctaggtttgggatgaaagaagctgggcagatgcaaaatctggagagcgcgagggccgggcggtcagtcagcacccagactggcagcatgaccggtcagataccaaggctttctaaagtcaaccttttcactctgctcagcctctggatggagctctttccagcagaagcccagcggcaaaaatctcagaaaaatgaagagggaaagcatggacccttaggagataatgaagagaggaccagagtatctactgacaaaagacaggtaaagagaactggtcttgtggtggtgaaaaacatgaaaattgttggtctccactgttctagtgaagatttacatgccgggcagattgctcttattaaacatgggtcaaggctgaaaaactgtgatctttatttttccagaaaaccatgttctgcttgtttgaaaatgattgtaaatgctggagttaaccgaatttcatactggcctgctgatccagaaataagtttgcttacggaggcttctagttctgaagatgcaaagttagatgccaaagcagtggaaagattgaagtcaaacagtcgggcccatgtgtgtgtcttacttcaacctttggtgtgttatatggtgcagtttgtagaggagacctcttacaaatgtgactttattcaaaaaattacaaaaacattgccggatgctaacactgacttttattatgaatgtaaacaagaaagaataaaagaatatgaaatgttatttttggtttcaaatgaagaaatgcataagcaaatactgatgactataggtttggagaacctgtgtgaaaatccatactttagcaatctaaggcaaaacatgaaagaccttatcctacttttggccacagtagcttccagtgtgccgaactttaaacacttcggattttaccgtagcaatccagaacagattaatgaaattcacaatcaaagtttgccacaggaaattgcaaggcactgcatggttcaggccaggttattggcatatcgaactgaggatcataaaacaggagttggggcagtcatttgggcagaagggaaatctagaagttgtgatggaacaggtgccatgtactttgtaggatgtggttacaatgcttttcctgttggatctgagtatgctgacttcccacacatggatgacaagcagaaagacagagaaataaggaaattcagatacatcatacatgcggaacagaatgccttgacatttaggtgtcaagaaataaaaccagaagaaagaagcatgatttttgtgacaaagtgcccatgtgatgagtgtgtacctttaattaaaggtgcaggcataaaacaaatctatgcaggagatgtagatgttggaaaaaagaaggcagacatctcttacatgaggttcggggagcttgaaggtgttagcaaatttacgtggcagctgaatccatcaggagcttatggtcttgaacaaaatgagcctgaaaggagagaaaatggtgtgttgagacctgtcccacagaaggaagagcagcaccaggacaagaagctgcgcctcggaatccactaagaaggcctgtctacactgcaggggaacctcaagaacttttcattgcacttctaaaattcagccttgttcattcagaaaataaggatggattttgtgaataattgaaaagattttttaaggaagctaatttatttctaggatacaaatggtgttaataagaatatttgtcttttagatttatgtgtgggttttccataatgtagtagtgtgttattttattacacgaaatgagggagcaataacttcaaccaatgtaatcaccaacagggactgatttctatttatcttgactttatattagccaatttgaaagggtctgcttcacaagaggtcatgcctctgcagggaatcacacaccttttgagaaatattaattcttttgaattacaagagtgacagttagtaaactgctccagggaaataagtgtcatcttttaagagtcagtgtatagcaaaccaaaagatcacatttatacccaaagctttctagtaatcagaatttacttaattagaattgactcataaaaataaagttagtggactttgtctccatttttaaagtatattttgtaaatgttaattctgtggtcctgtttatcacagactttgggtagcaataggaagagagtgttattctgagacagtgtcgctgcttgatatcactgactcttgaaatcactaacagtgaacctcaaatttggttatgatgttaacagagaagaaatatttgagtctggaatattgaaactagctttcctagaattccattaataaatgctgctcccccatatagtcttcccttctgtataattaacataggttgtctcatggctttgatcttcaaaaggaagagccttttaaaaacatttgccaacctcaagaataaatactgaaagtcttgaaagtatggtcatttcagctattccagattgctgtctgtgatttctcacatttttatttgctgagaaacattcagaaaattattccaaaaatgaaggtacattttctgttctctcctaggttagagaggggtggcctggggtgcttcatgagaaatgtcttcctggatctgcggtggtcaggtttgcctctgcttttgttccctgcctttccgccacatcacacggcctcactgggcttcctaccagtttctcagaattacacgcacgaccatccaaacattggctccatgccagggctgtgactgcagcctgtgtaggaccatggggagttcagagtcatcatacaaggcagccaagaactgccataaacactacacagatggagggcatgggataggacaggagaggaggtgatgtacacttagaggtaactaaggctagtttgaaaaccgtgaattaagatattcttatcagtataaaaacactgagattgcttacctcccaaattgctttattgtattaactctcatgcttcagctcttggatttgttgtttctaactaacatgtcatgtacaccaaacattttataaatcaatcagtaaatattttgtaagacccaaaatcctggcatattgccaggtctgtggatttgcctgttgggtgttgggatgggatatcagaggaagaagcatacaagtgggaaaaactgtgattagaaagggaaaaataggcatttccacagtactattaagagaggcatgataatgccattttttttcttctgtacaactggtcagatttcaataaataatcattgatggtttacaaaaaaaaaaaaaaaa

SEQ ID NO: 471 - DNA, 1135 bp, HOMO SAPIENS
gggcagagggaataagaggctgcctctgcccaccagtcctgccgcccaggacccgcagcagagacgacgcctgcagcaaggagaccaggaaggggtgagacaaggaagaggatgtctgagctggagaaggccatggtggccctcatcgacgttttccaccaatattctggaagggagggagacaagcacaagctgaagaaatccgaactgaaggagctcatcaacaatgagctttcccatttcttagaggaaatcaaagagcaggaggttgtggacaaagtcatggaaacactggacaatgatggagacggcgaatgtgacttccaggaattcatggcctttgttgccatggttactactgcctgccacgagttctttgaacatgagtgagattagaaagcagccaaacctttcctgtaacagagacggtcatgcaagaaagcagacagcaagggcttgcagcctagtaggagctgagctttccagccgtgttgtagctaattaggaagcttgatttgctttgtgattgaaaaattgaaaacctctttccaaaggctgttttaacggcctgcatcattctttctgctatattaggcctgtgtgtaagctgactggccccagggactcttgttaacagtaacttaggagtcaggtctcagtgataaagcgtgcaccgtgcagcccgccatggccgtgtagaccctaacccggagggaaccctgactacagaaattaccccggggcacccttaaaacttccactacctttaaaaaacaaagccttatccagcattatttgaaaacactgctgttctttaaatgcgttcctcatccatgcagataacagctggttggccggtgtggccctgcaagggcgtggtggcttcggcctgcttcccgggatgcgcctgatcaccaggtgaacgctcagcgctggcagcgctcctggaaaaagcaactccatcagaactcgcaatccgagccagctctgggggctccagcgtggcctccgtgacccatgcgattcaagtcgcggctgcaggatccttgcctccaacgtgcctccagcacatgcggcttccgagggcactaccgggggctctgagccaccgcgagggcctgcgttcaataaaaag

SEQ ID NO: 472 - DNA, 5021 bp, HOMO SAPIENS
gctgggattacaggcatgtgctaccatgcccagctaattttgtatttttagtagagacagggtttctccatgttgctcaggctggtcttgaactcctgacctcaggtgatccgcccgcctcggactcccaaagtgctgggattacaggcatgagccaccatgcctggccggatgtgaattatcttaaaaattttcaggtaattctaatgggccaaggttgagaacccctgctctgggcccatccgagcaccaggctgtcacaaacgcatgcatgcactcacgcccgtgggcttggggggcttcggaaatgtgcttctgcttttttgagatggggtctttctgttgcccatcccggagcacagtggcacgatcacagctcactgcagcctcgacctcctgggctcaggtgatcctcccgcctcagcctcctgagtgtctgcttctggttttcatgatgacctggggcccaggcatactacacttgtgctgttcaggggccagtcctgcaccaggagcccatcagccacagctccgccgagaagcactgatatgcagagctaagcagctttgtttccacgtggatcctgcgtaggttttcttggtccatccgtagacaccgcactcctgcagaggatcttctcgggatgccccactgtctctgttttccctcttcactgaacactcagtcggggctcgccatgatgcctctgtgtctgctggcttctcccccattggaacagccttcttggcacgccacactgctagctgctgggcactgtgctttctgcctttaccgttctgccgtgatgttgccaaaatagcagcaacaacaacaacaacaaaggctgggcacctggctcatgcctgtattcccagcagttcgagatcagcctgggcaacatggtgagaccctatctctacaaaaataaaaaatgaaatgagctgggtggggtggcgcatgcatgcctgtggtcccagctacttgggaggctgaggtcggaagatcgctggagcttaaccttgaggtcaaggttgcagtgagccgagattacatcactgcactccagcgtgggagacagagaccctgtattaacaaacaaaaacacaaaccacaaagggcaggtctgaaactgccatttaaaaaaaaatttaataaacttaaaaaaatatatatccacagatgcaggtgaagaacctgttgtcttcctcaagcctctttttcacccatgggtggaaatggtgccctggacacccaggcccacgaggtctttgcgtggggtccctacacagggctttagcttacactgtgctgccctcctgtcccccgagttcccagtctgtcaaaatccaacctggtctcccaggcccagggcaaatgccacctcctccatgaagcctgccacatcctttgcacacccttgggcgctgaccttgttctcccagcgcacaggcacgggtacagtttgcccctgtagtagtaactcaggcacaaaacgaactcttgctgaggctcggccgcgcagagctgagggttgccgcttccaggttcaagtgcattttgagtttcattcccagcttccttctttttctggtctttaatttcttctccggattaggtcccactcaatgctttccttctcaatttccaaaagagtatggtcagagccagcagcacaccaccttccccatgggtgggggggggccagcctgtggcgggggtgcgggtcccatcttttcgaaggaattgacccacagtgggcgggtccacctttgaccttgccccagggagcgcagacagaaaaaagatccttgcttagtttgaggggccgctggggtgctcggtttgtcttcagaggcctgtctgtaacaccaatgccaacccggtggcactgactggtcaccctgaaggccacggccagtgtcctaggaagggactcaatttctagctgtgccacctgagattctggggttaggctggttgtgcttctgaagttccactgtgctcaaagtgcttggtgaaagttagcgaaggtgattttacaaaaatagatgcataaaatgtctaggaaacacaaaaaatcctcattactcttctctccaaatattttttaagccccaactggaccctaggcaaaagtgagtggcactcctctgccaggactccaggcaagccccggcatcttcttgctgccgtcccagacaacagaagttaccagatgaacagacttggatgggccacgggggtggagagctggaaagcttggctgtgcctctcgatgatgattaagatttcaatatttacagcaaaaccacaaagcaaatgatagaataaagcaaaacaatggaaaatctgagttcactcgtgagagaggtacgtatgtgagctctgaggaaattacagagggaacgcatgcagcgggacagctctcccaatcgcagcgtgcaaagtagacatccatagtgtcttttgaaaaatgaaaaacacattactttgaacagccaagaaaaaaattgcaatttattaagattcaataaagcgttgtactttcgaaagcaactttcgatgcatgttcttcaacagtcacattctatgaggaaaacattaagagccacgaacttgttgtttaatctcagagttacagacatattaagttcaaaataaaaggtaaaaaaaacaaaaaacaaacaaacaaaaaacccctcaaacccaacaaaacccaaaaacaaacaaacatattcttgacttccatccccaattttaaaacaacagtttttctacaactcaatgctcgccggcagcacgggaagtggtatgtcggacgcacatacgcacacgcatgctcacacgcacacatattggatatacatacgcaggtgtatgtccatcgaatatatagaacgcatgtaatggcaatgagatgcagtcactctgaggaaggttggtttttctaaatatcctactaaacttgagaaaaaaagtcttgaacccagtttgtgcatagttcatgatcctctataaaaccagcttttgtggatctgcagtcttgcaggacttttttttttttttttgtattttttttgttttgataaaaccattaaaaagctaattaaaaaaatgtaatgcacaagtttcctgatcaagcaggcagggagcacaatgttcatatatatattttttaaaacatacttgaaggtatgttattccattgtctttcttccttgcaaaacaatcaaaacattgatcatttttaaaacataaagcaatttttaatatataaagcactcttcaaacatctatttcttttgagtccattatttggtaaatatgtaactgctacacattagagattaggtatttttcttctttgtgtttttttttcctctttttcttttttttcatttttttgttttgttttgttttttttttttttaaataacatcttcagtgctaggagttgggtttaaaaatacatgaaatggtgtggagctgccctcgggagccctggctttcctgagagcgcgtccggcatgtgcaagacagtggccacaacgcctgtcaccttgacgaaggggcgaaagcaatcgacagagtccacgacgatggccgagggaacaacactgtcccgtcccagagctctgaaggaacgcatctgcattctgaaaataggtttctttacgacggaagtctttttttttttttaattcctttttaaatttttaaaattttaaagtctgaaggagaaaaaaaggtctgtaaacaggtgggagcccaaaccccaggctcccccaaaagcagtcacaacccacgcccaagtgcttgtttctgttccttccacggaaccatccattctttacaagtatctatggccacagttcaacaacagttttttttttttttctctttaactttatattccaaatggaaaaatggtgcaatactctggtaataattttcttgcattagtccacaataaaaagctgctaaaggtaggtatacatgttatttctccagagatatacactgtactttttaaacgcagtcacagagtccttgagtaaacatttacacatgaattgtcgccagccctgtcctaggaattctctgtaatgtataggattagctaaaggaagggcgaggacactcagtgcaaagttagaagctaataataacaaccgtttgaccaatgcgccaaaaaaaaagcgtatactgaatacaagggaaaacccacagttaaatcctcacacgctttcaaacacacaaacacagaaaactgcacgccgtgcaggagcacgcgccacacatgcacacacacacacacttctgtttcaacacgcacacatacacacacgtaggctatgaacttagaaatttttcctagagcctgtttctgtgtactgatgtcaacctggaagtgtagaattagaaagtgttcacatttcactattggcctgctggattcaagtatttgcatgtttgatatgtctttttttaacttttaaaaaatattttttgggataaaaaaatgacatgaaaaagtaatgaaacaagggtaatgtgcataggcggatccaggggaacagagagcagatcgcagcccgcgccttccgctcagctcccgccgcggagccgctctgcgcccggcggtccacaccagactctgccctgattaccggccgcctctggtcatgtgcataatcgtcacaggctcattttaaataggcttcacgtctccctccctcccccacagataaaataaccctttccagcccacaatctgaaaagtgcccttcatgatagaactattctaagcagcttttatacttaaaaaaaaaaaaaaaatcaaaatgacaacacactatacaaacataagacgcacaaaataaaaagctacgaggaacatcctgtcattagcatgtgacgctgacccaccgcagcccgcactgttttgcgaacagttcgcaaggactgcggccaaggttcgtcttcagtcctggacagaggtactcaaaagggcggccgc

SEQ ID NO: 473 - DNA, 2568 bp, HOMO SAPIENS
cgcgcgcgcagtcgcgcgcgggtcgtgccgtaccaccgtcgcgggcaggctcggccacgagcgccagagccccgcgcctcccctcgcggcctgtcccaagtccctgccccgcaacagagcgtcacttccgccatccccggcagcggttggggcggggcgcacgggggagggggccaggtcggagggaagcccgcccgtgcccgagcccgcgcccgagcagggactacatttcccgaggggcctcggcggcggctgcggcgacgggcgcggcaacgtcccccggaagtggagcccgggacttccactcgtgcgtgaggcgagaggagccggagacgagaccagaggccgaactcgggttctgacaagatggccgggctgccccgcaggatcatcaaggaaacccagcgtttgctggcagaaccagttcctggcatcaaagccgaaccagatgagagcaacgcccgttattttcatgtggtcattgctggccctcaggattccccctttgagggagggacttttaaacttgaactattccttccagaagaatacccaatggcagcccctaaagtacgtttcatgaccaaaatttatcatcctaatgtagacaagttgggaagaatatgtttagatattttgaaagataagtggtccccagcactgcagatccgcacagttctgctatcgatccaggccttgttaagtgctcccaatccagatgatccattagcaaatgatgtagcggagcagtggaagaccaacgaagcccaagccatagaaacagctagagcatggactaggctatatgccatgaataatatttaaattgatacgatcatcaagtgtgcatcacttctcctgttctgccaagacttcctcctctttgtttgcatttaatggacacagtcttagaaacattacagaataaaaaagcccagacatcttcagtcctttggtgattaaatgcacattagcaaatctatgtcttgtcctgattcactgtcataaagcatgagcagaggctagaagtatcatctggattgttgtgaaacgtttaaaagcagtggcccctccctgcttttattcatttcccccatcctggtttaagtataaagcactgtgaatgaaggtagttgtcaggttagctgcaggggtgtgggtgtttttattttattttattttattttatttttgaggggggaggtagtttaattttatgggctcctttcccccttttttggtgatctaattgcattggttaaaagcagctaaccaggtctttagaatatgctctagccaagtctaactttatttagacgctgtagatggacaagcttgattgttggaaccaaaatgggaacattaaacaaacatcacagccctcactaataacattgctgtcaagtgtagattccccccttcaaaaaaagcttgtgaccattttgtatggcttgtctggaaacttctgtaaatcttatgttttagtaaaatattttttgttattctactttgcctttgtacagtttattttactgtgtttatttcattttcccaatttgacaatcgtattttaaaattgaaactgatggaacattctttcttggtcttcaccatctgacaaattgaatggcaagaggtggattttgccagtttcttttcactgatgcagatttgtgttaagatagtactgaatggagtatttataaactggccctgagcatgcataaagcatcagtatctgacctttttttaaccttctaggaatttgaaataaatgtgtttgtgttgtctgattagatgatcattggtgtcttgccacaatgtttaaaaattactgtacaggaaagtcacagcaaagatagcagttgtgactgacatgtaggactttcacagttgtgccacatttttgcctaaaatttgggttatgacatttttcttggttcttatctgaaaatttcatctgtaacctttcatgtgtgttaagaaacactgatctgatcatttgggatttgctgaggcatttgtgagtcttccttataaacctgatgagcagatctcaactatctagcttgtgtgtcatcagaaaggtttatccctttgagagtatcaagtcctcagttaatgattcttgctttcatccctccagtatttgctgtgggagctcgttttattctttaatttggaattcagtaatttttcttctttattgacgaattcctcccctcacaaaactgttctttcccacctctctccatatctaattcctgattcttgttatttttaagtcataaatgtagccagtcataaatacataaatgttaaccttcgggttgcaaccttgtctcttgcagtttaaggtaatggatattgtagcccatttgaattttcttcactcttattctcgtaattctggagtttcttcagattgtggtgtattttattgtgctcctatgtaagatgaagaattaactattaaaattacattttcaacatacaaaagcttttgatgactggtaactggtatccttccaaataaatgcattgcttggtaaaaaaaaaaaaaaaaaa

SEQ ID NO: 474 - DNA, 2117 bp, HOMO SAPIENS
gaaccggaagcgtgggtctggcggctgcaccggttcgcggtcggcgcgagaacaagcagggtggcgcgggtccgggcatgaagctgggccgggccgtgctgggcctgctgctgctggcgccgtccgtggtgcaggcggtggagcccatcagcctgggactggccctggccggcgtcctcaccggctacatctacccgcgtctctactgcctcttcgccgagtgctgcgggcagaagcggagccttagccgggaggcactgcagaaggatctggacgacaacctctttggacagcatcttgcaaagaaaatcatcttaaatgccgtgtttggtttcataaacaacccaaagcccaagaaacctctcacgctctccctgcacgggtggacaggcaccggcaaaaatttcgtcagcaagatcatcgcagagaatatttacgagggtggtctgaacagtgactatgtccacctgtttgtggccacattgcactttccacatgcttcaaacatcaccttgtacaaggatcagttacagttgtggattcgaggcaacgtgagtgcctgtgcgaggtccatcttcatatttgatgaaatggataagatgcatgcaggcctcatagatgccatcaagcctttcctcgactattatgacctggtggatggggtctcctaccagaaagccatgttcatatttctcagcaatgctggagcagaaaggatcacagatgtggctttggatttctggaggagtggaaagcagagggaagacatcaagctcaaagacattgaacacgcgttgtctgtgtcggttttcaataacaagaacagtggcttctggcacagcagcttaattgaccggaacctcattgattattttgttcccttcctccccctggaatacaaacacctaaaaatgtgtatccgagtggaaatgcagtcccgaggctatgaaattgatgaagacattgtaagcagagtggctgaggagatgacatttttccccaaagaggagagagttttctcagataaaggctgcaaaacggtgttcaccaagttagattattactacgatgattgacagtcatgattggcagccggagtcactgcctggagttggaaaagaaacaacactcagtccttccacacttccacccccagctcctttccctggaagaggaatccagtgaatgttcctgtttgatgtgacaggaattctccctggcattgtttccaccccctggtgcctgcaggccacccagggaccacgggcgaggacgtgaagcctcccgaacacgcacagaaggaaggagccagctcccagcccactcatcgcagggctcatgattttttacaaattatgttttaattccaagtgtttctgtttcaaggaaggatgaataagttttattgaaaatgtggtaactttatttaaaatgatttttaacattatgagagactgctcagattctaagttgttggccttgtgtgtgtgtttttttttaagttctcatcattattacatagactgtgatgtatctttactggaaatgagcccaagcacacatgcatggcatttgttccacaggagggcatccctggggatgtggctggagcatgagccagctctgtcccaggatggtcccagcggatgctgccaggggcagtgaagtgtttaggtgaaggacaagtaggtaagaggacgccttcaggcaccacagataagcctgaaacagcctctccaagggttttcaccttagcaacaatgggagctgtgggagtgattttggccacactgtcaacatttgttagaaccagtcttttgaaagaaaagtatttccaacttgtcacttgccagtcactccgttttgcaaaaggtggcccttcactgtccattccaaatagcccacacgtgctctctgctggattctaaattatgtgaattttgccatattaaatcttcctcatttatactattatttgttacgttcaatcagaatccccgaaacctcctataaagcttagctgccccttctgaggatgctgagaacggtgtctttctttataaatgcaaatggctaccgttttacaataaaattttgcatgtgccaaaaaaaaaaaa

SEQ ID NO: 475 - DNA, 538 bp, HOMO SAPIENS
  misc_feature (98)..(98): n is a, c, g, or t
  misc_feature (100)..(109): n is a, c, g, or t
  misc_feature (112)..(114): n is a, c, g, or t
gatctgacctcactccagagttgaagggcacagagaaggcacagctagaggcggcaggtacccctcaaagctctcgggagagggtacaaagtgggacntnnnnnnnnnnttnnnctccaggcctcaaaagccctgagagggctgcatgcaaggagacaaagctggagaaggatgtgggaggcaggtggctaagaagacaggctggaaagggacgtgggaggtaggtggctttgctctaaacagaatcgtctcagtaatgtgacactgcacatgtataggtaggctcgctcatgggcataaccctctaaaacacaccttttatggagtgaaattcacttaacagccatcttgaagcatatacttcggcggcatttgctggattcacgacgttgtgcaacctctgcttctccagtttcagaacatttcatccctccagaacaacagctcatccccattaagtaatcactcctcattccttccccatcctctggaaaccacagatctgctttctgtctctatggatttgtccgttttggat

SEQ ID NO: 476 - DNA, 3683 bp, HOMO SAPIENS
tcccaagaaggcggggcgggcggaggctggaggagccgccgagcggagacccgggagcaggagctgggcctaggtctgcgccctggagggaggtgtagaaagaggtacatggagaacaagtttgtcaatccgtctgaacttcagttgccttacctgtaaggcagccgtgtctgtgtttttgtctcgcagaattagagcccattgggaacgatgccaccaccgtcagacattgtcaaagtggccattgagtggccaggtgctaacgcccagctccttgaaatcgaccagaaacggcccctggcatccattatcaaggaagtttgtgatgggtggtcgttgccaaacccagagtattataccctccgttatgcagatggtcctcagctgtacatcaccgaacagactcgcagtgacattaagaatgggacaatcttacaactggctatctccccgtcccgggctgcacgccagctgatggagaggacccagtcatccaacatggagacccggctggatgccatgaaggagctggccaagctctctgccgacgtgactttcgctactgagttcatcaacatggatggcatcattgtgctgacaaggctcgtggaaagtggaaccaagctcttgtcccactacagtgagatgctggcattcaccctgactgccttcctagagctcatggaccatggcattgtctcctgggacatggtttcaatcacctttattaagcagattgcagggtatgtgagccagcccatggtggacgtgtcaatccttcagaggtccctggccatcctggagagcatggtcttgaacagccagagtctgtaccagaagatagccgaggaaatcaccgtgggacagctcatctcacacctccaggtctccaaccaggagattcagacctacgccattgcactgattaatgcactttttctgaaggctcctgaggacaaacgacaggatatggcaaatgcatttgcacagaagcatctccggtctataatcctgaatcatgtgatccgagggaaccgccccatcaaaactgagatggcccatcagctatatgtccttcaagtcctaacctttaaccttctggaagaaaggatgatgaccaagatggaccccaatgaccaggctcaaagggacatcatatttgaactgaggaggattgcatttgacgcagagtctgatcctagcaatgcccctgggagtgggaccgaaaaacgcaaagccatgtacacaaaggactacaaaatgctgggatttaccaaccacatcaatccagccatggactttacccagactcctcctggaatgctggccttggacaacatgctgtacttggctaaagtccaccaggacacctacatccggattgtcttggagaacagtagccgggaagacaaacatgaatgcccctttggccgcagtgccattgagctcaccaaaatgctctgtgaaatcctgcaggttggggaactaccaaatgaaggacgcaatgactaccacccgatgttctttacccatgaccgagcctttgaagagctctttggaatctgcatccagctgttgaacaagacctggaaggagatgagggcaacagcagaggacttcaacaaggttatgcaagtcgtccgagagcaaatcactcgagctttgccctccaaacccaactctttggatcagttcaagagcaaattgcgtagcctgagttactctgagattctacgactgcgccagtctgagaggatgagtcaggatgacttccagtccccgccaattgtggagctgagggagaagatccagcccgagatccttgagctgatcaagcagcagcgcctgaaccggctctgtgagggcagcagcttccgaaagattgggaaccgccgaaggcaagaacggttctggtactgccggttggcactgaaccacaaggtccttcactatggtgacttggatgacaacccacaaggggaggtgacatttgaatccctgcaggagaaaattcctgttgcagacattaaggccattgtcactgggaaagattgtccccacatgaaagagaaaagtgctctgaaacagaacaaggaggtgttggaattggccttctccatcctgtatgaccctgatgagaccttaaacttcatcgcacctaataaatatgagtactgcatctggattgatggcctcagtgcccttctggggaaggacatgtccagtgagctgaccaagagtgacctggacaccctgctgagcatggagatgaagctgcggctcctggacctggagaacatccagattcccgaagccccaccccccatccccaaggagcccagcagctatgactttgtctatcactatggctgagcctggagccagaaacgacggtacccaggagaagggattttgggcccaggagaaacacttacattctggtgccttgtcttttgcttgtacagaatctgtagtgattttggtggccagtaaatgccagccatttctcaaacccacctcggaccacccagagtttcctcttggtccctgtctactaagagtcatgaaggcagggtgctctgcccactccatcaccatgaagcctgggattgggccacgaggaacaaacagcagatgcccttgccttccagtccaagaaactgcttcttgaaatggatttaacaacagccactcaccttttcctcctgagcctgctctctgatcagctggatccccacgtgagcaacagctggcccaggaaaggctgcctgcagaggacaggtgtgttgggcgtgttgagagccttgaagtgactacctgtatcttagatctgagtacaagcctgaggcttttgcttttgtcttttttgatgagggctcactccagcttcatatggtgccaagacgttgctgcttctgaggttggctctaacatctctggtctttagagccaccagatctctctggcccatacagatatcagagcagacggaaatttctccctgcaagcgctcagtctcatcccagcaagtcaaagacctcctggccaagtcctgccctcttaagtctccaggaacgctgcagggaaaacccagctgaggcctgggcctagactgtggtgaggtcactagattctactgctcttcccccacattaataccttttccttcctcagagagaaatctcccctaacctgaattgcagccccctccagtttgctttcctttggccttccagaccccaggaagttggccttcccttcctagtgctatggtttctgccattggccatgatttcagggagctggctgaggccggctgaggccacacctgtgccagtggggcttccctggtgctgcagcacttgtaaaccacacacacagcctctctccctggacatacgttagcacattggcattcagtattggtggcctggcatggtaggtactacccaatgaagagtgtactatatattttcattactataggccatacttatacagacgtgtatatatatttatataagatctacctatcttaggatggaaccttggggaaaaataaaattgaggggaagtaaaaagtatgtaacacttccagttgtgagccaagattgtaaccagagagcagccaggagcttcctgtcagtaaccatgttttcaataaatactctttcatgtacaaa

SEQ ID NO: 477 - DNA, 282 bp, HOMO SAPIENS
gttggagtgtgcattcatagtcttgtggcttcagcttggctggttgagtggagaagaccaggtgacgcagagtcccgaggccctgagactccaggagggagagagtagcagtcttaactgcagttacacagtcagcggtttaagagggctgttctggtataggcaagatcctgggaaaggccctgaattcctcttcaccctgtattcagctggggaagaaaaggagaaagaaaggctaaaagccacattaacaaagaaggaaagctttctgcacatcacagc

SEQ ID NO: 478 - DNA, 268 bp, HOMO SAPIENS
aggttgactcctaggtagtgtgcctagtgaccaagagggctgctaagaaagctttctgaccacttgtggctgtcattggactgatttgcccagatgacatcaattgggaatttgaggcatgacctataaagatcagttgcttgcaagagtctcaggaaaataattgtggagttaagaaacttgaagcgatttttaaaaattacctaacccaaccttctcatttgaaaaattaaaaaataaataggccagatatggcagctcatgcctg

SEQ ID NO: 479 - DNA, 4268 bp, HOMO SAPIENS
gatacggcgcaccatatatatatcgcggggcgcagactcgcgctccggcagtggtgctgggagtgtcgtggacgccgtgccgttactcgtagtcaggcggcggcgcaggcggcggcggcggcatagcgcacagcgcgccttagcagcagcagcagcagcagcggcatcggaggtacccccgccgtcgcagcccccgcgctggtgcagccaccctcgctccctctgctcttcctcccttcgctcgcaccatggctgatcagctgaccgaagaacagattgctgaattcaaggaagccttctccctatttgataaagatggcgatggcaccatcacaacaaaggaacttggaactgtcatgaggtcactgggtcagaacccaacagaagctgaattgcaggatatgatcaatgaagtggatgctgatggtaatggcaccattgacttccccgaatttttgactatgatggctagaaaaatgaaagatacagatagtgaagaagaaatccgtgaggcattccgagtctttgacaaggatggcaatggttatatcagtgcagcagaactacgtcacgtcatgacaaacttaggagaaaaactaacagatgaagaagtagatgaaatgatcagagaagcagatattgatggagacggacaagtcaactatgaagaattcgtacagatgatgactgcaaaatgaagacctactttcaactcctttttcccccctctagaagaatcaaattgaatcttttacttacctcttgcaaaaaaaagaaaaaagaaaaaagttcatttattcattctgtttctatatagcaaaactgaatgtcaaaagtaccttctgtccacacacacaaaatctgcatgtattggttggtggtcctgtcccctaaagatcaagctacacatcagttttacaatataaatacttgtactaccttaatgataaggactccttaaagttccatttgctaatgattaatacactgtttgggctggccagtttttcatgcatgcagcttgacgattgagcacagtcaggcctttgtattaaaaatgaaaaatgaaaaaacaaattcaaaacctattcaaatgggttctagttcaatttgtttagtataaattgtcatagctggtttactgaaaacaaacacatttaaaattggtttacctcaggatgacgtgcagaaaaatgggtgaaggataaaccgttgagacgtggccccactggtaggatggtcctcttgtacttcgtgtgctccgacccatggtgacgatgacacaccctggtggcatgcccgtgtatgttggtttagcgttgtctgcattgttctagagtgaaacaggtgtcaggctgtcactgttcacacaaatttttaataagaaacatttaccaagggagcatctttggactctctgtttttaaaaccttctgaaccatgacttggagccggcagagtaggctgtggctgtggacttcagcacaaccatcaacattgctgttcaaagaaattacagtttacgtccattccaagttgtaaatgctagtctttttttttttttttccaataaaaagaccattaacttaaagtggtgttaaatgctttgtaaagctgagatctaaatggggacaaggcaggtggaggggaggccagtgtacatgtaaatgcccacagcccagcattgggtttccctcccaaggccccagcaccaacctctgagcccaagaccttgcctgaaaacaagcagataccgattgcttcatcctatttatggacatgtaggtctagttgcattttcactggggggaggggggaaggtgaattatggtaacttttaatgatctattcaggcagtagagctcttaaggaaaaaaaaaaacccactttctctcaagcatgtatttaggggttgttctcaattgtgctgctgattacctgtcttatgtaactacttgagaccatctgcaagagacatgatttagtgtgtctgtaattcaatcttcgctgtgtgtggtagaagcagtagtcacttttgtaagccagtctcttcatgcctaaaagacactaccagtcacctttgattcgcgacttttaatttatgattatacttagcctcctcctcctttttttttttttcccaagttgacttgactttgcttttttccccccaagtagaactaatgctagcttccagcttgaaagtaaaactccagtgtggagtgaattttgtgtctaattataaacctgtaaccaaaactcagacatctggtactggtctttgcattgagattggtccctgtaaaaccccctttaaaagcatattgcatttagtacagagctcttttttgaaatgaaggctggagatgtgcatttttcacggtgttaactggttgtatcttattagcaaggagattggggttttgagtgtttgcgtgggtggtttcaatttgccagggaacagtggcaggctgctagcaaggcagtgagaagctcttggcagccaaatgggtgcattcagggctgatttatagagacccttggcttctccttctcctactccctgtctttctggcattttgtagcttgttagattttctgccagaggggtgggtcagagcagtggaggggagacatcgcccatgtgcttctgctactggtccttgggctgggtggttggtagaggagatgttgacactatgagctaagggttggcttttgtaattacctgaatctgaaaggaatgcctaaggttaccttggggtttctcttctggtgagatagggttcctggtttgagtaagttaatgtcctggatatttcttgtggcagggggtggtcaaagagcctgattgctgacccagtctcaggcctgtggtcgatgacctctcggtagtttcaaagggggctggagggggatatttgacttgttttttcgaaatgtagccttctaaccctcaagtctttagaagctgggtggactcttagtggtcctgcagcgtatcctaaaagactacctttgaaacaggattcttgtatggccaggatcctgtctgggaaccagaaaccctacaccctccccctccagggaatgctgagttccagttttgagcagaggtgaggcagaatccactgtagccttccgccctggtatttggggggatgaccagcccaggcgttgggtgttagtctgcatgagtttgtgagaggaaatagctgggtgtcctggcagtgcccttgaagttggttaggaccttcctgtaaactcttgcccctacttctaactactctataaatatatacatatatttatatataaagtgattagttgaactggcatcctgctttagcctgagacttgccataagaaactgctgagtacttggcaaaccctttcatagttttgttctccatctgtttggggtaggtgttgagcgaggcaaatggatctcgatatttcagatgggcttttgatgcactgttgccaaggaaggctttttctgattttttgacaaatgaatttttgcacactttcattggtgtctttcggcaacttacacacattgaaaatgagctattgtacatatttttatattctctttataaatgcatgtctgattgtacttgtaacaatattgtaatgaacggctgtgcagtaggcccagcgctgctgtgtctcgtcagaggaatagcttaccacgaacccctcagcatactgggaatctcttcctgaacaacgaatgtaaatttggtcaagtctactcttccgttcattcaattattttaagcatttgaattatttattgtatatcctaaatatatttctcctttggcagtgactagatttccactaatgtgtcttaatctatccctccagctggcagttactgtttttttaatcccctgaagttgtcctgtaggagacagaaattctttgctgtctgtatcccttggagtaagaaggtagtggcatgggtggagtgtgtgttctttctccaaatctattatgatgtttattaaacacttctgtagcaaagatggtggtagttcttttgttactgaagttgcccttcaccatggctatttgaaaaggagatgtacttggacgtttctgtaaatcttgagataaactgtttggagatttaaccacctctctgatgggggaccaactctatggaaattgtaaatacgttttatttataaacctggcactgtattcaataaacatttctgcagcctttcatctctaactgcgaaaaaaaaaaaaaa

SEQ ID NO: 480 - DNA, 1128 bp, HOMO SAPIENS
gcgtgggcagggggcgggcccgggagttggaacagagggcacagacggcccctcctcggaggggagggaccggagccggggcctttttctttaagactcgcagcactggatcccagaacttagtctgcgcggcggcattgacactagctgggctcctcggggcgcgccccaggtggtccgaagcccggtccgccctccacgcaggtgccccgcgctccccgctcagccatgtcgtcctgcagccgcgtggcgctggtgaccggggccaacaggggcatcggcttggccatcgcgcgcgaactgtgccgacagttctctggggatgtggtgctcaccgcgcgggacgtggcgcggggccaggcggccgtgcagcagctgcaggcggagggcctgagcccgcgcttccaccaactggacatcgacgacttgcagagcatccgcgccctgcgcgacttcctgcgcaaggagtacggggggctcaacgtactggtcaacaacgcggccgtcgccttcaagagtgatgatccaatgccctttgacattaaagctgagatgacactgaagacaaatttttttgccactagaaacatgtgcaacgagttactgccgataatgaaacctcatgggagagtggtgaatatcagtagtttgcagtgtttaagggcttttgaaaactgcagtgaagatctgcaggaaaggttccacagtgagacactcacagaaggagacctggtggatctcatgaaaaagtttgtggaggacacaaaaaatgaggtgcatgagagggaaggctggcccaactcaccttatggggtgtccaagttgggggtcacggtcttatcgaggatcctggccaggcgtctggatgagaagaggaaagctgacaggattctggtgaatgcgtgctgcccaggaccagtgaagacagacatggatgggaaagacagcatcaggactgtggaggagggggctgagacccctgtctacttggccctcttgcctccagatgccactgagccacaaggccagttggtccatgacaaagttgtgcaaaactggtaaacgtctgcttcggagcttgctgcttaataaatgttggtggaatgaatgaaaaaaaaaaaaaaaaaa

SEQ ID NO: 481 - DNA, 3695 bp, HOMO SAPIENS
cttccggcttccccgccccgccccgtccccgggcgtctccattttggtctcaggtgtggactcggcaagaaccagcgcaagagggaagcagagttatagctaccccggccgcggagccggctcactgcactacccccgcccccttctttcctccagacgccgaagtcgcgggcgctcatggcgggcctggaggtactgttcgcatcggcagcgccggccatcacctgcaggcaggacgcgctcgtctgcttcttgcattgggaagtggtgacacacggttacttcggcttgggtgtcggtgaccagccgggtcccaatgataagaagtcagaactgctgccagctgggtggaacaacaataaagacctgtatgtcctccggtatgagtataaggatgggtccagaaagctccttgtgaaagccatcaccgtggagagcagcatgatcctcaatgtgctggaatatggctcacagcaagtggcagacttgaccctgaacttggatgattatatcgatgcagaacacctgggtgacttccacaggacctacaagaacagtgaggagcttcggtctcgtattgtgtctggaatcatcacacctatccatgagcagtgggaaaaggctaatgtaagcagtccccaccgggagttcccccctgctaccgccagagaggtggacccactccggattcctccacaccacccacacaccagtcggcagcctccctggtgtgatcccctgggcccgtttgttgtcgggggagaagacttagacccttttgggcctcggagaggtggcatgattgtggatcccctgagatctggcttcccaagagcacttattgacccttcctcaggcctcccgaaccgacttcctccaggcgctgtgcccccaggagctcgctttgacccctttggacccattgggaccagcccacccggacctaacccagaccatctccccccgccgggctacgatgacatgtacctgtgaaggcctcaagaatgtaacatcccaggcttccctccattctcctggagctgccaccgctgtccccatcagcaaccatgttcttgcaggctgggggcaagggattctgctcatgtgtttgcagaccggctgggatagcctccccaccccttatcagagccaagacacctgctgcagctctccacctagctgcagatagctcccaaagagaaatcagtgtgtctctttcaccatcagctcctcccctttcaccaccagctcctctccacttcccaagggagactccggcaaccttcagcaacatatatcctcgaccagatgcagtgctataagaacagaacgcattttggatgttattattaagaaccaaatgtcaatacagaattcatgttgccggtttcccacttttctttttacattaatgcatagctgcttccatttatgagactttagagtttgagtttctgtagggctgaatgactctttttcctgcccagggcccattcttgcttctcaggcaccttccgtttattaattgccattgctcctgacatcactaagatgggtccccttctggctgcatgaatggaaatgagtgactggaaatcccataggccacaagaatgactttcacaagggcaggaacattgtggaaagactgcatcattctgatgaggcaaaatcctccagctattcctgtctgggccagttttgtaggtccatctgtgcatgggcagcagtagtcaaaaagccaaggaaaaaacagagcagacctgaaggctaatcttatttttgccactaacttagtgaatgaccctaagcaagttccttctcctcttagggccttgtgccaagcctatgaaattggaggtggctttcctgctctaaagcattttgatgtctcattctgtgtttggtaacccctataaactggggcagaggaaaagaatgatggttcaaggccatacttcccttgaaccttgtgtggttcttgcctaactctgtggtttttggaccccatggggcccagacagagcacaggagcatgggctgcctctgagtgtggtgttgaacttcgggaggagcagggagccctgcaccttgtgtcctggcccacctgacctttggtgttctccggatccttttcagcccgaggcctgacagacgcgggcagtgatgagccctgttctggagtggaaagagcacgatagagcaccaggctaagaggcacgagatcaaggcggtagtcacttccgctctgcagctagcatttcaaccatatgtggatcctttcatttctcagctccctggattccttcccctaaattaggacctattatttacctgtaggtaagcaagctactgtagctcttctgaggtatctgccaggctgttttctgtagcctcagattgcctatctgcttagcctgagaacaggtagatgaaaactaaactgatgcctaggcccagggtcagtctcagatggaagctgggcctgggtggggaggctagcatgcgtggctccctgggtatttctgtcagtccccatggcaagcagtgatttagtaaaacaccccagagtcagggaagccaaccaccttgaaacctttagaacatctctgctttggagaaagacccagagatcaggcagaggtgcagattcaatcattactcataacctttgagagatggcaaatgggaggagtgttagtctttgttttggaattggaccattcttgcaaccaaaaggacttagagcagtttgctcataaagacatcctttattataaaaggaagtatttaaaggatgatagagaccatcagatagaagcagggaaggtagataacttttaggaccttgatgtgaggaaaagataaaatttaaacaataaatttgccacttagattttctagcagcaaagtccgaaaagatagttatatacaaaattctgttttctgaaaacaaaattgtgattcaccttcagaattggccattttttttgtgagtttccttgcatcaaggacactgagaaacacagtcattgtcttaggtgttctatgggaggaagtgaatagagcctttaggaacttcctggtcaagcttatggtgcttattttgatctgggccacttccctccttccagtcatgagtaatcatcaaggagcaagttggagtgtttcaggtgtatattttgtagaacccaaaagattggagccttaacaataaacatcagcactaagtgacctgttcctccttttttaaatagcagctttattgagatataatttacatacccataatttacatacctgtttaaagtatacaattcagtggatttagtatgttcacagtgttgcacatccaccaccatttctaattcctgaacattttcaccacctcaaaaagaaaccacacacccattggcatgactccccattcccttgctcccagccccaggcaaccactaacatctgtctctaaagattttttttttttttctggacagttctcataagtggaatcactcagtattatggccttttgtgtctggcttctttcatttcatgtgatgttttcaagattcattcatgctgtagcatgtatccatggtatggatatatcacattttgcttatccttttatcagttgatggacagttgggttgtttctacaaaaaggctattatgagtaatgcagccaagaa

SEQ ID NO: 482 - DNA, 5100 bp, HOMO SAPIENS
acgcacagcccccctgggggccgggggcggggccaggctataaaccgccggttaggggccgccatcccctcagagcgtcgggatatcgggtggcggctcgggacggaggacgcgctagtgttcttctgtgtggcagttcagaatgatggatcaagctagatcagcattctctaacttgtttggtggagaaccattgtcatatacccggttcagcctggctcggcaagtagatggcgataacagtcatgtggagatgaaacttgctgtagatgaagaagaaaatgctgacaataacacaaaggccaatgtcacaaaaccaaaaaggtgtagtggaagtatctgctatgggactattgctgtgatcgtctttttcttgattggatttatgattggctacttgggctattgtaaaggggtagaaccaaaaactgagtgtgagagactggcaggaaccgagtctccagtgagggaggagccaggagaggacttccctgcagcacgtcgcttatattgggatgacctgaagagaaagttgtcggagaaactggacagcacagacttcaccggcaccatcaagctgctgaatgaaaattcatatgtccctcgtgaggctggatctcaaaaagatgaaaatcttgcgttgtatgttgaaaatcaatttcgtgaatttaaactcagcaaagtctggcgtgatcaacattttgttaagattcaggtcaaagacagcgctcaaaactcggtgatcatagttgataagaacggtagacttgtttacctggtggagaatcctgggggttatgtggcgtatagtaaggctgcaacagttactggtaaactggtccatgctaattttggtactaaaaaagattttgaggatttatacactcctgtgaatggatctatagtgattgtcagagcagggaaaatcacctttgcagaaaaggttgcaaatgctgaaagcttaaatgcaattggtgtgttgatatacatggaccagactaaatttcccattgttaacgcagaactttcattctttggacatgctcatctggggacaggtgacccttacacacctggattcccttccttcaatcacactcagtttccaccatctcggtcatcaggattgcctaatatacctgtccagacaatctccagagctgctgcagaaaagctgtttgggaatatggaaggagactgtccctctgactggaaaacagactctacatgtaggatggtaacctcagaaagcaagaatgtgaagctcactgtgagcaatgtgctgaaagagataaaaattcttaacatctttggagttattaaaggctttgtagaaccagatcactatgttgtagttggggcccagagagatgcatggggccctggagctgcaaaatccggtgtaggcacagctctcctattgaaacttgcccagatgttctcagatatggtcttaaaagatgggtttcagcccagcagaagcattatctttgccagttggagtgctggagactttggatcggttggtgccactgaatggctagagggatacctttcgtccctgcatttaaaggctttcacttatattaatctggataaagcggttcttggtaccagcaacttcaaggtttctgccagcccactgttgtatacgcttattgagaaaacaatgcaaaatgtgaagcatccggttactgggcaatttctatatcaggacagcaactgggccagcaaagttgagaaactcactttagacaatgctgctttccctttccttgcatattctggaatcccagcagtttctttctgtttttgcgaggacacagattatccttatttgggtaccaccatggacacctataaggaactgattgagaggattcctgagttgaacaaagtggcacgagcagctgcagaggtcgctggtcagttcgtgattaaactaacccatgatgttgaattgaacctggactatgagaggtacaacagccaactgctttcatttgtgagggatctgaaccaatacagagcagacataaaggaaatgggcctgagtttacagtggctgtattctgctcgtggagacttcttccgtgctacttccagactaacaacagatttcgggaatgctgagaaaacagacagatttgtcatgaagaaactcaatgatcgtgtcatgagagtggagtatcacttcctctctccctacgtatctccaaaagagtctcctttccgacatgtcttctggggctccggctctcacacgctgccagctttactggagaacttgaaactgcgtaaacaaaataacggtgcttttaatgaaacgctgttcagaaaccagttggctctagctacttggactattcagggagctgcaaatgccctctctggtgacgtttgggacattgacaatgagttttaaatgtgatacccatagcttccatgagaacagcagggtagtctggtttctagacttgtgctgatcgtgctaaattttcagtagggctacaaaacctgatgttaaaattccatcccatcatcttggtactactagatgtctttaggcagcagcttttaatacagggtagataacctgtacttcaagttaaagtgaataaccacttaaaaaatgtccatgatggaatattcccctatctctagaattttaagtgctttgtaatgggaactgcctctttcctgttgttgttaatgaaaatgtcagaaaccagttatgtgaatgatctctctgaatcctaagggctggtctctgctgaaggttgtaagtggtcgcttactttgagtgatcctccaacttcatttgatgctaaataggagataccaggttgaaagaccttctccaaatgagatctaagcctttccataaggaatgtagctggtttcctcattcctgaaagaaacagttaactttcagaagagatgggcttgttttcttgccaatgaggtctgaaatggaggtccttctgctggataaaatgaggttcaactgttgattgcaggaataaggccttaatatgttaacctcagtgtcatttatgaaaagaggggaccagaagccaaagacttagtatattttcttttcctctgtcccttcccccataagcctccatttagttctttgttatttttgtttcttccaaagcacattgaaagagaaccagtttcaggtgtttagttgcagactcagtttgtcagactttaaagaataatatgctgccaaattttggccaaagtgttaatcttaggggagagctttctgtccttttggcactgagatatttattgtttatttatcagtgacagagttcactataaatggtgtttttttaatagaatataattatcggaagcagtgccttccataattatgacagttatactgtcggttttttttaaataaaagcagcatctgctaataaaacccaacagatactggaagttttgcatttatggtcaacacttaagggttttagaaaacagccgtcagccaaatgtaattgaataaagttgaagctaagatttagagatgaattaaatttaattaggggttgctaagaagcgagcactgaccagataagaatgctggttttcctaaatgcagtgaattgtgaccaagttataaatcaatgtcacttaaaggctgtggtagtactcctgcaaaattttatagctcagtttatccaaggtgtaactctaattcccattttgcaaaatttccagtacctttgtcacaatcctaacacattatcgggagcagtgtcttccataatgtataaagaacaaggtagtttttacctaccacagtgtctgtatcggagacagtgatctccatatgttacactaagggtgtaagtaattatcgggaacagtgtttcccataattttcttcatgcaatgacatcttcaaagcttgaagatcgttagtatctaacatgtatcccaactcctataattccctatcttttagttttagttgcagaaacattttgtggtcattaagcattgggtgggtaaattcaaccactgtaaaatgaaattactacaaaatttgaaatttagcttgggtttttgttacctttatggtttctccaggtcctctacttaatgagatagtagcatacatttataatgtttgctattgacaagtcattttaactttatcacattatttgcatgttacctcctataaacttagtgcggacaagttttaatccagaattgaccttttgacttaaagcagagggactttgtatagaaggtttgggggctgtggggaaggagagtcccctgaaggtctgacacgtctgcctacccattcgtggtgatcaattaaatgtaggtatgaataagttcgaagctccgtgagtgaaccatcattataaacgtgatgatcagctgtttgtcatagggcagttggaaacggcctcctagggaaaagttcatagggtctcttcaggttcttagtgtcacttacctagatttacagcctcacttgaatgtgtcactactcacagtctctttaatcttcagttttatctttaatctcctcttttatcttggactgacatttagcgtagctaagtgaaaaggtcatagctgagattcctggttcgggtgttacgcacacgtacttaaatgaaagcatgtggcatgttcatcgtataacacaatatgaatacagggcatgcattttgcagcagtgagtctcttcagaaaacccttttctacagttagggttgagttacttcctatcaagccagtacgtgctaacaggctcaatattcctgaatgaaatatcagactagtgacaagctcctggtcttgagatgtcttctcgttaaggagatgggccttttggaggtaaaggataaaatgaatgagttctgtcatgattcactattctagaacttgcatgacctttactgtgttagctctttgaatgttcttgaaattttagactttctttgtaaacaaatgatatgtccttatcattgtataaaagctgttatgtgcaacagtgtggagattccttgtctgatttaataaaatacttaaacactgaaaaaaaaaaaaaaaaaa

SEQ ID NO: 483 - DNA, 462 bp, HOMO SAPIENS
ggtcggcggagttagatggcagcaaaggtgggccggcttggtgtgataaagttccaactgggtccttccgcgagccctgggtccataagatgtcatcggcgagcgctggacttgaccgtcaacttgggattgttaaggtaaatggtgtctccttctgtcgccaaggcggtggcatggtctcggctggctgcaatctccacctccttgcttccagcgattctcctgcctcagccccccgagtagcagaaattacaggagtttcatggcagggcgcttggctggcttgtttaaattcattctgaataagaactgaggatgtcagcttctggcctcatggactctggactgaagagtccccttgtctatctatcatgagactgtacacgtaagaagcaaaaaactagtaacatttaaaataaataattttgttgtacagaaatacacggatgcacctaaaacaca

SEQ ID NO: 484 - DNA, 3208 bp, HOMO SAPIENS
aaacaccaaggtaggttgcctagtgatcctgaggaagctgatgtgttattccttctctgcatcgaaggatcaggaagtttgtgctctctgcgtggctaagtttttcacctactaggacgggggtggggtggggagaacaggtgtccttctaaaatacagcacaagctacagcctgcgtccagccataacccaggagtaacatcagaaacaggtgagaatgaccactttaactcaccgggcccgtcgcactgaaataagcaagaactctgaaaagaagatggaaagtgaggaagacagtaattgggagaaaagtccagacaatgaagattctggagactctaaggatatccgccttactcttatggaagaagtattgcttctgggactaaaagataaagaggggtacacatctttctggaatgactgcatatcatcaggcctgcgagggggcatcctgatagagctggccatgcggggtcgaatctatctggaacccccgaccatgcgtaagaagcgactactagacagaaaggtactgctaaagtcagacagcccaacaggtgatgttttactggatgaaactctgaaacacatcaaagcaactgaacccacagaaactgtccaaacatggatagagctactcactggtgagacctggaaccccttcaaattacagtaccagctgagaaatgtacgagagcgcatcgcaaagaacctagtagagaaaggtattctaaccactgagaagcagaatttcctgctatttgacatgactactcatccagtgaccaatacaacagagaaacagcgactagtgaaaaaacttcaagatagtgtactagagcggtgggtaaatgaccctcagcgtatggacaagcgaacactagcactcctggtgctagcccactcctctgatgtgctagagaatgtcttctcctctctgacagatgacaagtatgatgtggcaatgaatcgagccaaggacttagtagaactggaccctgaagtggaagggacaaagcctagtgccacagaaatgatctgggctgtgctggcagccttcaataaatcttaaagccggcaggtggatttctccttttcccctgctggctggtgactgtcagagaccccatcactgagttttgtgtgatgagatgttttcatcatttttgtttccttttcttgaatcagacttgtgatttggggagagcaacttcagggcttctccatagaccttgaccattataagcagaccttatttctccctacacttccactccataggtaaataaactgggtgaagccacacacacccaatgaacattttctcccatttggtggtttagtttcacccagtgtgcttttggataagcagaaatatctaaatgggattttgagttctccagctatagaatgtgaatgagataaaaagtgaactatctattatatttttctgagtttgttttctatcataaatacatgttttcacagcctttgtctctcagactctgctaaataatgtagcttattgaaataactgtcgctgaataaggagcaatgagaaacaaaactaatttttggagcagatggtctctggaattgcatatcctgctagtgattttctcatctttccttttctaacctaatgagaatgtcccagattcaattacctggatgtcaaagtcctagagccagaaatatattctctcatccctcttagcattctcttgctccctcattcactagggcaaatgtctaaatgaagaaaagtctctctcaacacctcgttcatgcaatcagcattagaatttgtaaggaaggaaggggggtggcatgaaaatttccattcttggggtatatgactgtcctgtttcccccaggccactttttttttttttttcttttgagacagggtcttgctcttgcccaggcaggagtacagtagtgcaatcacagctgactgcagccttgacctccagggctcaaggatcctcctgcctcagtctcccaactaagtgggactacaggcacgtgccaccatactcagcttttttttgtttgttttagacaagagtctcgctttgttgcccaggctggtcttgaattcctgggctcaagcaattcttccacctcagcctcccaaagtgctgagattactggcttgagccactgcacccacccctccagactactttaaatgtctctgctctgactgaattgaaggaattgtaagtttcagttgctgaatatatcagtatatctgaactccggatctttttatttcctatttttggcttcctacataaattaataaagtctgtctatatttaaggtttctgggagtagttttgtctatatttaatccatagatgtgctcctagtcatcagtcttatttcagtaaaaccatctttctggccaaatctctaacacgttttttacttcagtagtgagggcaatgagaagctttattaagaaagatcctatttaaagggctaatttggtattgaaagcatgctgatataaagtccagtatttgaggatataaagaggatgtgcactgagctgtgctgatgttcagcatttattatactttaatgggatagtgcttcttgaccattatagaacaacaaactgtcaaagggttaatacagatgacccagacctgacattaaatcctcttgattagaaataattaaatgaattatttattcatttctctcctctgccaaatctacttagccccacaaaaatgccccagctcagttaacatttttttgtttttcactttaggtatctcttaggcaaatagagatataaattgtaataggaaacagtctctaaatgtgaggctgaatacagcttcagtctggctctctaataggacaaaagccagtccatgtgttgtctctaactgatttagctttttcttttctttgaacaattcggcatgaattgaaaccaggttttcctgtggaaagttatagcttgattgggagatagaagttgaattgagttctttcttgcaactcttagtgtttatttttatatctcagtaagacgaggataccttcagtttgaatctgcataatgttcactgccaaactccttctcatttaatgcttatggccttcacatttctgtataataaagatcaattatcagctctctggaaaaaaaaaaaaaaaaaaaaaaaaaaaaaaaaaaaaa

SEQ ID NO: 485 - DNA, 2064 bp, HOMO SAPIENS
cgccgcggcgcgcggggtggggcggaggtcgcgccgagggcggcgggctgccgcgcaagggtggcgcgcgcgcgttttccttgttcctggtcaacaaagaaatgtggagtgtcttggctgaatcctcatacagacaagatcattatggtgctgttaggtaggacttgtatccagatgtaaggttgaaaaagtgatataataaaggaaccaaggagaaaattcagaaggaaagaaaaaattgcctctgcaggtgtgcgagcaggattgcttctgcaacaaaagcctccacccagccacatcttgggaaaagaatggccacttcttggggcacagtctttttcatgctggtggtatcctgtgtttgcagcgctgtctcccacaggaaccagcagacttggtttgagggtatcttcctgtcttccatgtgccccatcaatgtcagcgccagcaccttgtatggaattatgtttgatgcagggagcactggaactcgaattcatgtttacacctttgtgcagaaaatgccaggacagcttccaattctagaaggggaagtttttgattctgtgaagccaggactttctgcttttgtagatcaacctaagcagggtgctgagaccgttcaagggctcttagaggtggccaaagactcaatcccccgaagtcactggaaaaagaccccagtggtcctaaaggcaacagcaggactacgcttactgccagaacacaaagccaaggctctgctctttgaggtaaaggagatcttcaggaagtcacctttcctggtaccaaagggcagtgttagcatcatggatggatccgacgaaggcatattagcttgggttactgtgaattttctgacaggtcagctgcatggccacagacaggagactgtggggaccttggacctagggggagcctccacccaaatcacgttcctgccccagtttgagaaaactctggaacaaactcctaggggctacctcacttcctttgagatgtttaacagcacttataagctctatacacatagttacctgggatttggattgaaagctgcaagactagcaaccctgggagccctggagacagaagggactgatgggcacactttccggagtgcctgtttaccgagatggttggaagcagagtggatctttgggggtgtgaaataccagtatggtggcaaccaagaaggggaggtgggctttgagccctgctatgccgaagtgctgagggtggtacgaggaaaacttcaccagccagaggaggtccagagaggttccttctatgctttctcttactattatgaccgagctgttgacacagacatgattgattatgaaaaggggggtattttaaaagttgaagattttgaaagaaaagccagggaagtgtgtgataacttggaaaacttcacctcaggcagtcctttcctgtgcatggatctcagctacatcacagccctgttaaaggatggctttggctttgcagacagcacagtcttacagctcacaaagaaagtgaacaacatagagacgggctgggccttgggggccacctttcacctgttgcagtctctgggcatctcccattgaggccacgtacttccttggagacctgcatttgccaacacctttttaaggggaggagagagcacttagtttctgaactagtctggggacatcctggacttgagcctagagatttaggtttaattaattttacacatctaatgtgaactgctgcctaaccactcaagagtacacagctggcaccagagcatcacagagagccctgtgagccaaaaagtatagttttggaacttaaccttggagtgagagcccagggacaggtccctggaaaccaaagaaaaatcgcatttcaaccctttgagtgcctcattccactgaatatttaaattttcctcttaaatggtaaactgacttattgcaatcccaagacccatcaatatcagtatttttttcctccctatacagtgccctgcccacccttatctgcacccacctcccctgaaaaagagagaaaaaaaaaaaaaaaaaa

SEQ ID NO: 486 - DNA, 1518 bp, HOMO SAPIENS
ggtggcgctgttacatagcccgtagtcagaggcctttcagcccaggggccggcgcacgaaacctgtttggaggttatggatgataaacccaatcctgaagccctaagtgacagttcagagcgtcttttctcctttggcgtcatcgcagatgttcaatttgcagacttagaagatggctttaatttccaaggaaccaggcggcgatactacagacatagtcttcttcacttacagggtgccattgaagactggaataatgaaagcagcatgccctgttgtgtccttcagcttggagatatcatcgatggatataatgcacagtataatgcatccaaaaagtccctagaacttgttatggacatgttcaagaggcttaaagttccagttcatcatacatggggaaaccatgaattctataacttcagtagagagtatttaacacactctaaacttaacactaagtttctagaagatcagattgtacatcatcctgagaccatgccttcagaagattattatgcttatcattttgtaccattccctaaattccggttcattttacttgatgcatatgacttgagtgtcttgggcgtggatcagtcttctccaaaatacgagcagtgtatgaagatattgagggagcacaatccaaatacggaactgaatagtcctcaaggactttctgagccccagtttgtccagtttaatggaggattcagccaagaacagctaaactggttgaatgaagtgctaacattctctgacacaaaccaagaaaaggtggtgattgtgagccatcttcccatttacccggacgcctctgacaatgtgtgcctggcctggaactacagagatgccctggcagtcatttggtctcatgagtgtgtggtgtgtttctttgctggtcacacccatgatggtggctactctgaggatccttttggtgtataccacgtcaacctagaaggagttattgaaacagctccagacagccaagcctttggcacagttcatgtctatcctgacaaaatgatgttgaaagggagaggcagagttccagatagaattatgaattacaagaaagaaagagccttccattgttagtctaatttattttaacttgatagaaaatgagctttgtgtttgtccctcctaaacaaaaaaataaaaatcctctgtctcattgtttagtattcagcttgcataacaaaatgtatttatagtttcagtgtgtgatggttgataaaatactcagaaatgttattttggatcatgtatccattgtaagttagaaacaaaccagggaggaaactgaggcaggggtgtatagtcctcataaggggcatatagtcctcatgagggatcttatttggccctacctgattttttttaactttttacaaggagattgtattcacatgtgttaactatgtaacttcaagttcagcatataagctcaggtaagctttttctattcaccctgctgtgtaaatgagctttggacaatttctgctcaga

SEQ ID NO: 487 - DNA, 3509 bp, HOMO SAPIENS
ggcgccctgaaacgttcggcgagccgactgcggctgcgcggggtattcgaatcggcggcggcttctagtttgcggttcaggtttggccgctgccggccagcgtcctctggccatggacaccccggaaaatgtccttcagatgcttgaagcccacatgcagagctacaagggcaatgaccctcttggtgaatgggaaagatacatacagtgggtagaagagaattttcctgagaataaagaatacttgataactttactagaacatttaatgaaggaatttttagataagaagaaataccacaatgacccaagattcatcagttattgtttaaaatttgctgagtacaacagtgacctccatcaattttttgagtttctgtacaaccatgggattggaaccctgtcatcccctctgtacattgcctgggcggggcatctggaagcccaaggagagctgcagcatgccagtgctgtccttcagagaggaattcaaaaccaggctgaacccagagagttcctgcaacaacaatacaggttatttcagacacgcctcactgaaacccatttgccagctcaagctagaacctcagaacctctgcataatgttcaggttttaaatcaaatgataacatcaaaatcaaatccaggaaataacatggcctgcatttctaagaatcagggttcagagctttctggagtgatatcttcagcttgtgataaagagtcaaatatggaacgaagagtgatcacgatttctaaatcagaatattctgtgcactcatctttggcatccaaagttgatgttgagcaggttgttatgtattgcaaggagaagcttattcgtggggaatcagaattttcctttgaagaattgagagcccagaaatacaatcaacggagaaagcatgagcaatgggtaaatgaagacagacattatatgaaaaggaaagaagcaaatgcttttgaagaacagctattaaaacagaaaatggatgaacttcataagaagttgcatcaggtggtggagacatcccatgaggatctgcccgcttcccaggaaaggtccgaggttaatccagcacgtatggggccaagtgtaggctcccagcaggaactgagagcgccatgtcttccagtaacctatcagcagacaccagtgaacatggaaaagaacccaagagaggcacctcctgttgttcctcctttggcaaatgctatttctgcagctttggtgtccccagccaccagccagagcattgctcctcctgttcctttgaaagcccagacagtaacagactccatgtttgcagtggccagcaaagatgctggatgtgtgaataagagtactcatgaattcaagccacagagtggagcagagatcaaagaagggtgtgaaacacataaggttgccaacacaagttcttttcacacaactccaaacacatcactgggaatggttcaggcaacgccatccaaagtgcagccatcacccaccgtgcacacaaaagaagcattaggtttcatcatgaatatgtttcaggctcctacacttcctgatatttctgatgacaaagatgaatggcaatctctagatcaaaatgaagatgcatttgaagcccagtttcaaaaaaatgtaaggtcatctggggcttggggagtcaataagatcatctcttctttgtcatctgcttttcatgtgtttgaagatggaaacaaagaaaattatggattaccacagcctaaaaataaacccacaggagccaggacctttggagaacgctctgtcagcagacttccttcaaaaccaaaggaggaagtgcctcatgctgaagagtttttggatgactcaactgtatggggtattcgctgcaacaaaaccctggcacccagtcctaagagcccaggagacttcacatctgctgcacaacttgcgtctacaccattccacaagcttccagtggagtcagtgcacattttagaagataaagaaaatgtggtagcaaaacagtgtacccaggcgactttggattcttgtgaggaaaacatggtggtgccttcaagggatggaaaattcagtccaattcaagagaaaagcccaaaacaggccttgtcgtctcacatgtattcagcatccttacttcgtctgagccagcctgctgcaggtggggtacttacctgtgaggcagagttgggcgttgaggcttgcagactcacagacactgacgctgccattgcagaagatccaccagatgctattgctgggctccaagcagaatggatgcagatgagttcacttgggactgttgatgctccaaacttcattgttgggaacccatgggatgataagctgattttcaaacttttatctgggctttctaaaccagtgagttcctatccaaatacttttgaatggcaatgtaaacttccagccatcaagcccaagactgaatttcaattgggttctaagctggtctatgtccatcaccttcttggagaaggagcctttgcccaggtgtacgaagctacccagggagatctgaatgatgctaaaaataaacagaaatttgttttaaaggtccaaaagcctgccaacccctgggaattctacattgggacccagttgatggaaagactaaagccatctatgcagcacatgtttatgaagttctattctgcccacttattccagaatggcagtgtattagtaggagagctctacagctatggaacattattaaatgccattaacctctataaaaatacccctgaaaaagtgatgcctcaaggtcttgtcatctcttttgctatgagaatgctttacatgattgagcaagtgcatgactgtgaaatcattcatggagacattaaaccagacaatttcatacttggaaacggatttttggaacaggatgatgaagatgatttatctgctggcttggcactgattgacctgggtcagagtatagatatgaaactttttccaaaaggaactatattcacagcaaagtgtgaaacatctggttttcagtgtgttgagatgctcagcaacaaaccatggaactaccagatcgattactttggggttgctgcaacagtatattgcatgctctttggcacttacatgaaagtgaaaaatgaaggaggagagtgtaagcctgaaggtctttttagaaggcttcctcatttggatatgtggaatgaattttttcatgttatgttgaatattccagattgtcatcatcttccatctttggatttgttaaggcaaaagctgaagaaagtatttcaacaacactatactaacaagattagggccctacgtaataggctaattgtactgctcttagaatgtaagcgttcacgaaaataaaatttggatatagacagtccttaaaaatcacactgtaaatatgaatctgctcactttaaacctgtttttttttcatttattgtttatgtaaatgtttgttaaaaataaatcccatggaatatttccatgtaaaaaaaaa

SEQ ID NO: 488 - DNA, 5450 bp, HOMO SAPIENS
aaaaaggcagcctatgggctgagcgggggatggggagagaagagggatagggccagcaaggcagggatcgaacgagtgtctggcagccgggagcccagcgaagagagcgagcaagcttaggaaaacgagcgaagtaaagggagtaggggagactgagactgaccggtagccaggcaggcggacggacgcacgcccggacagactgagcaggcgccggagaaccactcacaggttccccccgcctttccctttgaaagctaggattttgcctttcccgtggcgcccgagagagaatgctggactctgccgacttcagcgcaagctaagatttctcagctagggacaaacgatcagcccaatcctgagaaggggggaaccaagcaccccgtccccatccccctcccctcccccgactaaactcgggcgccaaacccagcccttctctaaccaccctacttcctcctctcctttctagcatggtggctgtatggacagtctgacagaacagagactgacatctcccaatctgccggccccccacctggaacactacagtgttctgcattgcaccatgaccctggatgtgcaaactgtagtcgtttttgccgtgattgtagtcctcctgcttgtcaatgtcatactcatgtttttcctgggaacgcgctgaatggagtccagccacctgagctgtcgcgaactctcgctttgatttcatcccgagagccaccgagaaaaaaaaaaaatcacagacagagacagggaaagagagagaaagaacaagctttcttactcaggggggaaaacgttttgagcttcaacatggcctcgctgtgatatgtatgacgttgctgatcactggagattccatcgttagtgctgaggcagtatgggatcacgtcaccatggccaaccgggagttggcatttaaagctggcgacgtcatcaaagtcttggatgcttccaacaaggattggtggtggggccagatcgacgatgaggagggatggtttcctgccagctttgtgaggctctgggtgaaccaggaggatgaggtggaggaggggcccagcgatgtgcagaacggacacctggaccccaattcagactgcctctgtctggggcggccactacagaaccgggaccagatgcgggccaatgtcatcaatgagataatgagcactgagcgtcactacatcaagcacctcaaggatatttgtgagggctatctgaagcagtgccggaagagaagggacatgttcagtgacgagcaactgaaggtaatctttgggaacattgaagatatctacagatttcagatgggctttgtgagagacctggagaaacagtataacaatgatgacccccacctcagcgagataggaccctgcttcctagagcaccaagatggattctggatatactctgagtattgtaacaaccacctggatgcttgcatggagctctccaaactgatgaaggacagccgctaccagcacttctttgaggcctgtcgcctcttgcagcagatgattgacattgctatcgatggtttccttttgactccagtgcagaagatctgcaagtatcccttacagttggctgagctcctaaagtatactgcccaagaccacagtgactacaggtatgtggcagctgctttggctgtcatgagaaatgtgactcagcagatcaacgaacgcaagcgacgtttagagaatattgacaagattgctcagtggcaggcttctgtcctagactgggagggcgaggacatcctagacaggagctcggagctgatctacactggggagatggcctggatctaccagccctacggccgcaaccagcagcgggtcttcttcctgtttgaccaccagatggtcctctgcaagaaggacctaatccggagagacatcctgtactacaaaggccgcattgacatggataaatatgaggtagttgacattgaggatggcagagatgatgacttcaatgtcagcatgaagaatgcctttaagcttcacaacaaggagactgaggagatacatctgttctttgccaagaagctggaggaaaaaatacgctggctcagggctttcagagaagagaggaaaatggtacaggaagatgaaaaaattggctttgaaatttctgaaaaccagaagaggcaggctgcaatgactgtgagaaaagtccctaagcaaaaaggtgtcaactctgcccgctcagttcctccttcctacccaccaccgcaggacccgttaaaccacggccagtacctggtccccgacggcatcgctcagtcgcaggtctttgagttcaccgaacccaagcgcagccagtcaccattctggcaaaacttcagcaggttaacccccttcaaaaaatgatacctacagggaggcagataattttaaaataaagtaaataaaattatatttatagatggaccttttttcggagaagcactgttgaaatttatacacacacacacacacagagacccttgagtacacatacacacacacacacacagacacacacacacacacacacacacacacacacacagagagataaggaacaaaagtgttttctgttgttttggggaagtgaaatatgtggttggtaggaagaggtaccaatgacttccaaacatgtgattccgtcttaaaagttttccatttttaccctgtcccccttccctttgctttcagaagttgacatttctattcattgcttttcttgttaagataatctctttactcccctgtgagtgattcactgccttgtcattattacgatagatgtgtttgtattgttttttttctgatgatactgatgttgatgaatttttaattttatttgatgtggtagagttgggaggtttcagggttttttcccctcttttactttccattgaggaagggaatgagctcctttctcctctccttcagccaatcattatcaaatgttccttcagccctgcagttgccccaaataaccttttttcagcatcctctgtcctcagtcatgccagtctggacatgctctgttgtgccctgtgacaaaactgctcagtattcctattgcttttactgtgttttaggtactgtgaagggatcaaaaaaccaaacagaagcaagggagtatcagactatgatgatgctggagtggacttctgttcagggaacattttgcattcaggctgtttcttctatcactggggtttcccatgttgcagcacttctgggtcgttgcaattttgcatctaggagttagtttgatcgagttattctcttttttcaagtcacttttgttataggtctccccctaggcctgtctctcccttagcccaaaagatctgaactggaagcagaggttgagattctgcctcccaggagagggatttacctgccccctagtaccagataggtttagggcagtgatctctacagcaatcagttcagtgtcctggttgtccctgctcccatttacagatgtttgggcagcattgatagaagtatggaggggttcaagacagagcccacctgatcaagatcatcagctaccttcaaattattgacctggacagggtccaagtctgatagtaaccttttacaagaaagaacagggatgggaatggaaagagatagccttgatccacagtattgtacctgcattttctaccaccctaaaattgtgtgagacttctcccattgttaacagattgcatggacaatcttccctggcttctttctttccctctctctttcttctttctcctgccatcctagcacaggaggatttttggtattgatatagttaaagctgttctggcactcaaagaaggccgtgtttccaacatcctctcatcccaggacatttggggcaagtgagttaggggcccaggggcaattttccctctgaataacgtgtctgaggcagggatgctaccctcaggctcgcttttggccagctttttgcttgggaaaatctaacttctttcacaaggaggcaggcttcctatggatgttggagtacctgtttttcctccacacatagcccttttcatggatagaccttgaacaacaaaaagggtataagggaataaggatgaactctgctgtgaagagcaagccactgtagtgaggaatgtggagactgggagtctgtcctaaaccccatgggagaagacttcatcatgacaggacttcagcttaccaagcagcagccatagctgtgtggaggcttcagcatagctagcatgtttactgctctatgcctcctgatccagaccaggcattgcccagcctgggaatcttttctttgtgggaatcaaattacaagctatttaagtttatattccatcacaaccaagtcagacttgtattataagtcaaggatgagcctgatctggggagagggccggggctcgggactggccaccactgttcagcacatgacctaactacgtaagcctctttggcaagggtcctggtgcccagcacccaggctaaaatatcctgtctggcagagtgttttggtagctatgcaggcctcccttcagtgtacctctttttccaacttctcactcctccttactaggcttggccttgacatgcttcttcgagggttggcagcacaccgggaggggatgcttggacaagtttctgggcctacatttcttgactaggccctctcatttcctccctccttggggcttctgcccagggctccaggatcagggatattacttctcaacccgcacttctcctctactgaacccactggcatcacctgatgccactaatttgtgaacaacaagaaatcatttccccattggttggagtattccctcagcctatagcatcaaagcagaccagtggccaacagccccaaggggagcccaattaaatacctgggttcagtatcctaacctgttatgtcctgacagcaatggtaaccccagtaattctgtaatgttgtaatttccgcatggccctgagctcccttttcctcaactcagtgaggccaggatttgctctccaaaaggctttgctagtgtgttcaatgggacctgctgtggggagtcctaagacagacatctaattattctctctttttccccccctctctatgtgtatatttctaatggatctataagaacagcaacaagagagttctaacaattctagtgtgaagccaaatagtgatcttttagtgctttggggatggggtgggctggggtggatggatgggcaacagtgactttgattacccttgctgctctgcatttgccagtttattcttttgtttcttttatctgactgactctgtcaaacaagtgtcaaagttgtgtgttaaaaaatgtttaacaaaaaaaatgttgtaatgacacaaagccttatgaaaatatttatggagttcaataaaagaagtaaaaagac

SEQ ID NO: 489 - DNA, 438 bp, HOMO SAPIENS
atgcctgagccagccaagtctgctcccgccccgaagaagggctccaagaaggcagtgaccaaagcgcagaagaaagatggcaagaagcgcaagcgcagccgcaaggagagttactctgtgtacgtgtacaaggtgctgaaacaggtccatcccgacactggcatctcttccaaggccatgggcatcatgaattctttcgttaacgacatatttgagcgcatcgcgggcgaggcttcccgcctggcgcattacaacaagcgctcgaccatcacctccagggagatccagacggccgtgcgcctgctgcttcccggagagctggccaagcacgccgtgtcggagggcaccaaggccgtcaccaagtacaccagctccaagtaaacattccaagtaagcgtcttaacacctaaccccaaaggctcttttaagagccaccca

SEQ ID NO: 490 - DNA, 1926 bp, HOMO SAPIENS
ggcgggggcccggccgaggcaataagagcggcggcggcggcagcggcggcagcagctcccgcagctcctgctctggtccgcctcggcccggcggcggccatcagccccctcggcctcggctcgaggggcggggagctgcgcgcgcccctcggtccgaccgacaccctccccttcccgcccgtccgcgcgccccgcggcccgcggcccgcagtccgccccgcgcgctccttgccgaggagccgagcccgcgcccggcccgcccgcccggcgctgccccggccctcccggcccgcgtgaggccgcccgcgcccgccgccgccgcagcccggccgcgccccgccgccgccgccgccgccatgggctgcctcgggaacagtaagaccgaggaccagcgcaacgaggagaaggcgcagcgtgaggccaacaaaaagatcgagaagcagctgcagaaggacaagcaggtctaccgggccacgcaccgcctgctgctgctgggtgctggagaatctggtaaaagcaccattgtgaagcagatgaggatcctgcatgttaatgggtttaatggagagggcggcgaagaggacccgcaggctgcaaggagcaacagcgatggtgagaaggcaaccaaagtgcaggacatcaaaaacaacctgaaagaggcgattgaaaccattgtggccgccatgagcaacctggtgccccccgtggagctggccaaccccgagaaccagttcagagtggactacatcctgagtgtgatgaacgtgcctgactttgacttccctcccgaattctatgagcatgccaaggctctgtgggaggatgaaggagtgcgtgcctgctacgaacgctccaacgagtaccagctgattgactgtgcccagtacttcctggacaagatcgacgtgatcaagcaggctgactatgtgccgagcgatcaggacctgcttcgctgccgtgtcctgacttctggaatctttgagaccaagttccaggtggacaaagtcaacttccacatgtttgacgtgggtggccagcgcgatgaacgccgcaagtggatccagtgcttcaacgatgtgactgccatcatcttcgtggtggccagcagcagctacaacatggtcatccgggaggacaaccagaccaaccgcctgcaggaggctctgaacctcttcaagagcatctggaacaacagatggctgcgcaccatctctgtgatcctgttcctcaacaagcaagatctgctcgctgagaaagtccttgctgggaaatcgaagattgaggactactttccagaatttgctcgctacactactcctgaggatgctactcccgagcccggagaggacccacgcgtgacccgggccaagtacttcattcgagatgagtttctgaggatcagcactgccagtggagatgggcgtcactactgctaccctcatttcacctgcgctgtggacactgagaacatccgccgtgtgttcaacgactgccgtgacatcattcagcgcatgcaccttcgtcagtacgagctgctctaagaagggaacccccaaatttaattaaagccttaagcacaattaattaaaagtgaaacgtaattgtacaagcagttaatcacccaccatagggcatgattaacaaagcaacctttcccttcccccgagtgattttgcgaaacccccttttcccttcagcttgcttagatgttccaaatttagaaagcttaaggcggcctacagaaaaaggaaaaaaggccacaaaagttccctctcactttcagtaaaaataaataaaacagcagcagcaaacaaataaaatgaaataaaagaaacaaatgaaataaatattgtgttgtgcagcattaaaaaaaatcaaaataaaaattaaatgtgagcaaagaatgaaaaaaaaaaaaaaaaaaaa

SEQ ID NO: 491 - DNA, 6364 bp, HOMO SAPIENS
ctgggatagaagcggcaggagcagcgttggcaccggcgaaccatggctgggattttctatttcgccctattttcgtgtctcttcgggatttgcgacgctgtcacaggttccagggtataccccgcgaatgaagttaccttattggattccagatctgttcagggagaacttgggtggatagcaagccctctggaaggagggtgggaggaagtgagtatcatggatgaaaaaaatacaccaatccgaacctaccaagtgtgcaatgtgatggaacccagccagaataactggctacgaactgattggatcacccgagaaggggctcagagggtgtatattgagattaaattcaccttgagggactgcaatagtcttccgggcgtcatggggacttgcaaggagacgtttaacctgtactactatgaatcagacaacgacaaagagcgtttcatcagagagaaccagtttgtcaaaattgacaccattgctgctgatgagagcttcacccaagtggacattggtgacagaatcatgaagctgaacaccgagatccgggatgtagggccattaagcaaaaaggggttttacctggcttttcaggatgtgggggcctgcatcgccctggtatcagtccgtgtgttctataaaaagtgtccactcacagtccgcaatctggcccagtttcctgacaccatcacaggggctgatacgtcttccctggtggaagttcgaggctcctgtgtcaacaactcagaagagaaagatgtgccaaaaatgtactgtggggcagatggtgaatggctggtacccattggcaactgcctatgcaacgctgggcatgaggagcggagcggagaatgccaagcttgcaaaattggatattacaaggctctctccacggatgccacctgtgccaagtgcccaccccacagctactctgtctgggaaggagccacctcgtgcacctgtgaccgaggctttttcagagctgacaacgatgctgcctctatgccctgcacccgtccaccatctgctcccctgaacttgatttcaaatgtcaacgagacatctgtgaacttggaatggagtagccctcagaatacaggtggccgccaggacatttcctataatgtggtatgcaagaaatgtggagctggtgaccccagcaagtgccgaccctgtggaagtggggtccactacaccccacagcagaatggcttgaagaccaccaaagtctccatcactgacctcctagctcataccaattacacctttgaaatctgggctgtgaatggagtgtccaaatataaccctaacccagaccaatcagtttctgtcactgtgaccaccaaccaagcagcaccatcatccattgctttggtccaggctaaagaagtcacaagatacagtgtggcactggcttggctggaaccagatcggcccaatggggtaatcctggaatatgaagtcaagtattatgagaaggatcagaatgagcgaagctatcgtatagttcggacagctgccaggaacacagatatcaaaggcctgaaccctctcacttcctatgttttccacgtgcgagccaggacagcagctggctatggagacttcagtgagcccttggaggttacaaccaacacagtgccttcccggatcattggagatggggctaactccacagtccttctggtctctgtctcgggcagtgtggtgctggtggtaattctcattgcagcttttgtcatcagccggagacggagtaaatacagtaaagccaaacaagaagcggatgaagagaaacatttgaatcaaggtgtaagaacatatgtggacccctttacgtacgaagatcccaaccaagcagtgcgagagtttgccaaagaaattgacgcatcctgcattaagattgaaaaagttataggagttggtgaatttggtgaggtatgcagtgggcgtctcaaagtgcctggcaagagagagatctgtgtggctatcaagactctgaaagctggttatacagacaaacagaggagagacttcctgagtgaggccagcatcatgggacagtttgaccatccgaacatcattcacttggaaggcgtggtcactaaatgtaaaccagtaatgatcataacagagtacatggagaatggctccttggatgcattcctcaggaaaaatgatggcagatttacagtcattcagctggtgggcatgcttcgtggcattgggtctgggatgaagtatttatctgatatgagctatgtgcatcgtgatctggccgcacggaacatcctggtgaacagcaacttggtctgcaaagtgtctgattttggcatgtcccgagtgcttgaggatgatccggaagcagcttacaccaccaggggtggcaagattcctatccggtggactgcgccagaagcaattgcctatcgtaaattcacatcagcaagtgatgtatggagctatggaatcgttatgtgggaagtgatgtcgtacggggagaggccctattgggatatgtccaatcaagatgtgattaaagccattgaggaaggctatcggttaccccctccaatggactgccccattgcgctccaccagctgatgctagactgctggcagaaggagaggagcgacaggcctaaatttgggcagattgtcaacatgttggacaaactcatccgcaaccccaacagcttgaagaggacagggacggagagctccagacctaacactgccttgttggatccaagctcccctgaattctctgctgtggtatcagtgggcgattggctccaggccattaaaatggaccggtataaggataacttcacagctgctggttataccacactagaggctgtggtgcacgtgaaccaggaggacctggcaagaattggtatcacagccatcacgcaccagaataagattttgagcagtgtccaggcaatgcgaacccaaatgcagcagatgcacggcagaatggttcccgtctgagccagtactgaataaactcaaaactcttgaaattagtttacctcatccatgcactttaattgaagaactgcactttttttacttcgtcttcgccctctgaaattaaagaaatgaaaaaaaaaaacaatatctgcagcgttgcttggtgcacagattgctgaaactgtggggcttacagaaatgactgccggtcatttgaatgagacctggaacaaatcgtttctcagaagtacttttctgttcatcaccagtctgtaaaatacatgtacctatagaaatagaacactgcctctgagttttgatgctgtatttgctgccagacactgagcttctgagacatccctgattctctctccatttggaattacaaccattgtattttgtttgtggcataaattacagtcatctgtctttcactggaatgaagaccatgcctaggaacattttttaaggactcagctgtggcttttagggcttggttcataccatgggggaaaaaaaagtcctaggagaaagcgacgtggctcattagtgttgcctcttcagtgctcaagccgcctggtggattcctatgacacagggggcctggaaagaaagggaaagtggatttaaaatatatatatacgtaacccaagccccataacccctaactggacaaatgaggtctgtttctttgggcctgaggctgtgccatataaagtcttattttgggactttacaaacttgtcctaactatcttgtggatagtgggctgtgacaatctggaatagagaacgttcacacttcgctcctttaaagaagcgaccccagatctgcaagggagtagattctgctatcttggcctcacagcccttcctgttgattacaaagcccgtggaagaaaacagaacacaccctcctcagttccgtctaaatgtgtttcttctgcttcaattacaccagttctggggcaaagacactgatgaaacaacacccatacctgaaaagaataaatgtgtgactttcaaatcccctttcgcagtgaaagaaacagcaaacacttaagattcagcatctgttctccagttgcactgaggaatgcactgtctcgcagcaccagctctgcagagcccttgccccagactctttgcggttttatttatatgtatttccatatttcattcctgtgtgtcactgctgcattggtgtggcagcaagtgaccaaatgctacaggtcttactatggacaccaggtcaggtgcaaccacacaaaacaaagccagttccatgagctgcctatgatatgcattgcggaagtaacattttacccagggtgtgccattgcagtgatataaatatatttttttcttagactaaatatgagctgactatctcttttgatgtgtgtacataggtgtgagtgtgtgtgtatgcgtgcctgtctgtgtgcgggtgtgtgtatgtgcatagcctcatgcttaggactacccatgaatgttgtggaatgctacacctggagagttctggttttccaccagtttcaagatgaagaactacatgatacagtggacctggagaccatccccttggaaagacaacccagagatgttcagcatcctgtatctacacgcatcctgtatctacacgtgtattttgtagctgtcacactaaccttaataagaattctacagctttggacagaggcattttcaccttaatggtgaagtaatttaaaatataaatccattcaggtgacaacccatcatcaaaattacaaattttctgattgaactcatctgaatcatcagttccttgatggagagagagaaggagatggaatgtgtctggtaaccccaaatggagtacaagtagcctttgttttcctgcataaatggacttgttgaatgcgaacgaatatatgcaattcatatacttttggagatgaacgtagatatgtgtgtcagctttgagatggtgtgtcctggattaatactttgtctcccaatatcacagaaaaatacatgccagtgactcttgaggttaaggtagttgggatgaaatggcctcaggcaatttcacattccctaattacctggaaagttctacagtaattaatatgcagctaactcctgttgccctcacaagagcatcagccttctagaatcggagctccggagtgtgaagattcagtattgatatgatatgtataccaaactccagccaacttactgccatttttcataatctgagtggctgccttgcttatcctaagctgtggttgcagaaaccgtggccatttatataagctataacatcaaatcagggaaaaatgaggaaaaaaaatagattctgaaccatttattgttgaataagtagagaaaatcatcaataaatatttattacattctgacagggtgtgtggcattgtgttctatgccagagtgacaaagttgattcacccctttttggggaccttaatatattttttaagggatgtgcctatgcattgatgcctgaaaaatatgtataaagaaatgaggttgactcttctgagcagttcatcttttccagaggtaagggtaggaggccaacttcagggtctgggtctgagcccgtgggcaagccctggccgagtgagctccaatgctaactcatgtgccgatctctagagcagtgggaaactaccccgctgcaccaaatcaagtagcttcaccttgtgtatgcaggccccaagttattttttagcaatcttacgagtgaaatgttctggtgggttgaaaaacgttcttattttaaagaaaggttgtgctcgctacactgctggtgtgtgcattctgagacctcttgtattcaatctgtgaaggatatgtgtattaatccgtacacccgtatagcctcaatatttgtctgaagacacttaaattctgacccataaaggaaagttctagaagcaatattttcacttatttaacattctccaaacaacatcaagcattgatacacactgaagagtgcgtttattttttgtatcactctaagtatgttggaatatgcaaggactgtggttcaaattagaatgtataaggcatattataatttagttcatactgaataagaaattaacagaacattgttcggttcacacgttccaaactttgagtgatttctggagttagacatagattttctattttgttttaatttgtcaaggtatttttcttcccttcatgaactttaggtacacataacttatgtcatttatttatggtcttttatacctagtttgtaaaattgtaaaatagcaaactaaatgcaaagagtttgcatttgaaaataataaagtagttgccgtatacaaccctgcaaaaaaaaaaaaaaaaaa

SEQ ID NO: 492 - DNA, 6099 bp, HOMO SAPIENS
aggcggcgcgtgcgtagaggggcggtgagagctaagaggggcagcgcgtgtgcagaggggcggtgtgacttaggacggggcgatggcggctgagaggagctgcgcgtgcgcgaacatgtaactggtgggatctgcggcggctcccagatgatggtcgtcctcctgggcgcgacgaccctagtgctcgtcgccgtggcgccatgggtgttgtccgcagccgcaggtggaaaaaatctaaaatctcctcaaaaagtagaggtcgacatcatagatgacaactttatcctgaggtggaacaggagcgatgagtctgtcgggaatgtgactttttcattcgattatcaaaaaactgggatggataattggataaaattgtctgggtgtcagaatattactagtaccaaatgcaacttttcttcactcaagctgaatgtttatgaagaaattaaattgcgtataagagcagaaaaagaaaacacttcttcatggtatgaggttgactcatttacaccatttcgcaaagctcagattggtcctccagaagtacatttagaagctgaagataaggcaatagtgatacacatctctcctggaacaaaagatagtgttatgtgggctttggatggtttaagctttacatatagcttagttatctggaaaaactcttcaggtgtagaagaaaggattgaaaatatttattccagacataaaatttataaactctcaccagagactacttattgtctaaaagttaaagcagcactacttacgtcatggaaaattggtgtctatagtccagtacattgtataaagaccacagttgaaaatgaactacctccaccagaaaatatagaagtcagtgtccaaaatcagaactatgttcttaaatgggattatacatatgcaaacatgacctttcaagttcagtggctccacgcctttttaaaaaggaatcctggaaaccatttgtataaatggaaacaaatacctgactgtgaaaatgtcaaaactacccagtgtgtctttcctcaaaacgttttccaaaaaggaatttaccttctccgcgtacaagcatctgatggaaataacacatctttttggtctgaagagataaagtttgatactgaaatacaagctttcctacttcctccagtctttaacattagatcccttagtgattcattccatatctatatcggtgctccaaaacagtctggaaacacgcctgtgatccaggattatccactgatttatgaaattattttttgggaaaacacttcaaatgctgagagaaaaattatcgagaaaaaaactgatgttacagttcctaatttgaaaccactgactgtatattgtgtgaaagccagagcacacaccatggatgaaaagctgaataaaagcagtgtttttagtgacgctgtatgtgagaaaacaaaaccaggaaatacctctaaaatttggcttatagttggaatttgtattgcattatttgctctcccgtttgtcatttatgctgcgaaagtcttcttgagatgcatcaattatgtcttctttccatcacttaaaccttcttccagtatagatgagtatttctctgaacagccattgaagaatcttctgctttcaacttctgaggaacaaatcgaaaaatgtttcataattgaaaatataagcacaattgctacagtagaagaaactaatcaaactgatgaagatcataaaaaatacagttcccaaactagccaagattcaggaaattattctaatgaagatgaaagcgaaagtaaaacaagtgaagaactacagcaggactttgtatgaccagaaatgaactgtgtcaagtataaggtttttcagcaggagttacactgggagcctgaggtcctcaccttcctctcagtaactacagagaggacgtttccctgtttagggaaagaaaaaacatcttcagatcataggtcctaaaaatacgggcaagctcttaactatttaaaaatgaaattacaggcccgggcacggtggctcacacctgtaatcccagcactttgggaggctgaggcaggcagatcatgaggtcaagagatcgagaccagcctggccaacgtggtgaaaccccatctctactaaaaatacaaaaattagccgggtgtggtggcgcgcgcctgttgtcttagctactcaggaggctgaggcaggagaatcgcttgaaaacaggaggtggaggttgcagtgagccgagatcacgccactgcactccagcctggtgacagcgtgagactctttaaaaaaagaaattaaaagagttgagacaaacgtttcctacattcttttccatgtgtaaaatcatgaaaaagcctgtcaccggacttgcattggatgagatgagtcagaccaaaacagtggccacccgtcttcctcctgtgagcctaagtgcagccgtgctagctgcgcaccgtggctaaggatgacgtctgtgttcctgtccatcactgatgctgctggctactgcatgtgccacacctgtctgttcgccattcctaacattctgtttcattcttcctcgggagatatttcaaacatttggtcttttcttttaacactgagggtaggcccttaggaaatttatttaggaaagtctgaacacgttatcacttggttttctggaaagtagcttaccctagaaaacagctgcaaatgccagaaagatgatccctaaaaatgttgagggacttctgttcattcatcccgagaacattggcttccacatcacagtatctacccttacatggtttaggattaaagccaggcaatcttttactatgcattaagacctctgattcaaaacttattagaacagtagcttctgctggaatttgcaatcactgaagtcatagaaaataggtaactatctaattagagaaataattgttgtattttaagatctgagagtgtgtacaagttttagtatacatgccatgccagaagatagtgtatgcaagaagtcttgggaccagaaaatggcaatgataggagactgacatagaagaagaatgcttccctaggaaaaaggtcgctggctttggtgcaagaggaagaagaatgttccactggaagcctgagcacctaatcagctctcagtgatcaacccactcttgttatgggtggtctctgtcactttgaatgccaggctggcttctcgtctagcagtattcagataccccttctgctcagcctgcttggcgttaaaatacaaatcattgaactgagggggaaaaatgtaactaggaagaaaaacccaatttaagaaattacataatgctttccaaaggcacctacaacttagttttaaattacttgctactggggattacccatggatatccttaataggcaggaagtctgggaattctggtggcctctagggcagtgttctcacagcaccgttccgacagggaccagtgaaagaaaagagacaaagttagaacgtgctggggagcggccatttctaaggccagtctggtttaagtagtcatttctgctgaaaaaacagatgatcctggtggaagaaaaggttgaaggcagctgccctcgggagggctgtgatgctcggcacatcctgcctggcacatacacgtgtctgcaggccacaccgtgcatgtccccagacctgccgcctggcttctggagtgcttcaagcagagcatggtgggtcattgaggagacccaggaatctcatctgagaacccactctctgccggagaaccccatggtgacacattttcatctttctgaccagaggctgtttttttttttttttgagacagtctcattctgttgcccaggctggagtgcagtggcttgatctcggctcactgcaacctcgcctcccgggttcaagcaattctctgccgcagcctccagagtagctgggataacaggtgcccaccaccacaccccactaatttttgtatttgtatttttagtagagatggggtttcaccatgttggtcaggctggtcttggactcctgacctcatgctccacccgcttcggcctcccaaagttctgggattacaggtgtgagccaccgtgcacggccggcctgacctttggaaaagccttgtcactttggacgtttgcgtctttgaagaggcgatgggagcatatcatgactgcctgccaccattgcttttcagactaccacaactcaatcatgctgtccaggacttctggccctgtgttcaccactgggaaaacgtacttcagactggatagcctaaaaaggagcaatgcccttgtaggatgtggagaagggaaaatacggacattaacattaaaagacaccagtgaaattgttaggtctctaggaagttggagcacaaggcttcacgctttaagaccatctgtggttttcagtgaacaagcgctgagcaccagcagcagaaaacaacaacaaaaaaacacctcgtttttaccttgtcttctagacatgaaaaggcagttgcattccactctgcattatgttctacatgttgctttatcagtatatgcttagctgtaagtgacaagtattttttctgaacagaagtttacttagaaataccatgcacttgggggtaccaattaaccgcctgaaaattagcatattgatagttcttagagagaccagatataatctaagaatttatatgaaagatttgtatcattagagccagaaataattttatattaatatataatacagattaacattatatataatatgtacctgtgtcacttctgacatgagcctgtaaacatatattcatatatgtacctgcacatgtacccacctgatgtaggtcttattcctttagtatggacttaaagtacttattcatataccttgtaactaaaaattagaacagctccctagaattgtgaacttttaagagtctgactagaaatttgcaacttataaaaaagttacttttaaaaatataagttagggctaggcacagtggctcatgcctataatctcagcacttttgggaggccaagacaggaggatcacttcaggccaggagttcaagatcaaccaacctgggtaacatggccagaccccatctctatttatatatatatatataaaacttagagtttttatcttcccctaaaagaggccgtgatatttgcagcagcctcaaattgctcttaaggggtttaggtgtgcagaagctttcctttccctacccagtaaccatgtgactactaacgtggtatattgatttattttgtttgctgtctgtctcccctgccccactgctggaacagaggctccaagaaaacagggaccttattattcattactgcatccccagtaatgaaagtacttagaaaataattattgaatgaatgaaatctaaactgtgaacctgagggtgtttgtggcagtgtttgttttactgaattgtagaaggacataaccgtgttttcagtgtttctatggaacaaacttgtacattttatttcacttgtgttttgtcttaaaccctactgctggaaacaattttatgtaataagcaatgggcccaaaagtctaggagtttttttgtacttagtgaatttgtatgcaacagagatgctgcagctgatgcctttaaaaggtattcatcatggaagagctgaggcctgtgcttggtgttccagagcccagggttgagcatcctgaaggagccactgcagccgtcactgtccccagagcctgtggagatagagcctgtttgctgctttttcttcccgctcttaagacatggctggagctcagtcttcattgaatgaagtttgctgtggtattgcatagccttgctttcttgaactaaactgtttgcccttcacaagtagttcttctttcaggattagttcgttccaaggaggctcttcagtctcacagataagtagatctctcctgctgtctggacacatttcactcggaaattgaatacaatttgtattcaggctgggaacctgaacacacacttgtgtttttaagcttcccttttttacagtggacaaggacacaaataataaataaatcatccctaatgcccaagaaaaaaa

SEQ ID NO: 493 - DNA, 2701 bp, HOMO SAPIENS
gttgctgcggagccaggaggggaagcgatggctgggcccgcgtggatctctaaggtctctcggctgctgggggcattccacaacccaaaacaggtgaccagaggttttactggtggtgttcagacagtaactttaattccaggagatggtattggcccagaaatttcagctgcagttatgaagatttttgatgctgccaaagcacctattcagtgggaggagcggaacgtcactgccattcaaggacctggaggaaagtggatgatcccttcagaggctaaagagtccatggataagaacaagatgggcttgaaaggccctttgaagaccccaatagcagccggtcacccatctatgaatttactgctgcgcaaaacatttgacctttacgcgaatgtccgaccatgtgtctctatcgaaggctataaaaccccttacaccgatgtaaatattgtgaccattcgagagaacacagaaggagaatacagtggaattgagcatgtgattgttgatggagtcgtgcagagtatcaagctcatcaccgagggggcgagcaagcgcattgctgagtttgcctttgagtatgcccggaacaaccaccggagcaacgtcacggcggtgcacaaagccaacatcatgcggatgtcagatgggctttttctacaaaaatgcagggaagttgcagaaagctgtaaagatattaaatttaatgagatgtaccttgatacagtatgtttgaatatggtacaagatccttcccaatttgatgttcttgttatgccaaatttgtatggagacatccttagtgacttgtgtgcaggattgatcggaggtctcggtgtgacaccaagtggcaacattggagccaatggggttgcaatttttgagtcggttcatgggacggctccagacattgcaggcaaggacatggcgaatcccacagccctcctgctcagtgccgtgatgatgctgcgccacatgggactttttgaccatgctgcaagaattgaggctgcgtgttttgctacaattaaggacggaaagagcttgacaaaagatttgggaggcaatgcaaaatgctcagacttcacagaggaaatctgtcgccgagtaaaagatttagattaacacttctacaactggcatttacatcagtcactctaaatggacaccacatgaacctctgtttagaatacctacgtatgtatgcattggtttgcttgtttcttgacagtacatttttagatctggccttttcttaacaaaatctgtgcaaaagatgcaggtggatgtccctaggtctgttttcaaagaactttttccaagtgcttgttttatttattaagtgtctacctggtaaatgttttttttgtaaactctgagtggactgtatcatttgctattctaaaccattttacacttaagttaaaatagtttctcttcagctgtaaataacaggatacagaattaacaagagaaaatgtctaactttttaagaaaaaccttattttcttcggtttttgaaaaacataatggaaataaaacaggatattgacataatagcacaaaatgacactcttctaaaactaaatgggcacaagagaattttcctgggaaagttcacatcaaaaagagtgaatgtggtatatttctaaatgatatggaaaatagagacagatttgtcctttacagaaattactgagtgtgaataaaaacttcagatccaagaaatatataatgagagatataatttttgttaataagacaaaggtaatatattggatacaaagacacaaatgtattgtgtgttcaattattttgttgtcttgagatttaatattctttccaagagcttttaatgaagcagagagctagtacttcattttcactggatacattttcagcatcatgagttgtcacagcctctgagcccctgatctgaagccagaagggctgagtgtattgtaaacttattcttgcatgttgctgtctgggaatggaccacactacagcaggtagttctgggggcgatactgccgaaaggcccgaacacatgtattttggctgcaattgaggaacttgggatgctattaattttgtatttcagcaactgccccttctcctatcccaaagcaccaattactgccctctgcctcagcagtaccagtataagatgacattccaaagactggaggcaactcagcctgagttaattcacaaaattatgccatgctggggcttgagcttgagcttgggcttaggcttgggctcagcttttgaccctcaggcatctcctttcccttcctgtcttcctctcccttctcctctgctgcagcatgattttcttaatcttcagacactcactattttcatgaacagttaccctctgtccccacaaccaaagacaactcatggcctcctttggcccttgtgtaacattgcaaacctgtggctttgcaaaatgtacccaggtcacaaggggatttttttttttttagcaatgatatccctgtctgggtcactttttaagcttgtaaccgcccccccagacttataatcttaaatgtattttcctttgtttaagctgctgcttcctctgtttcattggattgtgccagttatcagtggctcttgggttcaaagtaataaagaattccaaaactgaaaaaaaaaaaaaaaaaaaaaaaaaaaaaaaaaaaaa

SEQ ID NO: 494 - DNA, 3309 bp, HOMO SAPIENS
ttcagcccctctcccgggctgcgcctccgcactccgggcccgggcagaagggggtgcgcctcggccccaccacccagggagcagccgagctgaaaggccgggaaccgcggcttgcggggaccacagctcccgaaagcgacgttcggccaccggaggagcgggagccaagcaggcggagctcggcgggagaggtgcgggccgaatccgagccgagcggagaggaatccggcagtagagagcggactccagccggcggaccctgcagccctcgcctgggacagcggcgcgctgggcaggcgcccaagagagcatcgagcagcggaacccgcgaagccggcccgcagccgcgacccgcgcagcctgccgctctcccgccgccggtccgggcagcatgaggcgcgcggcgctctggctctggctgtgcgcgctggcgctgagcctgcagccggccctgccgcaaattgtggctactaatttgccccctgaagatcaagatggctctggggatgactctgacaacttctccggctcaggtgcaggtgctttgcaagatatcaccttgtcacagcagaccccctccacttggaaggacacgcagctcctgacggctattcccacgtctccagaacccaccggcctggaggctacagctgcctccacctccaccctgccggctggagaggggcccaaggagggagaggctgtagtcctgccagaagtggagcctggcctcaccgcccgggagcaggaggccaccccccgacccagggagaccacacagctcccgaccactcatcaggcctcaacgaccacagccaccacggcccaggagcccgccacctcccacccccacagggacatgcagcctggccaccatgagacctcaacccctgcaggacccagccaagctgaccttcacactccccacacagaggatggaggtccttctgccaccgagagggctgctgaggatggagcctccagtcagctcccagcagcagagggctctggggagcaggacttcacctttgaaacctcgggggagaatacggctgtagtggccgtggagcctgaccgccggaaccagtccccagtggatcagggggccacgggggcctcacagggcctcctggacaggaaagaggtgctgggaggggtcattgccggaggcctcgtggggctcatctttgctgtgtgcctggtgggtttcatgctgtaccgcatgaagaagaaggacgaaggcagctactccttggaggagccgaaacaagccaacggcggggcctaccagaagcccaccaaacaggaggaattctatgcctgacgcgggagccatgcgccccctccgccctgccactcactaggcccccacttgcctcttccttgaagaactgcaggccctggcctcccctgccaccaggccacctccccagcattccagcccctctggtcgctcctgcccacggagtcgtggggtgtgctgggagctccactctgcttctctgacttctgcctggagacttagggcaccaggggtttctcgcataggacctttccaccacagccagcacctggcatcgcaccattctgactcggtttctccaaactgaagcagcctctccccaggtccagctctggaggggagggggatccgactgctttggacctaaatggcctcatgtggctggaagatcctgcgggtggggcttggggctcacacacctgtagcacttactggtaggaccaagcatcttgggggggtggccgctgagtggcaggggacaggagtccactttgtttcgtggggaggtctaatctagatatcgacttgtttttgcacatgtttcctctagttctttgttcatagcccagtagaccttgttacttctgaggtaagttaagtaagttgattcggtatccccccatcttgcttccctaatctatggtcgggagacagcatcagggttaagaagactttttttttttttttttaaactaggagaaccaaatctggaagccaaaatgtaggcttagtttgtgtgttgtctcttgagtttgtcgctcatgtgtgcaacagggtatggactatctgtctggtggccccgtttctggtggtctgttggcaggctggccagtccaggctgccgtggggccgccgcctctttcaagcagtcgtgcctgtgtccatgcgctcagggccatgctgaggcctgggccgctgccacgttggagaagcccgtgtgagaagtgaatgctgggactcagccttcagacagagaggactgtagggagggcggcaggggcctggagatcctcctgcagaccacgcccgtcctgcctgtggcgccgtctccaggggctgcttcctcctggaaattgacgaggggtgtcttgggcagagctggctctgagcgcctccatccaaggccaggttctccgttagctcctgtggccccaccctgggccctgggctggaatcaggaatattttccaaagagtgatagtcttttgcttttggcaaaactctacttaatccaatgggtttttccctgtacagtagattttccaaatgtaataaactttaatataaagtagtcctgtgaatgccactgccttcgcttcttgcctctgtgctgtgtgtgacgtgaccggacttttctgcaaacaccaacatgttgggaaacttggctcgaatctctgtgccttcgtctttcccatggggagggattctggttccagggtccctctgtgtatttgcttttttgttttggctgaaattctcctggaggtcggtaggttcagccaaggttttataaggctgatgtcaatttctgtgttgccaagctccaagccccatcttctaaatggcaaaggaaggtggatggccccagcacagcttgacctgaggctgtggtcacagcggaggtgtggagccgaggcctaccccgcagacaccttggacatcctcctcccacccggctgcagaggccagaggcccccagcccagggctcctgcacttacttgcttatttgacaacgtttcagcgactccgttggccactccgagaggtgggccagtctgtggatcagagatgcaccaccaagccaagggaacctgtgtccggtattcgatactgcgactttctgcctggagtgtatgactgcacatgactcgggggtggggaaaggggtcggctgaccatgctcatctgctggtccgtgggacggtgcccaagccagaggctgggttcatttgtgtaacgacaataaacggtacttgtcatttcgggcaaaaaaaaaaaaaaaaaa

SEQ ID NO: 495 - DNA, 2531 bp, HOMO SAPIENS
agtgcgcctgcgcgggttttatactctgctatatgtgtgtccgctgcttttaggcaaccagccgctgcccctgggccgcaaggcaggctggaaacgattccgccgtcaggtcccaaatatgagccgcgagaaatgcagccccggggaaggcgctgaggagggaagggggtctgaggcctcggggctcaaggccagtgcggggcacgggactgaaccagctggtggtggcccgatggctggagacacccactgccccgcagagcccctggccagagaaggcactttatgggaggccctcagggcgctcctgccgcacagtaaagaagacctgaagttggacctcggggagaaagtggagaggagcgtggtgacattgttgcagcgagccactgagctcttctacgagggcaggagggacgagtgtctgcagagcagcgaggtgatcctggactactcctgggagaagctcaacacgggcacatggcaggacgtagacaaagactggcgccgggtctacgccatcggctgcctcctgaaagccctgtgtctgtgccaggcacctgaggatgccaacactgtggccgcagccctgcgggtctgtgacatgggcctgctgatgggggcagccatcctgggggacatccttcttaaagtcgctgccatcctccagacacacctccctggaaagaggcctgcccgtggctccctcccagagcaaccctgcacaaagaaagcaagggcggaccatggtttgattccagatgtgaagttagaaaaaacagtcccccggctgcaccgtccgtccctccagcatttcagggagcagtttttggttccagggaggcccgtgatcctgaaaggcgtggctgaccactggccgtgcatgcagaagtggagtttggagtatatccaggagatcgctggctgccgaactgtcccagtggaagttggttcgaggtacacagatgaggaatggtcccagaccctcatgacggtcaacgagttcatcagcaaatacatcgtgaatgagccaagggacgtcgggtaccttgctcagcaccagctctttgaccagatcccggagttgaagcaggacatcagcatccccgactactgcagcctgggcgatggggaggaggaggaaatcaccatcaatgcctggtttggtccccagggaaccatctccccactacatcaggatccccagcaaaacttcctagtgcaggtgatggggaggaagtacatccggctgtattccccgcaggagtcaggggctctgtaccctcatgacacgcaccttctccataacacgagccaggttgacgtggagaatcccgacctggaaaagttccccaagtttgccaaggccccattcctgtcctgcatcctgtctcctggagagatcctgttcatcccggtgaaatactggcattacgtgcgggctctggatttgagcttctcggtcagcttctggtggtcgtagccaggataggagctgaaagggcctgacatgcagacagcattcatctgttcactaatttcctgggtcctggaatctatagagacaagcaggactgaacctgtgtcctgaagagccttcactgcccagtggcagccctggggggctgagctccagcactggacaggcacagagcaggggctgcccaggaaggagcacactccaggccaggggtgcatggcagaggaaggtggggagagcccagaaggacattgcagacagacagcctgcatggggactctggcatcagaaagccgaatgtttttgggaaacgggtgggtcacacaggcaggggtgaaacatgggctctgaggttggctacctgattcaaacccggccgcgctgtgcacctgctgggtgacttggccaggatcccccacttcgctgtgcccatatggaaaagagggcaaggccagtcctcactgccgagggccgagaaggcggtgccgagcccctgctgctgcatgaaccttagccgctgtcactgatcccaattactctgatccttttgcccttccttcccataacggcctgctggacgccacagcctgaatactggagagagctgggcattgcccaggtcacaggagagagtccgtagagacctgcgcaggagccgggacccctgctgagcagtgggagctttctgtcatccccatggctcaaggataacctacctgcctgcagagaagtgcgaaggtcttgctggatgacttttcacccgcactcacccaggagcaggctcccaagtgaagaaaccaccgaaccatcaccagctcctagaagcctccctcctaccaccttctagtcaccatcccccagaagtaatgactctcaaacctgggggatttgaggccagggggagagccaggctctatgctttctgtaattgtgtctcgtttgtgtgcacgcaggtttgttttatgttttggccattaagattttccccagccctctgttttttgttttttaaactaaatagagatgggatcttgctatgttaaaaaaaaaa

SEQ ID NO: 496 - DNA, 2327 bp, HOMO SAPIENS
gagaggggcatcgcgccgcccggcgcgcgccgcccccctgcctcgcggcgcggggtctcgcgggccccgctcccgccctccgctcgcctggcccggaccggaagcggcgccgcacggcctgggcctggcgcggggggcgggcaccggggcccggtcggacatgggcaagaagcacaagaagcacaagtcggacaaacacctctacgaggagtatgtagagaagcccttgaagctggtcctcaaagtaggagggaacgaagtcaccgaactctccacgggcagctcggggcacgactccagcctcttcgaagacaaaaacgatcatgacaaacacaaggacagaaagcggaaaaagagaaagaaaggagagaagcagattccaggggaagaaaaggggagaaaacggagaagagttaaggaggataaaaagaagcgagatcgagaccgggtggagaatgaggcagaaaaagatctccagtgtcacgcccctgtgagattagacttgcctcctgagaagcctctcacaagctctttagccaaacaagaagaagtagaacagacaccccttcaagaagctttgaatcaactgatgagacaattgcagagaaaagatccaagtgctttcttttcatttcctgtgactgattttattgctcctggctactccatgatcattaaacacccaatggattttagtaccatgaaagaaaagatcaagaacaatgactatcagtccatagaagaactaaaggataacttcaaactaatgtgtactaatgccatgatttacaataaaccagagaccatttattataaagctgcaaagaagctgttgcactcaggaatgaaaattcttagccaggaaagaattcagagcctgaagcagagcatagacttcatggctgacttgcagaaaactcgaaagcagaaagatggaacagacacctcacagagtggggaggacggaggctgctggcagagagagagagaggactctggagatgccgaagcacacgccttcaagagtcccagcaaagaaaataaaaagaaagacaaagatatgcttgaagataagtttaaaagcaataatttagagagagagcaggagcagcttgaccgcatcgtgaaggaatctggaggaaagctgaccaggcggcttgtgaacagtcagtgcgaatttgaaagaagaaaaccagatggaacaacgacgttgggacttctccatcctgtggatcccattgtaggagagccaggctactgccctgtgagactgggaatgacaactggaagacttcagtctggagtgaatactttgcaggggttcaaagaggataaaaggaacaaagtcactccagtgttatatttgaattatgggccctacagttcttatgcaccgcattatgactccacatttgcaaatatcagcaaggatgattctgatttaatctattcaacctatggggaagactctgatcttccaagtgatttcagcatccatgagtttttggccacgtgccaagattatccgtatgtcatggcagatagtttactggatgttttaacaaaaggagggcattccaggaccctacaagagatggagatgtcattgcctgaagatgaaggccatactaggacacttgacacagcaaaagaaatggagattacagaagtagagccaccagggcgtttggactccagtactcaagacaggctcatagcgctgaaagcagtaacaaattttggcgttccagttgaagtttttgactctgaagaagctgaaatattccagaagaaacttgatgagaccaccagattgctcagggaactccaggaagcccagaatgaacgtttgagcaccagaccccctccgaacatgatctgtctcttgggtccctcatacagagaaatgcatcttgctgaacaagtgaccaataatcttaaagaacttgcacagcaagtaactccaggtgatatcgtaagcacgtatggagttcgaaaagcaatggggatttccattccttcccccgtcatggaaaacaactttgtggatttgacagaagacactgaagaacctaaaaagacggatgttgctgagtgtggacctggtggaagttgaggctgcctggtatttgattatatattatgtacatactttttcattcttaacttagaaatgcttttcagaagatattaaatatttgtaaattgtgtttttaattaaactttggaacagcgaatttggatgttccagaggttggacttgtattaggtaataaagctggacctgggactcgtgaggaaggaatgtgaaaaaaaaaaaaaaaaaa

SEQ ID NO: 497 - DNA, 2605 bp, HOMO SAPIENS
gaatatcgcatccgggaactctgcgcgcccatgcggagagtcggagggcgagctgacgaggacgctacggcggcgggaagtctgtgggttctggcaccacctgagcccactgggcatctggtcatccctggcacctctcctttggagccaccttgtccctggctagacagtcacattttccagtgccgttttggaaagatgttgcctttggagaaggcgtttgcctcccccaggagctccccagccccgccggatctgcccacgccggggtcagcagccggagtccagcaggaagaacccgagaccatccctgagaggacccctgctgacctggagttctcccgcctgcgtttccgggaatttgtctaccaggaggctgccgggccccaccagaccctggcccggctgcatgagctgtgccgccagtggctgatgcctgaggcgcgctccaaggagcagatgctggagctgctggtgctggagcagttcctgggcatcctgcctgataaggtccggccctgggtggtggcacagtaccctgagagctgcaagaaggcagcctccctggtggagggcctcgctgatgtcctggaagagccagggatgctgctgggctcccctgcgggctcatcctcaattcttagcgatggagtgtacgagaggcacatggaccctctgctgctaccaggcgagctcgcgagccccagccaggcccttggagctggggagatcccggcaccttctgagacaccctggctttctccggaccccctgtttctggaacagaggagggtcagagaagcaaagaccgaagaggacggccctgccaacaccgagcagaagctgaagtcctttccagaggaccctcagcacctgggggagtggggccacctggaccctgccgaggagaacctgaagagctaccggaagctgctcctgtgggggtatcagctttcccagcctgacgctgcctccaggctggacactgaggaactccggttggtggaaagagatccacaaggaagcagcctcccagaaggcgggaggcggcaggagagcgctgggtgcgcctgcgaggaggccgcccccgcgggggtgctgcctgagctgcctacggaggcgccccctggggacgcccttgccgatcccccgtcgggcaccactgaggaggaggaagagcagcctgggaaggccccggacccgcaggacccccaggacgcggagtccgactctgccaccggatcgcagaggcagtccgtcatccagcagcctgccccggacaggggcacggcgaaactgggaaccaagaggccgcaccccgaggatggggacgggcagagcctcgagggcgtctctagctccggcgacagcgcagggctggaggccgggcagggccctggggctgacgagccgggcttgtcccgcgggaagccctatgcctgcggcgagtgcggggaggccttcgcgtggctctcgcacctgatggagcaccacagcagccatggcggccggaagcgctacgcctgtcagggctgctggaagaccttccacttcagcctggccctagccgagcaccagaagacccacgagaaggagaaaagctacgcgctggggggcgcccggggcccccaaccgtccacccgcgaagcccaggcgggggctagggcgggcggtcccccagagagcgtggagggcgaggctccccccgcacccccagaggcgcagaggtgagccgctgtgctgtcccgttccggaggggccgctttgccggccgtgaatcccagacgaggcattgggcctttccacgcccctgggtggcggcttcctgtggtgtttgtggacgtcctctgcctgtgccctgaatccgctcctgaggctaagcgctcccaacgagaagggtccacgggaagccctcacctctgtaaacacaccctgggccagcgctcgcatccgaggggagccgccggatgtggaagaagactcggctttcctgcagccatttagtgccgccccatgctaggttatttgacattgtgcagtgtagagttgccttaaagtgcgtgatctgccagtgctttcttcaagtcacccttgccccgattcctcctgtttgcgctccccagggttgctcaagtggaaattttgtcagctgtttagccttttcgtacttggcgtgatgtcaacttcacttctaatctgcaaaagcagaagctgtttcctagtttacctcgcgtgtgtttacctatatggagtagctcgcagagatcacagaaatgcttgcagcctaaggcagggttttcagaccgtgggtcccagcccatttagtaaaatgggaaatcaattagcaagtggtcaccagcattacacagcaatgaagcagaataaagtaggccagaatgcatcatgtagtaaaggcaaatactgttttgtgaaacttttcacccatacatctaaatgtgagaactggttgcaatgtaagacatttcttgctgggaagttgtgagcaaaataagttgaaaacactaataaagatctgtctgtctgagcaaaggagactaaactccttgggctacaaaaaaaaaaaaaaaaaaaaaaaaaaaaaaaa

SEQ ID NO: 498 - DNA, 487 bp, HOMO SAPIENS
  misc_feature (76)..(76): n is a, c, g, or t
  misc_feature (255)..(255): n is a, c, g, or t
ggtgctagtaattccttgaagattctgaaaatgatctttttttccaaaatgctttcttggtttttattaaactttntattttcttaaaactctcacatcaggtatttccagtgttttcaagcatgtataaatattttaatgtataaatgttgtttaaaatcccctcaatcggtatctcctgattgagaaaatacacagtgaccaatagctaataggaattcagtattgctttcaaagaaatgtgcatattaatcnctgtagcatctgcatacatttgaaacacggagtaatacaggtctgtgcaagaattagcagcttgttccttgctaataatgacttgtgtcatctggaaggcccccaagagcccatggtctacaggtggaatgaccaccacttgggagtgagctgatggagagcacccagcaggtctcctccatcttcctggttcctgtgctcagcatagggctggtgtacattgggccattaa

SEQ ID NO: 499 - DNA, 5876 bp, HOMO SAPIENS
caaccaccccatgtgtctctagaaccccagtgtagcgagctggagagaggactgtcctgagggcagcaggcctggttgcagctggcgtgggggtctcagaatggagccctcagccctgaggaaagctggctcggagcaggaggagggctttgaggggctgcccagaagggtcactgacctggggatggtctccaatctccggcgcagcaacagcagcctcttcaagagctggaggctacagtgccccttcggcaacaatgacaagcaagaaagcctcagttcgtggattcctgaaaacatcaagaagaaagaatgcgtgtattttgtggaaagttccaaactgtctgatgctgggaaggtggtgtgtcagtgtggctacacgcatgagcagcacttggaggaggctaccaagccccacaccttccagggcacacagtgggacccaaagaaacatgtccaggagatgccaaccgatgcctttggcgacatcgtcttcacgggcctgagccagaaggtgaaaaagtacgtccgagtctcccaggacacgccctccagcgtgatctaccacctcatgacccagcactgggggctggacgtccccaatctcttgatctcggtgaccgggggggccaagaacttcaacatgaagccgcggctgaagagcattttccgcagaggcctggtcaaggtggctcagaccacaggggcctggatcatcacaggggggtcccacaccggcgtcatgaagcaggtaggcgaggcggtgcgggacttcagcctgagcagcagctacaaggaaggcgagctcatcaccatcggagtcgccacctggggcactgtccaccgccgcgagggcctgatccatcccacgggcagcttccccgccgagtacatactggatgaggatggccaagggaacctgacctgcctagacagcaaccactctcacttcatcctcgtggacgacgggacccacggccagtacggggtggagattcctctgaggaccaggctggagaagttcatatcggagcagaccaaggaaagaggaggtgtggccatcaagatccccatcgtgtgcgtggtgctggagggcggcccgggcacgttgcacaccatcgacaacgccaccaccaacggcaccccctgtgtggttgtggagggctcgggccgcgtggccgacgtcattgcccaggtggccaacctgcctgtctcggacatcactatctccctgatccagcagaaactgagcgtgttcttccaggagatgtttgagaccttcacggaaagcaggattgtcgagtggaccaaaaagatccaagatatcgtccggaggcggcagctgctgactgtcttccgggaaggcaaggatggtcagcaggacgtggatgtggccatcttgcaggccttgctgaaagcctcacggagccaagaccactttggccacgagaactgggaccaccagctgaaactggcagtggcatggaatcgcgtggacattgcccgcagtgagatcttcatggatgagtggcagtggaagccttcagatctgcaccccacgatgacagctgcactcatctccaacaagcctgagtttgtgaagctcttcctggagaacggggtgcagctgaaggagtttgtcacctgggacaccttgctctacctgtacgagaacctggacccctcctgcctgttccacagcaagctgcagaaggtgctggtggaggatcccgagcgcccggcttgcgcgcccgcggcgccccgcctgcagatgcaccacgtggcccaggtgctgcgggagctgctgggggacttcacgcagccgctttatccccggccccggcacaacgaccggctgcggctcctgctgcccgttccccacgtcaagctcaacgtgcagggagtgagcctccggtccctctacaagcgttcctcaggccatgtgaccttcaccatggaccccatccgtgaccttctcatttgggccattgtccagaaccgtcgggagctggcaggaatcatctgggctcagagccaggactgcatcgcagcggccttggcctgcagcaagatcctgaaggaactgtccaaggaggaggaggacacggacagctcggaggagatgctggcgctggcggaggagtatgagcacagagccatcggggtcttcaccgagtgctaccggaaggacgaagagagagcccagaaactgctcacccgcgtgtccgaggcctgggggaagaccacctgcctgcagctcgccctggaggccaaggacatgaagtttgtgtctcacgggggcatccaggccttcctgaccaaggtgtggtggggccagctctccgtggacaatgggctgtggcgtgtgaccctgtgcatgctggccttcccgctgctcctcaccggcctcatctccttcagggagaagaggctgcaggatgtgggcacccccgcggcccgcgcccgtgccttcttcaccgcacccgtggtggtcttccacctgaacatcctctcctacttcgccttcctctgcctgttcgcctacgtgctcatggtggacttccagcctgtgccctcctggtgcgagtgtgccatctacctctggctcttctccttggtgtgcgaggagatgcggcagctcttctatgaccctgacgagtgcgggctgatgaagaaggcagccttgtacttcagtgacttctggaataagctggacgtcggcgcaatcttgctcttcgtggcagggctgacctgcaggctcatcccggcgacgctgtaccccgggcgcgtcatcctctctctggacttcatcctgttctgcctccggctcatgcacatttttaccatcagtaagacgctggggcccaagatcatcattgtgaagcggatgatgaaggacgtcttcttcttcctcttcctgctggctgtgtgggtggtgtccttcggggtggccaagcaggccatcctcatccacaacgagcgccgggtggactggctgttccgaggggccgtctaccactcctacctcaccatcttcgggcagatcccgggctacatcgacggtgtgaacttcaacccggagcactgcagccccaatggcaccgacccctacaagcctaagtgccccgagagcgacgcgacgcagcagaggccggccttccctgagtggctgacggtcctcctactctgcctctacctgctcttcaccaacatcctgctgctcaacctcctcatcgccatgttcaactacaccttccagcaggtgcaggagcacacggaccagatttggaagttccagcgccatgacctgatcgaggagtaccacggccgccccgccgcgccgccccccttcatcctcctcagccacctgcagctcttcatcaagagggtggtcctgaagactccggccaagaggcacaagcagctcaagaacaagctggagaagaacgaggaggcggccctgctatcctgggagatctacctgaaggagaactacctccagaaccgacagttccagcaaaagcagcggcccgagcagaagatcgaggacatcagcaataaggttgacgccatggtggacctgctggacctggacccactgaagaggtcgggctccatggagcagaggttggcctccctggaggagcaggtggcccagacagcccgagccctgcactggatcgtgaggacgctgcgggccagcggcttcagctcggaggcggacgtccccactctggcctcccagaaggccgcggaggagccggatgctgagccgggaggcaggaagaagacggaggagccgggcgacagctaccacgtgaatgcccggcacctcctctaccccaactgccctgtcacgcgcttccccgtgcccaacgagaaggtgccctgggagacggagttcctgatctatgacccacccttttacacggcagagaggaaggacgcggccgccatggaccccatgggagacaccctggagccactgtccacgatccagtacaacgtggtggatggcctgagggaccgccggagcttccacgggccgtacacagtgcaggccgggttgcccctgaaccccatgggccgcacaggactgcgtgggcgcgggagcctcagctgcttcggacccaaccacacgctgtaccccatggtcacgcggtggaggcggaacgaggatggagccatctgcaggaagagcataaagaagatgctggaagtgctggtggtgaagctccctctctccgagcactgggccctgcctgggggctcccgggagccaggggagatgctacctcggaagctgaagcggatcctccggcaggagcactggccgtcttttgaaaacttgctgaagtgcggcatggaggtgtacaaaggctacatggatgacccgaggaacacggacaatgcctggatcgagacggtggccgtcagcgtccacttccaggaccagaatgacgtggagctgaacaggctgaactctaacctgcacgcctgcgactcgggggcctccatccgatggcaggtggtggacaggcgcatcccactctatgcgaaccacaagaccctcctccagaaggcagccgctgagttcggggctcactactgactgtgccctcaggctgggcggctccagtccatagacgttccccccagaaaccagggcttctctctcctgagcctggccaggactcaggctgttcctgggccctgcacatgatggggtttggtggacccagtgcccctcacggctgccgcaagtctgctgcagatgacctcatgaactggaaggggtcaaggtgacccgggaggagagctcaagacagggcacaggctactcagagctgaggggcccctgggacccttggccatcaggcgaggggctgggcctgtgcagctgggcccttggccagagtccactcccttcctggctgtgtcaccccgagcagctcatccaccatggaggtcattggcctgaggcaagttccccggagagtcggggtcccctgtggccccctcaggcctatgtctgtgaggaaggggccctgccactctccccaagagggcctccatgtttcgaggtgcctcaacatggagccttgcctggcctgggctaggggcactgtctgaactcctgactgtcaggataaactccgtgggggtacaggagcccagacaaagcccaggcctgtcaagagacgcagagggcccctgccagggttggccccagggaccctgggacgaggctgcagaagctctccctccctactccctgggagccacgtgctggccatgtggccagggacggcatgagcaggaggcggggacgtgggggccttctggtttggtgtcaacagctcacaggagcgtgaaccatgagggccctcaggaggggaacgtggtaaaacccaagacattaaatctgccatctcaggcctggctggctcttctgtgctttccacaaataaagttcctgacacgtccagggccaggggctgtgtgacggctgcctgaagttctcctcgatcccccggtgagcttcctgcagcctgtggatgtcctgcagcccctcagccctacccccaagtttctcctctgacccatcagctccctgtcttcattttcctaaacctgggctccagcatcgtccccaagcccaccaggccaggatgcaggcatccacatgccctcctccttggcttcccctgcgtggtggtgccaatgtgccctggcacccctgcagaggctccggatggagcctggggctgcctggccactgagcactggccgaggtgatgcccacccttccctggacaggcctctgtcttccacctgacccaaagctctctagccacccccttgtccccaggtat

SEQ ID NO: 500 - DNA, 2714 bp, HOMO SAPIENS
ccggggaatccggattccgggggttcaacgcccaggggttccatgagcccctactgttctcggacgcccggccggccccgacgcactcgtcctagcacccctcccctgtccggtcctccggcccctccgccgtcgcccctccggggtccagccgggcggggctgctccagggtcgcggctggcgcgggtccccgggccctggccctccggtgccccgggccaaggagagaaaacttgagcatccacgcacaggggtggggagcaggatcccactctgagggtgcactgccccgccctctccgggtctgcctcggccccgcccgggccccaggccccgccccctcccctcggccggcccgagagctccgggggccgctgcagccgcccaagcgcccgccatgcgcgctgcccgcgccgcgccgctgctccagctgctgctcctgctggggccgtggctggaggctgcgggcgttgcggagtcgccgctgcccgccgtggtccttgccatcctggcccgcaatgccgaacactcgctgccccactacctgggcgctctggagcggctggactacccccgggccaggatggccctctggtgtgccacggaccacaatgtggacaacaccacagagatgctgcaggagtggctggcggctgtgggcgatgactatgctgctgtggtctggaggcctgagggcgagcccaggttctacccagatgaagagggtcccaagcactggaccaaagaaaggcaccagtttctgatggagctgaagcaggaagccctcacctttgccaggaactggggggccgactatatcctgtttgcagacacagacaacattctgaccaacaatcagactctgcggcttctcatggggcaggggcttccagtggtggccccaatgctggactcccagacctactactccaacttctggtgtgggatcaccccccagggctactaccgccgcacagccgagtacttccccaccaagaaccgccagcgccggggctgcttccgtgtccccatggtccactccaccttccttgcatccctgcgggctgaaggggcagaccagcttgctttctacccgccacatcccaactacacttggcctttcgacgacatcatcgtcttcgcctatgcctgccaggctgctggggtctccgtccacgtgtgcaatgagcaccgttatgggtacatgaatgtgccggtgaaatcccaccaggggctggaagacgagagggtcaacttcatccacctgatcttagaagcactagtggacggcccccgcatgcaggcctcagctcatgtgactcggccctctaagaggcccagcaagatagggtttgacgaggtctttgtcatcagcctggctcgcaggcctgaccgtcgggaacgcatgctcgcctcgctctgggagatggagatctctgggagggtggtggacgctgtggatggctggatgctcaacagcagtgccatcaggaacctcggcgtagacctgctcccgggctaccaggacccttactcgggccgcactctgaccaagggcgaggtgggctgcttcctcagccattactccatctgggaagaggtggttgccaggggcctggcccgggtcctggtgtttgaggatgacgtgcgctttgagagcaacttcagggggcggctggagcggctgatggaggatgtggaggcagagaaactgtcttgggacctgatctacctcggacggaagcaggtgaaccctgagaaggagacggccgtggaggggctgccgggcctggtggtggctgggtactcctactggacgctggcctatgccctgcgtctggcgggtgcccgcaagctgctggcctcacagcctctgcgccgcatgctgcccgtggacgagttcctgcccatcatgttcgaccagcaccccaacgagcagtacaaggcacacttctggccacgggacctggtggccttctccgcccagcccctgctcgctgcccctacccactatgccggggacgccgagtggctcagtgacacggagacatcctctccatgggatgatgacagcggccgcctcatcagctggagcggctcccaaaagaccctgcgcagcccccgcctggacctgactggcagcagcgggcacagcctccaaccccagccccgagatgagctctaggtccaggtgatgactgcaaagcagtgtccaggagcaggccactactgcccagagagcagaggaggaggttgttggcagggactgcagatcctgtcagacctggccaccaccttgggcatggccactctgccctctggacctgtctttcatcgggagaaaccactcagagatggatcccattccctaaaggtctcacagcaaaggagcaggactcccaggcccctgtaccctgcctggcctgattcagggccttgtggcccccagcttctgtttcaagctgggcagaccccaggatcccttccctccctaaggactcagctgaggggcccctctgcccccttctacctccacctcagcaccctcccccagcttgatgtttgggtctccccagcaccctcctccctggccggtgcaaagtacagggaggtaaagcaggacccttgcagacatgttgcccagcacacagtaggccctcaataaaagccatttgcactttaaatataaaaaaaaaaaaaaaaaaaaaaaaaa

SEQ ID NO: 501 - DNA, 255 bp, HOMO SAPIENS
attgagaggatttggtcatcattttactgctctcttcatgtgatggaaatcaattttccttctcaaatgggatcagtatcatttcctagtcatacatccatccagtttttgttacttttttgttggcatacattaatcaaaatagctctgcttcattgaggcatgcagtcctcagactctcggtggaaaggctgtcatactattagtgaccatagtaactttttataccaaaggatggttgctggataattttaa

SEQ ID NO: 502 - DNA, 282 bp, HOMO SAPIENS
aaagttgcagtcagtttggagccccccatgcttcctgtagtggatgatgagacctctgcttttttgctacacatgatgtgatctaatataaatcacatagtcgttctgcattaatttttttcacttgtacatttcagtaataatgtgattgaagaatgctacccttttgtgtctgcggccaaattgatttttgacaagggtgccaggaccattcaatggggaaaggatggtctctcaataaatagtattgggaaaactggatatccacgtgaaaagaatgaa

SEQ ID NO: 503 - DNA, 2374 bp, HOMO SAPIENS
gagcgaaaaccaacgtgttcggtgacagaccccagcgccgactgagcctctaaagcgacttcagctctgccccaccaacaccaccgcgcgcccgggaacagccgctccgggaagaaacctgaggggactgcggggggcacgagggacagctgagggaagggaggacgcgagagaaacagcgcaagcacgctgagggccgggggttgccaggagaggggcccgcggacccgcagagcggaggaaggtccgggagaaaaggggcgggacggaggagaatccgggatcgcctggcagaaaaagagaagggagtttctgaatcctgggaagaggaggcgtgggtagggatgcttagcccgagatccgacagcagggaaccggagcgctccgggggaggggcttaatgctggggaagggatgtcttaaaagaggagaagctttaaattagacgatcggagaaggctgagggaattgctatgaaggggcgggagctgaagtgtagaggactcctttagacagcagaaagggaaagccgttgagaagttcccttcaaactccacctgcctcctctccaattcaaactccactcccttctccaaaagttaaaaggaaagccaagtttgccacgctcccctgttcctactcaataaatacttcttctactccgccaccgggaaaacagaaaaaaaaaactaatttccttcccaatattaggacttagaaaagctctaggtcccgcaacttgaattttagcctaggggaatcaaaatagtaggagcattactcttgtttcctttttcaaaatcccacacctcatccttcctgcgacgccatgtctaccaacatttgtagtttcaaggacaggtgcgtgtccatcctgtgttgcaaattctgtaaacaagtgctcagctctaggggaatgaaggctgttttgctggctgatactgaaatagaccttttctctacagacatccctcctaccaacgcagtggacttcactggaagatgctatttcaccaaaatctgcaaatgtaaactgaaggacatcgcatgtttaaaatgtgggaacattgtaggttatcatgtgattgttccatgtagttcctgtcttccttcctgcaacaacggacacttctggatgtttcacagccaggcagtttatgatattaacagactagactccacaggtgtaaacatcctactttggggcaacttgccagagatagaagagagtacagatgaagatgtgttaaatatctcagcagaggagtgtattagataaatggaattatgatatatatgatatacaaacttttttctatttaaaaatatattaatggatcaactttaaaattgttagttgccagtgatcttttttggaaaacaaaaatggggcatttgttgatttatttattttccgtctctaattagttacctcagtttgattgaagccagtggagttgtgcttttcctctacttctacttcctctcccccacctttttctgcccagtgtaggtgtattcttaaattcagacgggaagattctttcacatatcactcagttacctcccaatctgggggagtttttcttacaacttgataccagataccattaattttacattcctgaataaaggcctagtacccacgcatatttcaaccatgcatatatcaagttcaactgagttttaataggggattaaaaaaacaagctgttaggtttccatgggcactggttctcataggttctattggtgataactgctttaacatggagcaagagtttgtgaatcaggaaatagaataaattaaaatttaaaatatatagaggaatcctcttgattgctcagcatgatgttagataaatgagtttgtcagaaaatatcagtatacgctgtttaccaatgttatttatttacattcttctaaagccattatggatattgtattatgagagctaaacctaaataagttatcctgttccctaggaccttctctgtaaatagtgaattttagacgagtagtctgtcctaaatcttaaatagaaaaaaaactaaagcgatttgcttaagccattgtacattataaagagctgttttgttttgctttgctttgctttgttttgtttttttaaagctgcattcagagccacaaaggaataggaaagtagggtagtgttggattctggttttatgtaactctaaaataaatgtatctctttaatatctcagttgtagggattttgtcaataccaaagcagactgagttgtggttttgtaaataaagttttttctaaaaatgaccattcttcctttaattttttgttatgcccacatattgtatgtaaaaatataaataaatagtacttaaagtata

SEQ ID NO: 504 - DNA, 2136 bp, HOMO SAPIENS
gtgtgtggaggggaccctgtggttagcagcagctatcgcagcgtcggatgttcagagcagcagaagccggcgtcgtcggatgttgtgttgcccgccaccatgagctacacaggctttgtccagggatctgaaaccactttgcagtcgacatactcggataccagcgctcagcccacctgtgattatggatatggaacttggaactctgggacaaatagaggctacgagggctatggctatggctatggctatggccaggataacaccaccaactatgggtatggtatggccacttcacactcttgggaaatgcctagctctgacacaaatgcaaacactagtgcctcgggtagcgccagtgccgattccgttttatccagaattaaccagcgcttagatatggtgccgcatttggagacagacatgatgcaaggaggcgtgtacggctcaggtggagaaaggtatgactcttatgagtcctgcgactcgagggccgtcctgagtgagcgcgacctgtaccggtcaggctatgactacagcgagcttgaccctgagatggaaatggcctatgagggccaatacgatgcctaccgcgaccagttccgcatgcgtggcaacgacaccttcggtcccagggcacagggctgggcccgggatgcccggagcggccggccaatggcctcaggctatgggcgcatgtgggaagaccccatgggggcccggggccagtgcatgtctggtgcctctcggctgccctccctcttctcccagaacatcatccccgagtacggcatgttccagggcatgcgaggtgggggcgccttcccgggcggctcccgctttggtttcgggtttggcaatggcatgaagcagatgaggcggacctggaagacctggaccacagccgacttccgaaccaagaagaagaagagaaagcagggcggcagtcctgatgagccagatagcaaagccacccgcacggactgctcggacaacagcgactcagacaatgatgagggcaccgagggggaagccacagagggccttgaaggcaccgaggctgtggagaagggctccagagtggacggagaggatgaggagggaaaagaggatgggagagaagaaggcaaagaggatccagagaagggggccctaaccacccaggatgaaaatggccagaccaagcgcaagttgcaggcaggcaagaagagtcaggacaagcagaaaaagcggcagcgagaccgcatggtggaaaggatccagtttgtgtgttctctgtgcaaataccggaccttctatgaggacgagatggccagccatcttgacagcaagttccacaaggaacactttaagtacgtaggcaccaagctccctaagcagacggctgactttctgcaggagtacgtcactaacaagaccaagaagacagaggagctccgaaaaaccgtggaggaccttgatggcctcatccaccaaatctacagagaccaggatctgacccaggaaattgccatggagcattttgtgaagaaggtggaggcagcccattgtgcagcctgcgacctcttcattcccatgcagtttgggatcatccagaagcatctgaagaccatggatcacaaccggaaccgcaggctcatgatggagcagtccaagaagtcctccctcatggtggcccgcagtattctcaacaacaagctcatcagcaagaagctggagcgctacctgaagggcgagaaccctttcaccgacagccccgaggaggagaaggagcaggaggaggctgagggcggtgccctggacgagggggcgcagggcgaagcggcagggatctcggagggcgcagagggcgtgccggcgcagcctcccgtgcccccagagccagcccccggggccgtgtcgccgccaccgccgccgcccccagaggaggaggaggagggcgccgtgcccttgctgggaggggcgctgcaacgccagatccgcggcatcccgggcctcgacgtggaggacgacgaggagggcggcgggggcgccccgtgacccgagctcggggcgggcggagcccgcgtggccgaagctggaaaccaaacctaataaagttttcccatcccaccaaaaaaaaaaaaaaaaaaaaaa

SEQ ID NO: 505 - DNA, 521 bp, HOMO SAPIENS
  misc_feature (85)..(86): n is a, c, g, or t
  misc_feature (88)..(93): n is a, c, g, or t
  misc_feature (95)..(96): n is a, c, g, or t
  misc_feature (98)..(98): n is a, c, g, or t
  misc_feature (100)..(104): n is a, c, g, or t
cacccagatgcccgctggagatgcagcctcatctcaaggacactgcttgctggataaatccctcaccaccctagagacagcccanngnnnnnngnnangnnnnngggccaggcttgttgcacgtaagcgcctcccgcagaaaccagtgaggccggagttccagaggaaatgatgtagggacagaggcagagggcctccaggaggcaccagccccagagtcttccctagaatcagactttaagcacaagcagggagggaaagcacttgagcagtgcccgtccctgcatacctggcctctgctggaacccatgcagggacaggacacttctttatcagcaatcctgttcctctcctgggcagcttcaacctgaacatcctccttcaccttgagctaaaatgggtttcttgtcacccttgcccatcaaacctggccttgccctcaggaaccacacaggacaagcctaatacttccttcttgtggcaacactttagcaattgagacctggctgtcaggtcctcca

SEQ ID NO: 506 - DNA, 857 bp, HOMO SAPIENS
caagcctggaagaactcgtcatgctctttgtagcgtggtgcttctgttgctcacaggacaacttgcctttgatgattttcaagagagttgtgctatgatgtggcaaaagtatgcaggaagcaggcggtcaatgcctctgggagcaaggatccttttccacggtgtgttctatgccgggggctttgccattgtgtattacctcattcaaaagtttcattccagggctttatattacaagttggcagtggagcagctgcagagccatcccgaggcacaggaagctctgggccctcctctcaacatccattatctcaagctcatcgacagggaaaacttcgtggacattgttgatgccaagttgaagattcctgtctctggatccaaatcagagggccttctctacgtccactcatccagaggtggcccctttcagaggtggcaccttgacgaggtctttttagagctcaaggatggtcagcagattcctgtgttcaagctcagtggggaaaacggtgatgaagtgaaaaaggagtagagacgacccagaagacccagcttgcttctagtccatccttccctcatctctaccatatggccactggggtggtggcccatctcagtgacagacactcctgcaacccagttttccagccaccagtgggatgatggtatgtgccagcacatggtaattttggtgtaattctaacttgggcacaacaaatgctatttgtcatttttaaactgaatccgaaagaaactcctattataaatttaagataatgtaatgtatttgaaagtgctttgtataaaaaagcacatgataaaaggaatcagaattaataaaatgtttgttgatc

SEQ ID NO: 507 - DNA, 1262 bp, HOMO SAPIENS
tgtgtcacttccggcctccctttagctgccatcttgcgtccccgcgtgtgtgcgcctaatctcaggtggtccacccgagaccccttgagcaccaaccctagtcccccgcgcggccccttattcgctccgacaaggtacaaaaaggctctggacggcggcgtggtaggaggacgggagcgggggcgggaagttccctgaaggagcgagacagggagggacagggcagaggaggagaggaaggcgatgcgacggacaggcgcacccgctcaggctgactctcgggggcgaggtcgagccaggggcggctgccctgggggcgaggcgacgctgtctcaacctccacctcgcggcggaacccgaggacaggagcctcagatgaaagaaacaatcatgaaccaggaaaaactcgccaaactgcaggcacaagtgcgcattggtgggaaaggaactgctcgcagaaagaagaaggtggttcatagaacagccacagcagatgacaaaaaacttcagttctccttaaagaagttaggggtaaacaatatctctggtattgaagaggtgaatatgtttacaaaccaaggaacagtgatccactttaacaaccctaaagttcaggcatctctggcagcgaacactttcaccattacaggccatgctgagacaaagcagctgacagaaatgctacccagcatcttaaaccagcttggtgcggatagtctgactagtttaaggagactggccgaagctctgcccaaacaatctgtggatggaaaagcaccacttgctactggagaggatgatgatgatgaagttccagatcttgtggagaattttgatgaggcttccaagaatgaggcaaactgaattgagtcaacttctgaagataaaacctgaagaagttactgggagctgctattttatattatgactgctttttaagaaatttttgtttatggatctgataaaatctagatctctaatatttttaagcccaagccccttggacactgcagctcttttcagtttttgcttatacacaattcattctttgcagctaattaagccgaagaagcctgggaatcaagtttgaaacaaagattaataaagttctttgcctagtatacagttttatttttttatttcattgacaccgatctgtacacagtaaaaaaaattgcttatagaaagctaatcatggcatgtaatatggctgataacctttggaatttgattaaagatttaaaatcacaaaaaaaaaaaaa

SEQ ID NO: 508 - DNA, 5656 bp, HOMO SAPIENS
aatgcgaaacgtaattaacccggaaaaaagagccgagggacgggagagaaggagggggcactgggggagaccagagcgaggggagcgagaggcgcggagagtttggcaggcagacccagaaatccctggagcgcggcggacccggcggccggaggggcgaccccgcccgatgtaacgcgccccgcccgagccccggcccctgcacggggggggtgatgtgagcagagcccaggaatgccttatgtggatcggcagaaccgaatctgtgggtttctggacatcgaggagcatgagaacagcggcaagtttctgcggaggtacttcattctggacacccaggctaactgcctcctctggtatatggacaacccccagaatctggcaatgggggcaggagctgttggagctttgcagctgacctacatctcgaaggtgagcatagctaccccaaaacagaaaccaaaaactccattttgctttgttatcaatgccctgtctcagagatatttccttcaagccaatgatcagaaagatatgaaggactgggttgaagccctgaaccaagccagcaagatcaccgttcccaaaggtgggggcctacccatgaccactgaagttctcaagagcttagcagctcctccagccctggagaagaagccacaggtggcctacaagacggagatcattggaggggtggtggtccacacacccatcagccagaacggtggggatgggcaggaagggagtgagcccgggtcccacaccatccttcgaaggtctcagagttacatccccacgtcaggctgccgtgcttccactgggcctcccctcattaagagtggttactgcgtgaagcaagggaatgtgcggaagagctggaaacgtcgcttctttgcacttgatgactttaccatctgctacttcaagtgtgagcaggaccgagaaccactgcgcaccatatttcttaaggatgttctgaagacccatgaatgtctggtcaagtctggtgatctcttaatgagggacaacctgtttgaaataataacaagctccaggaccttctacgtacaggcagacagtccagaagacatgcacagctggattaaggagattggcgcagctgtccaggccctcaagtgccaccccagagaaacgtccttttctagatccatttctttgacccgacctggaagctccagcctttcaagtgggcccaactctatcctgtgcagggggcggccacctttggaggaaaagaaagccctctgcaaagccccctctgtggcctcctcctggcagccctggacacctgtcccccaggctggggagaagctgcttccacctggagacacttcagaggactccttgttcacgcctcgtcctggggagggcagcgctcctggggtgctgcccagctcccggataaggcacagatcggagccccagcaccccaaggagaagccgtttatgttcaaccttgatgatgaaaacatacggacctctgatgtgtgatggagcacagtgccatgggagggagggagggagggaggacttgagagaaggaggctgtgactcagtttctctaccttgttggagggtagtcagaggcctttatgtcactcatattcctgtggatgctctttgggagggaggggcccatccagctgggctgtgtgtgtgtgtgtgtgtgtgtgtgtgtgtgtgtgtaatatcaacgcagtgtatttaatttggggaagtcactaggttagaactgtaggcatactcagtggagaggaagctacctattctattctaactattctgaggtcttcctggagagggattgttttagcagctcctctccagagggggctggaagtccagtttcaccaatgaccaagttttatttccttgtccttgttttagttttttcattttgttttcagtccaggtgcctcgcagctcttttggaatgggccagcattagtctaattttaagcgctatgtgttttgtacccttgcaaacttgctttctctttcttcttgctgttgccctttgaatgaagccttgtgtgcttgcatgatcagaccctgtaataggatgaatttccatgcacttaacatgaagagatacaaaaagaatctagagagagatatatatttttaatgaaatagaagcttggcatagaaacattgatttagatgttatgagttgctggccagagattcctcagataaaagagcctagaaaattgagttttgagcgggcatggtggctcacgcctgtaatgccagtagtttgggaggctgaggcgggtggatcacctgaggtcaggagttcgagatcagcctggccaacatggtgaaaccccgcctctactaaaaaatatgcaaaattagccgggcgtggtggtgcaggcctgtaatcccagctactcagaggctgaggcaggagattcacttgaacccaggaggtggaggttgcagtgagccaagatcgcgccattgcactccagtcagggcaacaagagtgaaactccgtctcaaaatataaaagaaaattgagtgtcccacccaaattttagggcgtacctccttccatttgataagaagatgctatttccagtgtccctgggagaattcttccatccagtttatatggtgaattgccaccagcgttccctaaaggaagagagaacttagcttatttctgtctgtgacttttatcagctagatcagttaattgtatttttaaattaaaaattagtaactagaggaagagactaagagaactatttttacctgagtaaatgctctcctcttcttgtgtccaaatctaatgcagaggtgaaaacacttgatgagaaaatcctttgtggcttgaggggaatcatgtttctttcaggacgtgttgtttccctgaagtctatgtcacactgagaactttttctgactgcactgctttggagctattcatttaaattgagtttggcctagttttcctggtataaaacaggaaatctacattgttccctctttctctcccttccatcccttcccctgcctttcctatacacgctggtgtgcttttgccctcagaaattcttggtttgggagttatgtatttttgagtgatcgaggttatgacatacttggagcggcatgatttcaagaagccattccaaattcttatagctccttagctctggttttactctcgtattttccccaagaaaattttttggctattcaaagaaagcacaaaatatgtgatgtggaactcatgaaaatagggacttttgatatctctttaaatattccctgactcacggaaaagatgtcctcttttggtgtatacattgtgaaaatctacccatttatctctctctctctcttttcttttaaataaattatctgataaggccggcaaggtggctcacgcctgtaatcccagcactttgggaggccgaggcgagcggatcacgaggtcaggagatcgagaccgcggtgaaaccccgtctctactaaaaatacgaaaaaaaaattagccgggcgcagtggcaggcgcctgtagtcccagctacttgggaggctgcggcaggagaatggtgtgaacctgggaggcggagcttgcagtgagccaagatcgcgccactgcactccagcctgggcgacagagcaagactccatctcaaaaaaaaaattatctgataggttactattgctaaattaattggccattataataagctgatttgtttcttattcagcaagatctcttttgagaatgtgacaaattaaacatacatagaatccatatggtattatcctgataaagggaaacgaggacactaagactgtcaaatggaaatcttcttgtcaattggcaaacacttgggaattccacattagagcattgcttgtttttaattttttttttttaatttttaaaagacagggtctcactctcttacccaggctagagtgcagtggtgtgatcatagttcatcataactttgaatctctgggcttaagcaatcctcccatgttagcttcccaagtagctaggactacagggttgtgctaccacgcctggctaatttttaatttttttttatctacagagcctggctatgttgcccaggctctctcaaactcctggcccaagtgatcctcctgccttggcctcctaaagtgttgggattacaggtgtgagccactgcacctagccagaacatcgttaatgtagttcaatatgagataaattattatcttcaatgaaacaagctctaaaagcattccattcctaaattgtatttcaaacttcctattttgttgatatttcttaacttctggccagttttggaccataatcttttaatgtgaaccaaagatggtacgtatttgaccaaagcagttagttttaaatgtataaaattgaaccaaatggaaaaaataggttggggatgcagtatagattagtgactaagtgcataggctctggagtaaatctgagtttttttttttttaaaggaactaaaaaatgtactgcattttctttgtggaataaaagccttgcctgagttgtgctattttcataaggcttttgaagtggtcttgacccactgtgtgtaacagtatttcaggtggtcctccccatggctgaataatgccatccattattctttaatttttatttttagaaacagtgtttcactctgtcacccaggctggagtgcagtggcctgatcatggctcactgcagcctggacctcctgggctcaagtgatcttcctgcctcacagcctcccaaagtactcagattataggtgtgagccaccacgcctggccaccatctattacttttgaaatcttcaaaagacttgcttactcaatgtcagctgatggttggtaaaaataatttggcctttagtgttaagtgagacatcataagggtattgaggtatacattatggagattgatgtcaggtcagaatattggagttatacatctatttctgagttgaatactcagctcccacgagaaagaaagtagttttaaggtccagcttcttagtctacttgaagcaaattttttttcttttatatttctgaatataaatatactcttatatgggctaaaaagaccccatgaataaatagcaggttcagtagttgaggagtggagtttagtaggtttgttttcagtataaattagataacatgtggaggtcacagcattttggaaattgagtgtccccaagtgagctttgtttataaactttcaaaatgtcggaagtggacaggtttgttaaatcttgtctgccagcacccttttcttcctttgttccttttcctctctgtgttattgcctgcggcagccagtccttcatactagatagagttcagataaagcaaacgtttggcaaaaacatactgtttgacctcctccccctctgcttatgaaggggtagcatgattctgtgttttaaagcagtgatgtttcagctgtgaaatgcactcgctgtaagctctaggctgagtgcatggaaactgttacgcttctcattttatgtgatctcctaattggtatgtagcaaaaattttctaaaactgttttgtggcttgttttgtaataaaaccatgtgaaatactgaaaaaaaaaaaaaaaaaa

SEQ ID NO: 509 - DNA, 1688 bp, HOMO SAPIENS
cgggatttagatcacgtcccgcaggccggcggaagtagctgatactctcattggttgcaaaaccttgatctgtgaaagcgggcgttttggaagataccggaagtagagtcacggagaggtattaagaaatggagagaaaaataagcagaatccaccttgtttctgaacccagtataactcattttctacaagtatcttgggagaaaacactggaatctggttttgttattacacttactgatggtcattcagcatggactgggacagtttctgaatcagagatttcccaagaagctgatgacatggcaatggaaaaagggaaatatgttggtgaactgagaaaagcattgttgtcaggagcaggaccagctgatgtatacacgtttaatttttctaaagagtcttgttatttcttctttgagaaaaacctgaaagatgtctcattcagacttggttccttcaacctagagaaagttgaaaacccagctgaagtcattagagaacttatttgttattgcttggacaccattgcagaaaatcaagccaaaaatgagcacctgcagaaagaaaatgaaaggcttctgagagattggaatgatgttcaaggacgatttgaaaaatgtgtgagtgctaaggaagctttggagactgatctttataagcggtttattctggtgttgaatgagaagaaaacaaaaatcagaagtttgcataataaattattaaatgcagctcaagaacgagaaaaggacatcaaacaagaaggggaaactgcaatctgttctgaaatgactgctgaccgagatccagtctatgatgagagtactgatgaggaaagtgaaaaccaaactgatctctctgggttggcttcagctgctgtaagtaaagatgattccattatttcaagtcttgatgtcactgatattgcaccaagtagaaaaaggagacagcgaatgcaaagaaatcttgggacagaacctaaaatggctcctcaggagaatcagcttcaagaaaaggaaaagcctgattcttcactacctgagacgtctaaaaaggagcacatctcagctgaaaacatgtctttagaaactctgagaaacagcagcccagaagacctctttgatgagatttaacagtctcaaaaaatactttgatgttcactagactatgttttctattcatttctttaaaatgaaaaaggagaatttcaagtcagcagccgctattaccgtatcttacaatttaattacatacacagtgaattgaaaccattgtgcaaaatggattacacatgtatacaaagatacgatttgatgatgacactggcacattattctaaactattcattcagcatgcctataattacataaattgtatgagactttttgttgcaaaggacacatttatcatattcattcacacatattatatgtgatagctgtccaacatcctgtctgggaagattttgaaaacaggacaaagaaaacatcattttaaaatgtcttcagctttttttgaatagacgtattcaaacatattctgaacattgatgtttgaacattttaatttgtgtgatgatgtagaaaatataattttagtttgtacataaacattgtgaaaatctgataataaaatttttgatacattgaaaaaaaaaaaaaaaaaaaaaaaaaaaaaaaaaaaaaaa

SEQ ID NO: 510 - DNA, 2019 bp, HOMO SAPIENS
acacaacacctcagaggcagggagggcggggccggcagggggacctgctgctggaagagcagcggcccgagccggggccatggcgaagctgctgagctgcgtcctaggcccccggctctacaaaatctaccgggagagggactctgaaagggccccggccagcgtccctgagacgccaacggcagtcactgccccccattccagctcctgggatacgtactatcagccccgtgccctggagaaacatgctgacagcatcctggcactggcttcagtattctggtccatctcttattactcctctcccttcgccttcttctacttgtacaggaaaggttacttgagtttgtccaaagtggtgccgttttctcactatgctgggacattgctgctacttctggcaggtgtggcctgcctccgaggcattggccgctggaccaacccccagtaccggcagttcatcaccatcttggaagcaacacatcggaaccagtcttcagaaaacaagaggcagcttgccaactacaactttgacttccggagctggccagtcgacttccactgggaagaacccagcagccggaaggagtctcgagggggcccttcccgccggggtgtggccctgcttcgcccagagcccctgcaccgggggacagcagacaccctcctcaaccgggttaagaagctgccttgtcagatcaccagctacctggtggcgcacaccctagggcgccggatgctgtatccaggctctgtgtacctgctgcagaaggccctcatgcctgtgctgctgcagggccaggcccgactggtggaagagtgtaatgggcgccgggcaaagctgctggcctgtgatggcaatgagattgacaccatgtttgtggaccggcgggggacagctgagccccagggacagaagctggtgatctgctgtgaggggaatgctgggttttatgaggtgggctgcgtctccacgcccctggaagctggatattcagtcctgggctggaatcatccaggctttgctggaagcacgggggtgccattcccgcagaatgaggctaatgccatggatgtggtggtccagtttgccatccaccgcctaggcttccagccccaggacatcatcatctacgcctggtccatcggcggcttcactgccacgtgggcagccatgtcctacccagatgttagtgccatgatcctggatgcctcctttgatgacctggtgcccttggccttgaaggtcatgccagacagctggaggggcctggtgaccaggaccgtgaggcagcatctcaatctaaacaacgcggagcagctgtgcagataccagggtcctgtactgctgatccggagaaccaaggatgagatcatcaccaccacggttcctgaggacatcatgtccaaccgaggcaatgacctcctgctgaagctcctgcagcatcggtatccccgggtgatggcagaggagggtcttcgagtggtgaggcagtggttggaggcctcctcacagctggaggaagcctcaatttatagccgatgggaggtggaagaggactggtgtctgtctgtcctccgctcctaccaggcagaacacgggcccgacttcccctggagcgtgggggaggacatgagtgcagatggacggcggcagctggctttgtttctggctcggaagcatctgcacaactttgaggccactcactgcaccccactcccagcccagaacttccagatgccctggcacctctagggaccaactgggactcattatggaagaatggggtgagaggagacatgaggaaagaccctcttatttgtgattctctgtgttcatgttgctgtttatagtttgtggaaagtgggggaccatcccccttctcaccactgttcctcttgcacgtttcccctcattcatgtggctgtacttaaccttctccaacatacatcctgcattacatgaatggattattcctaataattaataaaaaggtattttttctactatcaggctaa

SEQ ID NO: 511 - DNA, 4517 bp, HOMO SAPIENS
agattaacgcaaacccggaagcggatcgggtggagtgtaggtcatatcgccgcgttgactagataacgaaggacaatgcatatatacaaaattgctgtattgcctggtgatatgcagctgtacctgtgacatcataattgcaccctccgacatgatatctcttccaaatgcttgatgaaaaaggtgggaggatcacttgagccagggagttgaaggctgcagtgagccctgtttttgccaccacactccagcttgggattgattcctaaagactcatgttacgtgaggaagcagctcagaagaggaaaggaaaggagccaggcatggctcttcctcagggacgcttgactttccgggatgtggctatagaattctcattggcagagtggaaatgcctgaacccttcacagagggctttgtacagggaagtgatgttggagaactacaggaacctggaggctgtggatatctcttccaaatgcatgatgaaggaggtcttgtcaacagggcaaggcaatacagaagtgatccacacagggacattgcaaagacatgaaagtcatcacattggagatttttgcttccaggaaattgagaaagaaattcatgacattgagtttcagtgtcaagaagatgaaagaaatggccttgaagcacccatgacaaaaataaaaaagttgactggtagcacagaccaacatgatcacaggcatgctggaaacaagcctattaaagatcagcttggatcaagcttttattcacatctgcctgaactccacatatttcagatcaaaggtgaaattggtaatcaacttgagaagtctactaatgatgctccctcagtttcaacattccaaagaatttcctgtaggccccaaacccagatttctaataactatgggaataatcccctgaattcttcattactcccacaaaaacaggaagtacacatgagagaaaaatctttccaatgtaataagagtggcaaagcctttaattgtagctcactcttaaggaaacaccagataccccatttaggagacaaacaatataaatgtgatgtatgtggcaagctctttaatcacgagcaataccttgcatgccatgatagatgtcacactgttgagaaaccttacaagtgtaaagagtgtggcaagaccttcagtcaggagtcatcccttacctgccatcgtagacttcatactggagtaaaacgttacaattgtaatgagtgtggcaagatctttggtcaaaattcagcccttctaattgataaggcaattgatactggagaaaatccttacaagtgtaatgaatgtgacaaggcttttaatcaacaatcacaactttcacatcatagaattcatactggagagaaaccttacaaatgtgaagaatgtgacaaagttttcagtcggaaatcaaccattgagacacataagagaattcatactggagagaaaccatacagatgtaaggtttgtgacacagctttcacgtggcattcacagctggctcgacatagaagaattcatactgcaaagaaaacttataaatgtaatgagtgtggcaagaccttcagtcacaagtcatcccttgtatgccatcatagacttcatggtggagagaaatcttacaaatgtaaggtttgtgacaaggcttttgtgtggagttcacaactggcaaaacatactagaattgactgtggagaaaaaccttacaagtgtaatgaatgtgggaagacctttggtcaaaattcagatcttttaattcataagtcaattcatactggggagcaaccttacaaatgtgatgaatgtgaaaaggttttcagtcgtaaatcaagccttgagacacataagataggtcatactggagagaaaccatacaaatgtaaggtttgtgacaaggcttttgcgtgtcattcctatctggcaaaacatactagaattcatagtggagagaaaccttacaagtgtaatgagtgcagcaagaccttcagtcacaggtcataccttgtatgccatcatagagttcatagtggtgagaaaccttacaagtgtaatgagtgcagcaagaccttcagtcgcaggtcatcccttcattgccatcgtagacttcatagtggtgagaaaccttacaagtgtaatgagtgtggcaataccttccgtcactgctcatcccttatataccatcgtagacttcatactggagagaaatcttacaaatgtacaatttgtgacaaggctttcgtgcgtaattcactcctgtcaagacataccagaattcacactgcagagaaaccttacaagtgtaatgaatgtgggaaggcttttaatcaacaatcacacctttcacgtcatcatagaattcatactggagagaaaccttagaaatgtgaagcatgtgacaaagtttccatttggaaatcacaccttaaagacataggagaatttatactggagagaaagcttacaaatgtaaggtttctgacaagacttgggagtgattcacacctggaacaacatactggacttcacactggagagaaaccttacaagtgtaatgagtgtggcaaagcctttggcaagcagtcaacacttattcaccatcaggcaattcatggtgtagggaaacttgactaatgtaatgattgtcacaaagtcttcagtaatgctacaacgattacaaatcattggagaatccataatgaagagagatcttacaagtgtaataaatgtggcaaatttttcagagatcgttcacatattgcaggtcatcggtgaactcatactggagagaaaccttacaaatgtcatgactgtgccaaggtcttcagtcaagcttcatcctatgcaaaacataggagaatttatacaggagagaaacctcacaagtgtgatgattgtggcaaagcctttgcttcacgttcacacgtcattagacatcagagaatctatactggacagaaatcttacaaatgtcatcagtgtggcaaggtcttcagtccaagatcactccatgcagaacatcagaaaattcatttttgagataaccgttcccaatgaaatgagtatagcaaaccatcaagcattaattgacattggagtcaattcagcattgacttgagtttgtgttgacttaacattgagttcaagcctttattgacattcaagtgtttatgttaagaggatggggccaggtgtggtggctccgacctgtaatcccagcacgtcgggaggccaaggcacataggtcacttgaggtcaggagtttgaaaccagcatggccaacagatgtgagccacttttctcagcctgttttttgtttcttattttctattatttttttgagccagtactttttaaagagatagtacttttttcagttagtactttttgaaagggatatatcatagtaatttttaaaagggatatgaggccaggcacggaggctcatgcctataatcccagcactttgggaggccgaggcaggcagatcacggggtcaggagatcgagactttcctggctaacagggtgaatccctgtctctactaaaaatacaaaaaattagctgggcatggtggctggcgcctgtagtcccagctactccagatgctgaggcaggagaatggcatgaacctgtgaggcggagcttgcagggagtcgagatcgcaccactgggctccagcctgggcgacagagtgagagtctatctcaaaaaaaaaaaaaaaaaaaaggatatcaaagcctcggtacgtggtggctcatccctgcaatcagagtactttggtcgacccatgtgaactggtcacctaaggtcacaatttcaaaagcaccctaacatggtgaaaccccatctctactaaaaatacaaaagttagccgggggtgttggtgtgcacctttagttccagctacttgggaggctggggcatgagaattgcttaaacctaggaggtagaagttgcagtgaaccaaaattgtgccactatactgcagcctgggtggcagagtgagtctccatctcaaacaaacaaaaaataacaaaaaaagacctcaaaaatgcttttcttctcgtataatggacttccttctttttctttctggttcctcttcatttctctctttattttttatttatttatttatttattttgcagtttgagtttgagataaatctaagttataaaagttgtatttcttaatacataatgacttctgaaagatgcctttgcagcatcctataatcagctcacatcattcgtttctgtacttgtatattttccagttattttccggttgaccccagaattcgttagatttttttaaaaaacaatttcaaaatagttgctgttttaaattagttgcatccagttcatatcaatgtctgcatgctttctagtctttgttatttattgaaaacctttggtacctaaacttaagtttgattgtttcagtgtgtacttggtaaatatgtcagtggccttttaactaaacatcaaaatgtactttaa

SEQ ID NO: 512 - DNA, 2262 bp, HOMO SAPIENS
gtgaggctgcgcttgcccggggcccgcgcccccctaccccggggaccgcccccgggccgcccgccccacttggcgcgccacttccgcgtgcatggccctgctgccccgagccctgagcgccggcgcgggaccgagctggcggcgggcggcgcgcgccttccgaggcttcctgctgcttctgcccgagcccgcggccctcacgcgcgccctctcccgtgccatggcctgcaggcaggagccgcagccgcagggcccgccgcccgctgctggcgccgtggcctcctatgactacctggtgatcgggggcggctcgggcgggctggccagcgcgcgcagggcggccgagctgggtgccagggccgccgtggtggagagccacaagctgggtggcacttgcgtgaatgttggatgtgtacccaaaaaggtaatgtggaacacagctgtccactctgaattcatgcatgatcatgctgattatggctttccaagttgtgagggtaaattcaattggcgtgttattaaggaaaagcgggatgcctatgtgagccgcctgaatgccatctatcaaaacaatctcaccaagtcccatatagaaatcatccgtggccatgcagccttcacgagtgatcccaagcccacaatagaggtcagtgggaaaaagtacaccgccccacacatcctgatcgccacaggtggtatgccctccacccctcatgagagccagatccccggtgccagcttaggaataaccagcgatggattttttcagctggaagaattgcccggccgcagcgtcattgttggtgcaggttacattgctgtggagatggcagggatcctgtcagccctgggttctaagacatcactgatgatacggcatgataaggtacttagaagttttgattcaatgatcagcaccaactgcacggaggagctggagaacgctggcgtggaggtgctgaagttctcccaggtcaaggaggttaaaaagactttgtcgggcttggaagtcagcatggttactgcagttcccggtaggctaccagtcatgaccatgattccagatgttgactgcctgctctgggccattgggcgggtcccgaataccaaggacctgagtttaaacaaactggggattcaaaccgatgacaagggtcatatcatcgtagacgaattccagaataccaacgtcaaaggcatctatgcagttggggatgtatgtggaaaagctcttcttactccagttgcaatagctgctggccgaaaacttgcccatcgactttttgaatataaggaagattccaaattagattataacaacatcccaactgtggtcttcagccacccccctattgggacagtgggactcacggaagatgaagccattcataaatatggaatagaaaatgtgaagacctattcaacgagctttaccccgatgtatcacgcagttaccaaaaggaaaacaaaatgtgtgatgaaaatggtctgtgctaacaaggaagaaaaggtggttgggatccatatgcagggacttgggtgtgatgaaatgctgcagggttttgctgttgcagtgaagatgggagcaacgaaggcagactttgacaacacagtcgccattcaccctacctcttcagaagagctggtcacacttcgttgagaaccaggagacacgtgtggcgggcagtgggacccatagatcttctgaaatgaaacaaataatcacattgacttactgtttgagttttatgtatttctttattttaatcaggatcttctgatagtggaaatttttagtacataatagaacttatttatggagttagaaatttgtagtgttatccaggattgattttcatttgatcacatctcacagtaattaatattttcaagttttttttttattaacagctctgtgctagttttttttttctgttttagcctcatcccaaatataaagctttgtgaagtacaattaacttaatgtacttgaatgaatagaacttgctactttttttttttttttttttgagacagagttttgctctcattgcccaggctggagtgcggtggtgctatttcagctcaccacaacctctgcctcctgggttcaagtgattctcctgccttagcctcccgaatagctggaattacaggcacgcaccaccatgcctgactaattttgtatttttagtagacatggggtttctccatgttggtcaggctggtctcaaactcccaccttcaggtgatccgcccacc

SEQ ID NO: 513 - DNA, 1599 bp, HOMO SAPIENS
tctgccccaccctgtcctctggaacctctgcgagatttagaggaaagaaccagttttcaggcggattgcctcagatcacactatctccacttgcccagccctgtggaagattagcggccatgtattccaatgtgataggaactgtaacctctggaaaaaggaaggtttatcttttgtccttgctgctcattggcttctgggactgcgtgacctgtcacgggagccctgtggacatctgcacagccaagccgcgggacattcccatgaatcccatgtgcatttaccgctccccggagaagaaggcaactgaggatgagggctcagaacagaagatcccggaggccaccaaccggcgtgtctgggaactgtccaaggccaattcccgctttgctaccactttctatcagcacctggcagattccaagaatgacaatgataacattttcctgtcacccctgagtatctccacggcttttgctatgaccaagctgggtgcctgtaatgacaccctccagcaactgatggaggtatttaagtttgacaccatatctgagaaaacatctgatcagatccacttcttctttgccaaactgaactgccgactctatcgaaaagccaacaaatcctccaagttagtatcagccaatcgcctttttggagacaaatcccttaccttcaatgagacctaccaggacatcagtgagttggtatatggagccaagctccagcccctggacttcaaggaaaatgcagagcaatccagagcggccatcaacaaatgggtgtccaataagaccgaaggccgaatcaccgatgtcattccctcggaagccatcaatgagctcactgttctggtgctggttaacaccatttacttcaagggcctgtggaagtcaaagttcagccctgagaacacaaggaaggaactgttctacaaggctgatggagagtcgtgttcagcatctatgatgtaccaggaaggcaagttccgttatcggcgcgtggctgaaggcacccaggtgcttgagttgcccttcaaaggtgatgacatcaccatggtcctcatcttgcccaagcctgagaagagcctggccaaggtagagaaggaactcaccccagaggtgctgcaagagtggctggatgaattggaggagatgatgctggtggtccacatgccccgcttccgcattgaggacggcttcagtttgaaggagcagctgcaagacatgggccttgtcgatctgttcagccctgaaaagtccaaactcccaggtattgttgcagaaggccgagatgacctctatgtctcagatgcattccataaggcatttcttgaggtaaatgaagaaggcagtgaagcagctgcaagtaccgctgttgtgattgctggccgttcgctaaaccccaacagggtgactttcaaggccaacaggcctttcctggtttttataagagaagttcctctgaacactattatcttcatgggcagagtagccaacccttgtgttaagtaaaatgttcttattctttgcacctcttcctatttttggtttgtgaacagaagtaaaaataaatacaaactacttccatctcacatta

SEQ ID NO: 514 - DNA, 191 bp, HOMO SAPIENS
tcccatccttgtctacctaattaggctttgtgtaactcagtgttgcaaagctttgacatctgtttgagttaatgtttatatatgttgttacttaagggtttcacattaaatttaaacatacttatattttataaccaaacaagtcatgttggggcatactcattaggattgagtgctttcttacaccaaaa

SEQ ID NO: 515 - DNA, 1428 bp, HOMO SAPIENS
gcccgcgcttccgtatcgctcctcgtaggccggggctcggcgcgcgcacccgcactaaagacgcttcttcccggcgggtaggaatcccgccggcgagccgaacagttccccgagcgcagcccgcggaccaccacccggccgcacgggccgcttttgtcccccgcccgccgcttctgtccgagaggccgcccgcgaggcgcatcctgaccgcgagcgtcgggtcccagagccgggcgcggctggggcccgaggctagcatctctcgggagccgcaaggcgagagctgcaaagtttaattagacacttcagaattttgatcacctaatgttgatttcagatgtaaaagtcaagagaagactctaaaaatagcaaagatgcttttgagccagaatgccttcatcttcagatcacttaatttggttctcatggtgtatatcagcctcgtgtttggtatttcatatgattcgcctgattacacagatgaatcttgcactttcaagatatcattgcgaaatttccggtccatcttatcatgggaattaaaaaaccactccattgtaccaactcactatacattgctgtatacaatcatgagtaaaccagaagatttgaaggtggttaagaactgtgcaaataccacaagatcattttgtgacctcacagatgagtggagaagcacacacgaggcctatgtcaccgtcctagaaggattcagcgggaacacaacgttgttcagttgctcacacaatttctggctggccatagacatgtcttttgaaccaccagagtttgagattgttggttttaccaaccacattaatgtgatggtgaaatttccatctattgttgaggaagaattacagtttgatttatctctcgtcattgaagaacagtcagagggaattgttaagaagcataaacccgaaataaaaggaaacatgagtggaaatttcacctatatcattgacaagttaattccaaacacgaactactgtgtatctgtttatttagagcacagtgatgagcaagcagtaataaagtctcccttaaaatgcaccctccttccacctggccaggaatcagaatcagcagaatctgccaaaataggaggaataattactgtgtttttgatagcattggtcttgacaagcaccatagtgacactgaaatggattggttatatatgcttaagaaatagcctccccaaagtcttgaggcaaggtctcgctaagggctggaatgcagtggctattcacaggtgcagtcataatgcactacagtctgaaactcctgagctcaaacagtcgtcctgcctaagcttccccagtagctgggattacaagcgtgcatccctgtgccccagtgattaagttttattatgtagaaaataaagagcaaacagtacagctgaaaaaaaaaaaaaaaaaa

SEQ ID NO: 516 - DNA, 2696 bp, HOMO SAPIENS
gcagcgggcctggctgcagatgcggtggtggccgccgagcgcctggaaggagctgctggacaggccgagggagcctccgcccgagaccgcgcagccgccgccgccatggctacaaaagaccccacagctgtagagagagcaaacttgttaaacatggctaaactgagtatcaaaggactcattgaatctgctctgagctttggccgcactttggattctgactatccccccttgcagcaattctttgttgttatggaacattgcctgaaacacggtcttaaagtaagaaaatcatttttgagttacaacaaaaccatctggggccctttggaactggtggagaagctgtaccccgaagcagaggaaataggagctagtgtccgggatctacctggtctgaatgagttttatgagtatcacgcactaatgatggaagaagaaggagcagtaattgttgggctgctggttggcctgaatgtgatcgatgctaatctgtgtgtgaagggagaggatttagactcacaagttggagtgattgatttttctatgtatttaaagaatgaagaagatattggaaataaagaaaggaatgttcaaattgctgccatattagaccaaaagaattatgttgaagaattaaatagacaactgaacagcacagtcagcagcctccattcaagagttgattcattagaaaagtcaaatactaagctgattgaagagttagcaatagcaaagaataacatcattaaactccaggaagaaaatcatcaattacgaagtgaaaataaattgattttaatgaaaacacagcagcacctagaggttaccaaagtagatgtggaaactgagcttcaaacatataagcattctcgtcaggggctagatgaaatgtacaatgaagccagaaggcagcttcgagatgaatctcagttacgacaggatgtagagaatgagctagcagtacaagttagtatgaagcatgagattgaacttgccatgaagttgctggagaaagatatccatgagaaacaagatactctgataggccttcgacaacaactagaggaagttaaagcaattaacatagagatgtatcaaaagttgcagggttctgaagatggcttgaaagaaaaaaatgaaataattgcccgactagaagaaaaaaccaataaaattactgcagccatgaggcagctggaacaaagtgacaacgatttgttaactcaaactaggacaattgcaatgtcattggtgaaatgtgccagcagtgacacgcaggaccagtacaagctggttaaagatatatctttctgaagaccacttgtatttaaacagactaaatgaaaagagaatcaacaattttataatatattaaatagaaaggaatctaaatgctattaaatattctaaaaggatgttaggaaccctgtacatttcttggtcagctgctgtggtaatacactgccatcaagcagagtgggtgcacttggatttccagacatacgttcctcaaaccttgtgcacaaagggtgatttgagtattgaccctttggaggtcaggattttcaaatgcagttttatctttttagctactttttgatgaaaaatataaagattgtttaaaaataacttaaccttcagttttatactgtgttggcacagatatttttttctcattggcccactctttgcccaatggctcccttacagatttttacatatgctttaaaataatttataacccagactggccaacaccctgtgcttcagcttctcagttttccggttctcccttgccctcttctgtgatagcacaacttcaaggcctacctcactctgacttctattttcctttttgtaaccttagagaaaagcttgggtccaatcccagcacctgaatattttaatttaaacttggatttggagataacttaaatgttactctcccttccttggaagcagcatttatacccctgaaatatgtgagggttgctccattggtatggttttaaggaagaaaggaagaggaagagttttttagttagttgaaccgaaatttctcttgtgatttcctgcaaggagttaatatcctttgaatcttggtaaatattttcttataaaaatattgaagttaaatacaagaaatcctagatggccaaagaaggcagggagtggagctaagcacaggaaaatgcaacgacttacaaataaaaacaggaaagatgaaaatcacaatgttttagctaatttttaatattaaatggtgaggaacaaaaatgatctctagcaaatgatgccaactggcaccaaattctttttgaatcttaaacatatatgcacacgtgcacacacacacacacacagagcttcggcataatttagtaaatgcataaagatgccgtaagaaggacttggctatcatttggagtaattgcaggtctttgctcttggccttgtagcacacttgattcctggcatacacatcctagcataacatataacagtgtggcttcttcacctagtgtaggcataaatcctttgcttttcatggttttgtaaaaaggtagtaacatacctattatgctttgaaatttgattcgttatgctctgcataagtggtaaaggctgtattgctttgcactgttaattatgaacaagaaataaaacaaatttgaagatagtaaaaaaaaaaa

SEQ ID NO: 517 - DNA, 4454 bp, HOMO SAPIENS
agcgctgagctgcaggcgcggcgaaacttccctctacccgcccggcccgcggcgcgcaccgttggcgctggacgcttcctccttggaagcgcctctccctcagttatggagaaaacttgtatagatgcacttcctcttactatgaattcttcagaaaagcaagagactgtatgtatttttggaactggtgattttggaagatcactgggattgaaaatgctccagtgtggttattctgttgtttttggaagtcgaaacccccagaagaccaccctactgcccagtggtgcagaagtcttgagctattcagaagcagccaagaagtctggcatcataatcatagcaatccacagagagcattatgattttctcacagaattaactgaggttctcaatggaaaaatattggtagacatcagcaacaacctcaaaatcaatcaatatccagaatctaatgcagagtaccttgctcatttggtgccaggagcccacgtggtaaaagcatttaacaccatctcagcctgggctctccagtcaggagcactggatgcaagtcggcaggtgtttgtgtgtggaaatgacagcaaagccaagcaaagagtgatggatattgttcgtaatcttggacttactccaatggatcaaggatcactcatggcagccaaagaaattgaaaagtaccccctgcagctatttccaatgtggaggttccccttctatttgtctgctgtgctgtgtgtcttcttgtttttctattgtgttataagagacgtaatctacccttatgtttatgaaaagaaagataatacatttcgtatggctatttccattccaaatcgtatctttccaataacagcacttacactgcttgctttggtttacctccctggtgttattgctgccattctacaactgtaccgaggcacaaaataccgtcgattcccagactggcttgaccactggatgctttgccgaaagcagcttggcttggtagctctgggatttgccttccttcatgtcctctacacacttgtgattcctattcgatattatgtacgatggagattgggaaacttaaccgttacccaggcaatactcaagaaggagaatccatttagcacctcctcagcctggctcagtgattcatatgtggctttgggaatacttgggttttttctgtttgtactcttgggaatcacttctttgccatctgttagcaatgcagtcaactggagagagttccgatttgtccagtccaaactgggttatttgaccctgatcttgtgtacagcccacaccctggtgtacggtgggaagagattcctcagcccttcaaatctcagatggtatcttcctgcagcctacgtgttagggcttatcattccttgcactgtgctggtgatcaagtttgtcctaatcatgccatgtgtagacaacacccttacaaggatccgccagggctgggaaaggaactcaaaacactagaaaaagcattgaatggaaaatcaatatttaaaacaaagttcaatttagctggatttctgaactatggttttgaatgtttaaagaagaatgatgggtacagttaggaaagtttttttcttacaccgtgactgagggaaacattgcttgtctttgagaaattgactgacatactggaagagaacaccattttatctcaggttagtgaagaatcagtgcaggtccctgactcttattttcccagaggccatggagctgagattgagactagccttgtggtttcacactaaagagtttccttgttatgggcaacatgcatgacctaatgtcttgcaaaatccaatagaagtattgcagcttccttctctggctcaagggctgagttaagtgaaaggaaaaacagcacaatggtgaccactgataaaggctttattaggtatatctgaggaagtgggtcacatgaaatgtaaaaagggaatgaggtttttgttgttttttggaagtaaaggcaaacataaatattaccatgatgaattctagtgaaatgaccccttgactttgcttttcttaatacagatatttactgagaggaactatttttataacacaagaaaaatttacaattgattaaaagtatccatgtcttggatacatacgtatctatagagctggcatgtaattcttcctctataaagaataggtataggaaagactgaataaaaatggagggatatccccttggatttcacttgcattgtgcaataagcaaagaagggttgataaaagttcttgatcaaaaagttcaaagaaaccagaattttagacagcaagctaaataaatattgtaaaattgcactatattaggttaagtattatttaggtattataatatgctttgtaaattttatattccaaatattgctcaatatttttcatctattaaattaatttctagtgtaaataagtagcttctatatctgtcttagtctattataattgtaaggagtaaaattaaatgaatagtctgcaggtataaatttgaacaatgcatagatgatcgaaaattacggaaaatcatagggcagagaggtgtgaagattcatcattatgtgaaatttggatctttctcaaatccttgctgaaatttaggatggttctcactgtttttctgtgctgatagtaccctttccaaggtgaccttcagggggattaaccttcctagctcaagcaatgagctaaaaggagccttatgcatgatcttcccacatatcaaaataactaaaaggcactgagtttggcatttttctgcctgctctgctaagacctttttttttttttactttcattataacatattatacatgacattatacaaaaatgattaaaatatattaaaacaacatcaacaatccaggatatttttctataaaactttttaaaaataattgtatctatatattcaattttacatcctttttcaaaggctttgtttttctaaaggctttgttttcctttttattatttttttcttttttatttttttgagacagtcttgctctgtcgctcaggctggagtgcagtggcacgatctcagctcactgcaacctcctcctcccaggttcaagtgattcttgttcatcagcctcccgagtagctgggactacaggcatgtgccactatgcccagctaatttttgtacttttagtagagacagggtttcaccacattggtcaggctggtcttgaaatgctggcgtcaagtgatctgcctgcctccgcctcacaaagcactgggattacaggcatgaatctggccttacgtaatatattttcttaatggctgcataatatcacatcaaataggcatttttcaaacctctttccttattaaacatgtagactatatccattttttactaaaataaataacatttcagataatatctttgcactgataatgttgccaagccatttctaaagtgaccttatcaatttaattaccattggatgagggtgttgctttcatcgcaccattgtagattgtcttttttatttcaatttgcgtttatttataactggttgcaaaggtacacagaacacacgctccttcaacttatctttgataaacccaagcaaggatacaaaaagttggacgacattgagtagagtcatggtatacggtgctgaccctacagtatcagtggaaaagataaggaaaatgtcactactcacctatgttatgcaaaacagttaggtgtgctggggctggatactgctcttttacttgagcattggttgattaaagtttaggtaccatccaggctggtctagagaagtctttggagttaaccatgctctttttgttaaagaagagagtaatgtgtttatcctggctcatagtccgtcaccgaaaatagaaaatgccatccataggtaaaatgctgacctatagaaaaaaatgaactctacttttatagcctagtaaaaatgctctacctgagtagttaaaagcaattcatgaagcctgaagctaaagagcactctgatggttttggcataatagctgcatttccagacctgacctttggccccaaccacaagtgctccaagccccaccagctgaccaaagaaagcccaagttctccttctgtccttcccacaacctccctgctcccaaaactatgaaattaatttgaccatattaacacagctgactcctccagtttacttaaggtagaaagaatgagtttacaacagatgaaaataagtgctttgggcgaactgtattccttttaacagatccaaactattttacatttaaaaaaaaagttaaactaaacttctttactgctgatatgtttcctgtattctagaaaaatttttacactttcacattatttttgtacactttccccatgttaagggatgatggcttttataaatgtgtattcattaaatgttactttaaaaata

SEQ ID NO: 518 - DNA, 4213 bp, HOMO SAPIENS
cttcctctctcttctagcggcccgccctccctcctccctctccctcccctccccactcccttcccctcctctccaggcctgcgcgcgcgcctcttcctccggcacgcgccgctgctagccgagcactctcgccagaacctctggctcgcgcgtgccttttcccctcaggttgtggggagagcggaatcctgctccgccgtcgcagcagcagcggcagccccggcagcctcgggcgacagcggcggcgcgcgagcccccgggcggaccgtaccaccgctcgccagcacgcagggggagccgcccgtctcgccgcgcacgcctcggcgaccccgcggggctgaggcgtcgccgcgcccggcagcgtgagcgcagagccggcctcgaccccgagctcggagccccgcgggccgcgcccgccgccggccccacccatccgggtcgaggaggccgaggccatggctgagacggaggagcggagcctggacaacttctttgccaagagggacaagaagaagaagaaggagcggagcaaccgggcggcgagtgccgcgggcgcagcgggcagcgccggcggaagcagtggagccgcgggtgcggcgggcggcggggcgggcgcggggacccggccgggtgacggcgggaccgccagcgcgggggctgcgggcccaggggccgccaccaaggctgtgacgaaggacgaagatgaatggaaagaattggagcaaaaagaggttgattacagcggcctcagggttcaggcaatgcaaataagcagtgaaaaggaagaagacgataatgaaaagagacaagatccaggtgataactgggaagaaggtggaggtggtggtggaggtatggaaaaatcttcaggtccctggaataaaacagctccagtacaagcacctcctgctccagtaattgttacagaaaccccagaaccagcgatgactagtggtgtgtataggcctcctggggccaggttaaccacaacaaggaaaacaccacaaggaccaccagaaatctacagtgatacacagttcccatccctgcagtcaactgccaagcatgtagaaagccggaacaggtacttaaaatgaatgctacctggaattaaatgactacatatggcacatctacatcttactttagggacatgaattttttaaaataaataaaatgggaagaaatgtaaatgacatcagatggaaatgtgttttttggggtggcttttagaataaatcccagccttttcaccactttgagagcacagctggcttgaatttaaacctccacgtggacttgctcctctgctctgtcttaaaaaatgtgtaagggaccttgggagggcagtgattcaccacactcgagtttctttacctgatctaatcagatccactcccacaaaatcgatgtgaggagaaatcattgactaatgagtagaatttacttgaatgagaaaattgttacccttgtgcataaagagagagatgtattatctattacttgctaaaagtaagagtcttaggaggaatgtcattacacagcttttaacagttttcttcaagtttgtcctgaaatagggtcacagttaatactgttcagtagaagataggaccctagagcttcaatacagcgttctgtgttttctgtttgaattgaagccttaaaatggtttgataaggattttctatatgcctccactcctacccctccccaggattcttctaaggggtggcttttttttaaattcaaggacgaatattttcaaaaaccctagtgaagaagaaatatttactgattacatttcttttcccttagggataaagaaatggagaagagctttgaagtagtaagacacaaaaatagaggtagggatgaggtttcaaaaaaccaggcccttaaacttcagctagacaaccaatatgctgtgcttgaaaatcagaaaagcagccactcacaatacaattaaggaatgggctttgctaacccttctgaggtaactagactgcagctaaccaccaccaacagccattcatcatctgatctctgctggatctacagacaccgatgcagaccactcgatttcatgaccggccctattgcactatggaagttaaagtgtcacgactgctctatgcatattggatttaggggaattttcattgttacataaatgtgtgaactagtttcaacagtgttctttcatatttactctgcaaatacaaaaaaccaaaacctgcagccagtggtcatttcaaaatctttttatgttcagatactgagccttcataagggttgactacctcagatttgctgcactcattgtggacttcatgtggatcacaacttctggataagaagattacaactattaagtgtcgatgtgaaccttgcaaccagctctactggattcttatcagaaatcctgcataaaaagtcagccatctgggttctgatctgctgtaaaagatgaagatttaagtgaccttaattaacctgtcctgtgccctacccttaaggaatactctctgtagtaggctgttgttatattagacttcctggaacacactgctgaaaagaactgatgtgttcagatcatctgtgtagggctgtgatttgtaatttaaactaattgtattctgaggtaaccacaaaataaattcaaccaaactggggtccaccaagtgggggaaggggaagggagagaataatcttgggggttttttttttttggtaatttttttatttggatagtgcttttttgttttgtttttgttctgcattaaggccttttttgctttgacttgaaataagttctttgacagagcatattgcttggttaattaagtaacctaaagtatgcattaggattgtgaaatgtctcgtgagtatgccaatcctgagggtggaaccaaatagcctttgatgaaaagggcagtggattctggaggctctacttcaggtgctgctataatgcctcatctaatcaggactaaattgtgtaggaaactgcagtgggaagaatatgctttctgctcaggctaagagggtcactgatctgtccttagaaattcagagtaacatgagcaaaacctcagctaaaacccatttaagtggcatggattgtgcatgatctttgataagaattcctcatgtacttgtgcctagtttttcaaggtattggctgttctatagatgcagtgattgtcccagctagctctgttaccagccttttggtgtgtctttatgttcatttggagagtcagggcgaaagacaggtgatgtagcacttctgtttttaataattattgcttaaaatacctattaatagttttgggtcatttaaagggacttgaggaagctacccaggattacagaagagtgtccacctaacaagatggtctggcagtttcctagttttgtatctggttcaatagaaatatgtgaaagtggtaatgtcatcatttgatgcagagtccgggtttctctataataaatccctttgccaaatgcatgagttgcagacttgctactggcaagagtgaagcaagtgggtgagtaaaactattttgacgtgggagcgttttcagataggagtttagtcttgacgaaagtgtccgtgcaggaattggactccgaggagggttacagtatctcctgacgggacctgccactcgcatctgggcaatgttgacatttgaggtggcaggcaggatgcctgccttctaatatatttgggtgagtaactgagccagccaagggaaggttgaatgattaaatcagaaatgggattcttggtaaactgaagacttttatttgggaatgaaaaaccttaaaaaaatctcttcatcgttgaactgtgcattttccctgcattttttcccaacaaaattttgttgggggttatgttactgaagaatgaacagatgagtaagtggaggtgttatgtaaaggcatattgtactcgaaatctgaagacctgcagcagatttaaattacaactcttgttataactttttaaaagattgtgaaaatatcaaaatataaatgaatcaagttttaatatactgtatgatgggtggatgaggctgtccattgtaccatttgtttgaattctcaggcatggtttggcagtgcaagaattctgtaacattaacaaattcaataaaaagtaaatatatggattttggactgtaaaaaaaaaaaaaaaaaa

SEQ ID NO: 519 - DNA, 2809 bp, HOMO SAPIENS
gagaggcgcacccgggcggccagctgggctcggagcggaacggggtcaggatggacgaggacgtgctaaccaccctgaagatcctcatcatcggcgagagtggggtgggcaagtccagcctgctcttgaggttcacagatgatacgtttgatccagaacttgcagcaacaataggtgttgactttaaggtgaaaacaatttcagtggatggaaataaggctaaacttgcaatatgggatactgctggtcaagagaggtttagaacattaactcccagctattatagaggtgcacagggtgttatattagtttatgatgtcacaagaagagatacatttgttaaactggataattggttaaatgaattggaaacatactgtacaagaaatgacatagtaaacatgctagttggaaataaaatcgataaggaaaatcgtgaagtcgatagaaatgaaggcctgaaatttgcacgaaagcattccatgttatttatagaggcaagtgcaaaaacctgtgatggtgtacaatgtgcctttgaagaacttgttgaaaagatcattcagacccctggactgtgggaaagtgagaaccagaataaaggagtcaaactgtcacacagggaagaaggccaaggaggaggagcctgtggtggttattgctctgtgttataaactctgggaaattccatctcttgcatatttgatcagatagtgacatctttctgtatataaactctttaactgctattttagggaccttgcagtttgcacataattgttttatatcatagcagtaaatatttgcaagaaatcccactcatcgaccccgggtaaaatgttatggtaagcatgcacagtttgcagtctacagtttttttatgtagcacaaaataggtgtacctttataagtacattcaattttatgatttacatttatcatgtaatttttaaaaaaatccatctatctaggatatgttgatacaaagtctgcttttgctattctttttgcttaaatactcctatcattttctgaattacttggtatttagaactcctagcaccacggggaagaatagaggtatcatcaaacgtggcaaattttctttcaggaataataaagagcatgattccacagcttttctgggatgtttgagattcttttttagtactaagcaaaattctcatcacagaatgtagcccaggccaatttataactaaatctctatttgttcggatgatgcttctaaaacagcattgataggttaaagaagcttggtatttttaatttacttcaatgattagctcagttgcttaactggagttttaatcctgtgatatgtacattggattcatgactgtgcagcatttttagttatgtggtgtttggcagaatgacaataaggttttcccccattttggtttcaggaggacatgaatagtgtgtttattgtaactcctcatacacttttaaaaccaacatcttttttcataaatgttggtagtgtttgtccaggtaccttaactgtagcttgtgtaatgttgatgaatatctgtatcttacggcttccataatggctagttgatattcaaaaacctatttctgtgttttgaggggtggggaaaaaaaacactaagtgataatttgaaaaaggcatattgcttccagattctgatgtgtgagggaaaatactgtcacaatgaaaatcttgacaatttacttaacaagtaaccagtagttcatcaaaaccaacttgtacagactaataaatctttttcacagtattcagttttctcacctcttgctattgtatattgtagatttttttcattcatgtgttatttaatttacactgatctctgctattttaaccccccaaataagttatttgtcctttaaggttggttactataatacccctcagtaagattccagtattaatttctgggcagtttgttctctgtatacaattgcaaatgataagcatttttgtgagtgaccacctttgcaatatgtttgttaatttacttcatgttgggttctttctgaaatgtacatctttacatataaaaacctcacattctacttgatttacacttcctagtctacattacatgtggttgaaggttttatacattctatatgcttttactaaatatacaagatttactactagaaatttggagaaagaacactaacacatgtacttgtgatttgttcatgttatattaaaacttgagatttgtgtatttatgtagagtctgtattgacaagactgttgttttttgctccttgagctatataataatctgtgtattggattgttgtcttgatttggtctaaatttgaatatatatgagttacttgaatataacaaaaatgaattttgtttgatagatttatattgtaacctttttctagttcttgaataaatatagcctgctttccctagatgcatttgtgtaggaagtatatacatttccctattactctcatcagctgaagaatatgtactattgtgttactcaaattatgtggctttcattttgttgttttgttgcaagcttagtgttttgtagtggaggttttgtaaatgaaacagttgtaatatctaaggtcaggcacctagtaacagggttttgttaattcttttcagaatcattgaagcagtcttaaagggtcttttgcagatggtacaaattagaacaattagaatatagtattttgagttctagtagtactgagattgacccaaacaaataaaaaactattcaatttctgagtaatagttaaaaaaaaaaaaaaaaaaaaa

SEQ ID NO: 520 - DNA, 267 bp, HOMO SAPIENS
gacaagcattactgtactcctatctttgggtattatgggtgatgctaagaccacacagccaaattcaatggagagtaacgaagaagagcctgttcacttgccttgtaaccactccacaatcagtggaactgattacatacattggtatcgacagcttccctcccagggtccagagtacgtgattcatggtcttacaagcaatgtgaacaacagaatggcctctctggcaatcgctgaagacagaaagtccagtaccttgatcctgca

SEQ ID NO: 521 - DNA, 13203 bp, HOMO SAPIENS
atgcctggggagcgcccccgaggagcgccgccccccaccatgactggagacctgcagccccgccaagttgccagcagcccggggcacccctcccagccgccactggaggacaacaccccagctaccaggaccaccaagggtgccagggaggctggcggccaggcccaggccatggagctccccgaggcccagccaaggcaggccagggacggggagctcaagcccccatccctgagaggccaggccccgagcagcacccctgggaagaggggcagcccccagaccccaccggggagaagccccttgcaggctccctcaaggctggcgggcagggcagagggcagccccccacagcgctacattctgggcatcgccagctcgaggaccaagcccaccctggacgagacaccagagaacccacagctggaggctgcccagctccctgaggtggacaccccccagggccctgggactggagctccactcaggccgggcctcccaaggactgaggcccaacccgccgccgaagagcttggcttccacaggtgcttccaggagccaccctccagctttacctccaccaactatacctcaccaagcgccacccccaggcccccagccccggggcccccccagagcaggggcaccagccccctccagcccggttcctatcccgaataccaggccagtggggccgactcctggcctcccgctgctgagaatagcttcccaggtgctaatttcggggttccccccgccgagccggaacctattcccaaaggcagcaggcccggcggcagccccaggggagtttccttccagttccccttcccggcactgcatggggccagcacaaaacccttccctgcggatgtggctgggcacgcattcaccaatgggccactggtgtttgccttccatcagccccagggagcgtggccggaggaggccgtgggcacgggccctgcctacccgctgcccacccagcctgcgccctcacccctgccctgctaccagggccagccaggtggcctgaaccgccacagcgacctcagtggtgccctctcttcccctggagctgctcactcggccccgagacccttctctgacagtttacacaagagcctgaccaaaatccttcccgaaagaccaccttcagcccaggatgggctggggagcacgagagggccccctagctccctaccccagaggcactttccagggcaggcgtacagagccagtggggtggacaccagcccggggcctccggacaccgagctggccgccccagggcccccacccgccaggctgccccagctgtgggaccccacagcagccccttaccccacacctcctgggggccccctggctgccaccaggagtatgttctttaacggccagcccagcccaggccagcggctctgcctcccccagagtgcccccctgccttggccccaagtgctcccgaccgcccggccaagtccccacggaatggagatgctgagccggctgcctttccccgcggggggccccgagtggcaggggggcagccaaggagccctgggcactgctggcaagacaccgggacccagagagaagctgccagccgtgagaagcagccagggcggctccccagcactgttcacctacaacggaatgacagaccctggggctcagcccctgttcttcggggtggcccagccccaggtttcaccccacgggacacccagcctgcccccaccgagggtagtgggagcctcccccagcgagtccccactgccgtcaccggccaccaacacggccggcagcacctgctcttccctgtcgccgatgtccagcagcccagccaaccccagctcagaggaaagccagctccccggccccctcgggccctcggccttcttccacccacccactcacccccaggagacgggcagccccttcccgtccccggagcccccccactccctccccacccactaccagccagagccagccaaggccttcccttttcccgcagatgggctgggagccgagggtgccttccagtgcctggaggagaccccattcccccacgagggccccgaggtgggtcggggagggctgcagggcttcccccgtgcgccgcctccgtaccccacacaccacttctccctcagcagcgccagcctggaccagctggacgtgctgctgacctgcaggcagtgtgaccgcaactacagcagcctggcggccttcctggcccaccggcagttctgtggcctgctcctggccagggccaaggatggccaccagcggtctccaggcccccctgggctcccctcgccccccgctgcccccagagtccctgccgacgcacacgcgggcttgctcagccacgcgaagaccttcctgttagctggggacgcccaggccgagggcaaagacgaccccctgaggacaggcttcctgcccagcctggccgccacccccttcccgctccctgcctcggacctggacatggaggatgacgccaagctggacagcctcatcacagaggcgctcaacggcatggagtaccagtcggacaacccggagatcgacagcagcttcatcgacgtcttcgcggacgaggagccttccggccccagaggtcccagctccggacacccccttaagagcaaggcgggggtgactccagagagcaaagctccgcccccgctcccagcagccacgccggacccccaaaccccccgccctggggacaggggctgcccagcccgaggcaggcccaaaacgcgttccctgggtctggcccccaccgaggcggatgcgcccagccagggcaggcagcagaggagggggaagcagttgaagctgttccggaaggatctggactcgggcggcgcagcagaggggtcggggtcgggcggcggcggcagagcctccggcctgaggccccggaggaacgacggtctcggggagcggcccccaccccgtccccggcgccctagaacgcaggcccccgggagccgcgcagaccccgcgccccgggtcccgagagccgccgccctccccgaggagacccgcagctcccggcgccgccggctgccccccaggaaggaccccaggaagaggaaggctcggggcggcgcctggggcaaggagctcattctgaagatcgtgcagcagaagaacaggctccgcgagtacgacttcgcctcggagtccgaggaggacgagcagcctccgccgcggggccccggcttcagaggccggcggggccgaggcgagaagaggaaggaagtggagctgacccagggtcccagagaggatgagccacagaaaccccggaaggcggcgaggcaggaagccggcggggacggagcccccgcgaaccccgaggagccgggcgggtctcgcccgggccccggcaggagccctcaggcccgtggcccgtctcgaagcctggagacgggagcggccgccagggagggaggccccaagtgtgctgatcgcccctcagtggcccccaaggatcccctgcaggtccccaccaacaccgagacctcagaggaaacccgcccgtcgctggactttccccaggaggccaaggagcctgaaactgccgaagagtcagccccggacagcacagaattcacagaggctttgcgttctcctccagccgcctgtgcgggagaaatgggagcaagccccggtctcctgataccagagcagccgccgcccagcagacatgacaccggcacccccaagccgtcgggaagcctcgccaacacggcgccccacggaagctcgccaacgccaggtgtgggcagcctgctgggtggtcctgggggcacacaggccccagtctcccacaacagcaaggacccccctgcccgccagcctggagaatttctggcacccgtggctaacccctcaagtaccgcctgccccaaacccagtgttctgtcttcaaagatctccagttttggctgtgaccctgctggttttaacagagaccccttgggggttccagttgccaaaaaggggcctcagccctacagcagcccccacagtgagttgttcctcggacccaaagacctggctggctgtttcctggaagaactgcaccccaagccctcagccagggatgccccgccggccagcagctcctgcctttgccaggacggcgaggatgccggttccctcgagccacagctgccaaggagcccacctggcaccgctgagacggagccaggcagggctgcatcgccaccgaccttggagtcctcatccctcttcccagacctgccggtggacagattcgacccacccctctatggcagcctgtctgcgaacagggactccggtctgccgttcgcatgtgccgaccctccccagaagacggtgccgtcagatccaccgtacccctcttttttgctgcttgaggaagtatccccgatgctgcctagccattttcctgatctctcggggggaaaggtgctcagtaagacgtgtccccctgaacggacagtggttcccggcgccgccccatctttgcctgggaaggggagtggatgtagcgttgctcttatgagtcacctgtccgaggatgaactggagatccagaaattggtcaccgaattagaaagtcagctgcaaaggagcaaagacacacgtggggccccgagagagcttgcagaagctgagtcggtgggcagggtggagctcggcacaggcacagagccaccctcccaacggcgcacctgccaggccaccgtgccccacgaggacacgttctcggcagctgacctcacgcgcgttggagaatccactgcacatcgggagggtgcggaatcggctgtggccaccgtggaagcggttcaggggaggcctggggggacgtggccctgcccagcctccttccatccgggacatgcagcccttctcccctgtgcccaggaagacctggtttctggggctcctttcagccccaggggagccaacttccattttcagccagtgcagaaagccggagcctccaagactggactttgccaggcagaaggagacagcaggcccccccaagatgtctgcctgcctgagcccagcaagcagcctggcccacagctggatgccgggagtttagcaaagtgcagccccgaccaggaactttcatttcctaagaataaggaggccgccagctcacaagaaagtgaagactccctgcggctgcttccctgtgaacagagaggagggttcctcccagagcccggcacagcagaccagccccaccgaggggcccctgctccagaagcttttggcagccctgctgtccatctggcccctgacttggcatttcagggtgacggggctccacctctggatgccacctggccttttggtgccagtcccagccatgctgcccagggacattctgcaggcagagcaggtgggcacctccaccccacggcagggaggcctggctttgagggtaatgagtttgcaccggcgggggcctcctcactgactgccccccggggcagggaggcttggttggtccctgtgccaagtcccgcctgtgtatccaacacccaccctagcaggaggtcccaggacccagctttgagcccccccatacgtcagctccagctcccagggcctggagtggctaagagtaaagatggcatcctgggcttgcaggagctgacacctgctgcccagagccctccacgagtgaacccctcaggtctggaagggggcactgtggaaggagggaaggtggcctgtggccccgcccagggctccccagggggtgtgcaggtgacaactctccctgcagtggccggacatcagctggggctggaggcagatggacattggggcttgcttggccaagccgagaaaacccagggccaaggcacagccaaccagcttcagccagagaacggggtgagcccagggggcacggacaaccacgcctcagtcaatgccagtcccaaaacagcgctgaccggccccaccgagggtgcagtcctgctagagaaatgcaagggaagcagggcagccatgagccttcaggaggaggccgagcccaccccaagccccccgtcccctaatagggagtccctggcgctggccttgacagcagcccacagccgaagtggatctgagggccggactccagagagggcgtccagccccggcctgaacaagccactgctggccacaggggatagcccagcaccctctgtcggggacctggccgcctgcgccccctcacccacttcagccgcccacatgccctgcagccttgggcccctgccccgtgaagacccacttacctcgccttccagggcccaaggtgggctgggggggcagctgccagcatctccgtcctgcagggaccctcccggcccccagcagctgctggcctgttctcctgcctgggcacctctggaagaggcagatggcgtccaagccacgacagatactggggctgaggattccccggtggctcccccgtctttgacaacaagcccctgcgatcccaaggaagccctggctggttgccttctccagggggagggcagccccctggaagacccttcctcctggcctcctggctccgtcagtgctgtaacctgcactcacagtggggacacccccaaagacagcactttaagaattccagaggattccagaaaagagaagctgtgggagtctcctggccgagccacctctcctcctctggcaggggccgtctcccccagcgtggccgtcagggctactggcctgtccagcactcccaccggagatgaggcacaggcaggcaggggactcccagggccagacccccagagcaggggagccccgccccacaccaaccctgacaggatgcccaggggccactcctcgtattctccaagcaatactgcccgcctcggccacagggagggccaggctgtcacagctgtgcccactgagcctcccacgctacagggtgcagggccggactcccccgcctgcctggaaggtgagatggggaccagcagcaaggagccggaggacccagggacccctgagaccgggcgctctggtgctaccaagatgcccagggtcacctgcccttccacaggactgggcttgggaagaaccacagccccaagcagcacagccagtgacttccagtctgactccccccaaagccacagaaatgcctcccaccagactccccagggggaccccctcggcccccaagacctcaaacagaggtcccgtggctataaaaagaagcctgcatctacagagaacggccagtggaagggccaagctccacatgggcctgtgacctgtgaggtctgcgcagcctccttccgctccgggccgggcctgagccggcacaaggccaggaagcaccggccacacccgggagcccccgcggagccgagcccagcggccttgcctgctcagcagcctctagagcccctagcccaaaagtgccagccgcccaggaagaaaagccacagggtgtctgggaaggagagaccaaatcactcacggggagaccccagccacgtcacccagccaccgcctgcccagggctcaaaggaggttctcagagcaccggggtccccacacagccagcagctgcaccctccaagccctactgagcatgaggtagatgtgaagactccggcctccaagcccagaccagaccaggccagggaagatgagctgcatcccaaacaggcagaaaaaagagaaggccggaggtggcgccgagagcccaccgtggactctcctagccactcagaggggaagtcaaataagaaaaggggaaagctgagagggagaaggctccgggaggagagcattcttccagtctctgctgatgtgatttcagatgggcgcggctccagaccatcccctgcaatggccagttacgcagcctctccgagccactgcctctctgtggaaggagggcctgaggctgacggggagcagccgcctcgcttggccactctgggacctggggtgatggagggtgcagcggagactgaccaggaggctctgtgtgcaggggagactggggcccagaagccacctggagatcggatgctgtgtccagggaggatggatggtgcagctctgggggaacagccaactgggcagaagggagcctcggcaagggggttctggggaccaagagagaccaaggcgttgggtgtgtgcaaagagtctgggagcgagcctgcggaggacagcagcagggcccacagccgatcagaggaaggtgtctgggaggagaacacgccccccttgggccccctgggttttcccgagacttccagctctccggcggacagcaccaccagcagctgcctccagggcctcccggacaacccagacacccagggtggagtccaggggcctgaaggccccactcctgatgcctctggctccagtgccaaggatcctccaagcttgtttgatgatgaggtctctttctcccagctcttccctccaggcggtcgcttgactagaaagaggaacccgcatgtctacgggaagcgctgtgagaagccggtgctcccgctgccaacccagcccagctttgaggagggcggtgaccccacgctgggcccagcccgcctgcccacggacctcagcgactccagctccctctgcctctgccatgaggacccgtgggaggacgaggatcccgcaggtctgcccgagtccttcctcctggatgggttcctcaatagcagggtgcctggcattgacccctgggcccccggcctcagcctgtgggccctggagcccagcagggaagctggtgcagagaagctgccctcccactgccccgaggacgatcggccggaggccattcctgagctgcacatggtcccagcggcttggcgaggcctggagatgccggcccctgccgatgactcctcctcttctctcggagatgtgagccccgagccccccagcctggagagagaacgctgtgacggtgggcttcccgggaacacccacctgctgccgctccgtgccacggactttgaggtgctcagcaccaagtttgagatgcaagacctgtgctttctgggaccctttgaagaccccgtgggtctccccggccccagcttcttagacttcgagggcacggcgagctcacaggggccacagagccgaaggacagaggaggctgcaggggcagggagggcccaaggcagaggccggccggccaagggcaggcgggcctcctacaagtgcaaagtgtgcttccagcgcttccgcagcctgggcgagctggacctgcacaagctggcccacacgcccgcgccgccgcccacctgctacatgtgcgtggagcgcaggtttggctcgcgggagctgctgcgggggcacctgcaggagaggcacgcgcagagcaaggccgggccctgggcgtgcggcatgtgcctgaaggaggtggccgacgtctggatgtacaacgagcacctgcgtgagcacgcggtccgcttcgcccgcagggggcaggcgcggaggtccttgggggacctgcccggaggcctggagggcagcagcgctgtcgcccaccttctgaacagcatcacggaacccgcgcccaaacaccacaggggcaagcgctccgccggcaaggccgccgggagcccgggagacccgtgggggcaagagggagaagccaagaaagacagcccgggcgagagggcgaaaccccgggcacgcagcacccccagcaacccagacggggccgcgaccccagacagcgcctctgccaccgccctggctgacgccggcagcccgggcccccccaggacgacccccagcccgtcccccgacccctgggccggcggggagcccctcctgcaagccaccccggtgcacgaggcctgcaaggacccctcccgcgactgccaccactgcgggaagcgcttccccaagcccttcaagctgcagcgccacctggcggtgcacagcccgcagcgcgtctacctgtgcccccggtgcccccgggtctaccccgagcacggggagctgctggcacacctgggcggggcgcacgggctgctggagcggccggagctgcagcacacgccgctgtatgcctgcgagctctgcgccacggttatgcgcatcatcaagaagtccttcgcctgcagctcctgcaactacaccttcgccaagaaggagcagttcgaccgccacatgaacaagcacctcaggggggggcggcagcccttcgcgttccgcggcgtgcggaggccgggagcgccgggacagaaggcccgggccctcgagggcacactgcccagcaaacggcgcagggtggccatgcccggcagtgcccctgggcccggcgaggacaggcctcctccccggggaagcagccccatcctgagtgagggctctctcccggccctgctccacctgtgttcggaggtggctcccagcaccaccaagggatggcccgagaccctagagaggcctgtagaccccgtgacccacccgatcagaggttgtgagctgccatccaaccaccaggagtgtcccccgccgtctctgtctcccttcccagctgccttggctgatggcagaggagactgcgcgctggacggagccctggagaggccagagaacgaggcttccccaggcagccccgggcctcttctccagcaagctctccctctgggggcatctctgccgcggccgggagccagaggccaagatgcggagggaaagagggctcctctcgtgttctcagggaaacgcagggccccgggtgcccgtggcaggtgtgcccctgaccatttccaggaagaccacctacttcagaaagagaaggaggtgtcctcaagccacatggtgtctgagggggggccccgaggcaccttccacaagggcagcgccaccaagcctgcgggctgccagagctcatcaaaggacaggtcggcagcatccacccccagcaaagcactcaagttcccagtgcacccaaggaaggcggtggggagcctggcacccggggagctggcccgtggcacagagaatgggatgaagcccgccacccccaaagccaaacccggccccagctcccagggcagtggaagccctcgccccggcaccaagacaggaggtggcagccagccccagccagccagcgggcagctccagagcgagacagccaccaccccagccaagcccagcttccccagccggagccctgcaccagagaggctccccgctcgagcccaagccaagagctgcaccaaggggccaagggaagctggtgagcaggggccccacgggagcctaggtcccaaggagaagggagagagcagtacgaagaggaaaaagggccaggtcccagggccagccaggagtgaaagtgtggggagcttcgggagagccccctcagcccctgacaagcccccccggacccctcggaagcaggcaactcccagccgcgtgctcccgaccaagcccaagcccaacagccagaacaaacccaggccgccaccatcagagcagcggaaggcagagccgggccacacacagaggaaggacagactgggcaaggccttcccccaggggagacccctgctcaggccccccaagaggggcacagctgtccacggtgctgaacctgccgagccacacacccaccggacggccgaggcccagagtgacctcctcagccagctcttcgggcagagactaactggcttcaaaatccctttaaagaaagatgcttccgagtaatttctaggagcaagagcctgggaccggagctgggcgttcctgtctcggcctgcctccttggccagctccggctccctgagatggtccactctgtggccacttgacttcttgtgcaactgctcaggccttgatgtcagagctgaggtggtgatgctttgaacagggcccaggtgggcagcattccctttcttgctggaaggctgggggtgaaagacggggccactgcagcccttttgagaccacacagctgttttcttggtaccaagtacttgaagagacagcagcccatcccctcagcccacacccctgcgccctgtgggcaccgacaccacagaagccaatgtttggagatttgcacaacctcccgttcccccacatggagaagggaagtaagttgaggcagccgtgggatggtggtaggttccctcttagtcttgctgctgttgctggaattccaaagtgaccttagaaaccacgtgggggaaggcagtgctcactacttagaagggttgcttctgagccgcctggtcccccaagagcacaacaggcctcctccctctgaccacagggtcatgcctcctccctctgaccacagggtcatgccagcctccatttgctctgcgggagaaaagcccatctctagcacaccttgaccccaggaaccgggttcccgtatggaactgggaagaaaccgcccctgtgccagctcccgcgggccctcctcgttccctcccagcctccatggccgccctctagagcctccctgctgtacggagctctgggctccgcctatttgcaatgttactctgaagtttctggtgctatttttgtgttgtaatgtgaatacaggcttccttgatttttttttttaatgggggtattgggtgggacagacggggtcagggaggccccaccatggcttgtcgagggcacgggcacctgcatggcggcgctctccctgcctcccctgccgggctgcaagcctgaggtctgtgctgccagacggggatgctcagggctggggctgcagagccgctgccctggccagggcaccctcatgcaccgacccaacccaggcctgggacgcacgtgtcctctcacagcgtcgtgcctgtgaaggtgggtcaaagggtgagagggcttccttctcacccttctctccataagtatcttgaagatccatggtttgttttgctctattgtttagtttttacttgggtgcaatgtgtacgtcaaaagtttttattttgatatttgaaagagaccaaatcaggcccagaccgcctctctggaaggtgttgtaggccattcaaaacgcctccggagtgtcgcaaaccaagtgcggaggggccctgaggttgtactgtaaacatcatagtgacttgtcttttcaaatatattcccactattttcgcagaaaacctc

SEQ ID NO: 522 - DNA, 5472 bp, HOMO SAPIENS
tggataggagagctggcgcagctgccctggtggcagtggctgaagtggcggcggcttcggcggctgcggcggctgcaacagcttcgggctcggggttttggcggcggcgccggcgggctaggctgcgcggtgcggaccccggcgcgcggtccgggttgctggggcggcgcgtagatggagtcttgctacattgcccaggctggtcttgaactgctaggctcaagcagttctcccaccttgacctcccaaagcgctgagattacagaagatgcctctaatggaggagtttctgagcagcacccctggcccagtggctttgaaagggagctcaaaccagagactatttcaagccctggatatcatatcctgagggccacaggagaagagaacatggctgtgagtttggatgacgacgtgccgctcatcctgaccttggatgagggtggcagtgccccactggctccctccaacggcctgggccaagaagagctacctagcaaaaatggcggcagctatgccatccacgactcccaggcccccagtctcagctctgggggtgagagttccccctccagccccgcacacaactgggagatgaattaccaagaggcagcaatctacctccaggaaggcgagaacaacgacaagttcttcacccaccccaaggatgccaaggcgctggcggcctacctctttgcacacaatcacctcttctacctgatggagctggccacggccctgctgctgctgctgctctccctgtgcgaggcccccgccgtccccgcactccggcttggcatctatgtccacgccaccctggagctgtttgccctgatggtggtagtgtttgaactctgcatgaagttacgctggctgggcctccacaccttcatccggcacaagcggaccatggtcaagacctcggtgctggtggtgcagtttgtcgaggccatcgtggtgttggtacggcagatgtcccatgtgcgggtgacccgagcactgcgctgcattttcctggtggactgtcggtattgcggtggcgtccggcgcaacctgcggcagatcttccagtccctgccgcccttcatggacatcctcctgctgctgctgttcttcatgatcatctttgccatcctcggtttctacttgttctcccctaacccttcagacccctacttcagcaccctggagaacagcatcgtcagtctgtttgtccttctgaccacagccaatttcccagatgtgatgatgccctcctactcccggaacccctggtcctgcgtcttcttcatcgtgtacctctccatcgagctgtatttcatcatgaacctgcttctggctgtggtgttcgacaccttcaatgacattgagaaacgcaagttcaagtctttgctactgcacaagcgaaccgctatccagcatgcctaccgcctgctcatcagccagaggaggcctgccggcatctcctacaggcagtttgaaggcctcatgcgcttctacaagccccggatgagtgccagggagcgctatcttaccttcaaggccctgaatcagaacaacacacccctgctcagcctaaaggacttttacgatatctacgaagttgctgctttgaagtggaaggccaagaaaaacagagagcactggtttgatgagcttcccaggacggcgctcctcatcttcaaaggtattaatatccttgtgaagtccaaggccttccagtatttcatgtacttggtggtggcagtcaacggggtctggatcctcgtggagacatttatgctgaaaggtgggaacttcttctccaagcacgtgccctggagttacctcgtctttctaactatctatggggtggagctgttcctgaaggttgccggcctgggccctgtggagtacttgtcttccggatggaacttgtttgacttctccgtgacagtgttcgccttcctgggactgctggcgctggccctcaacatggagcccttctatttcatcgtggtcctgcgccccctccagctgctgaggttgtttaagttgaaggagcgctaccgcaacgtgctggacaccatgttcgagctgctgccccggatggccagcctgggcctcaccctgctcatcttttactactccttcgccatcgtgggcatggagttcttctgcgggatcgtcttccccaactgctgcaacacgagtacagtggcagatgcctaccgctggcgcaaccacaccgtgggcaacaggaccgtggtggaggaaggctactattatctcaataattttgacaacatcctcaacagctttgtgaccctgtttgagctcacagttgtcaacaactggtacatcatcatggaaggcgtcacctctcagacctcccactggagccgcctctacttcatgaccttttacattgtgaccatggtggtgatgacgatcattgtcgcctttatcctcgaggccttcgtcttccgaatgaactacagccgcaagaaccaggactcggaagttgatggtggcatcacccttgagaaggaaatctccaaagaagagctggttgccgtcctggagctctaccgggaggcacggggggcctcctcggatgtcaccaggctgctggagaccctctcccagatggagagataccagcaacattccatggtgtttctgggacggcgatcaaggaccaagagcgacctgagcctgaagatgtaccaggaggagatccaggagtggtatgaggagcatgccagggagcaagagcagcagcgacaactcagcagcagtgcagcccccgccgcccagcagcccccaggcagccgccagcgctcccagaccgttacctagcccagcgcccgaaagccgtctcttctatgcaataacacaatagtattactctactgcgatgtacggaactgcggtgtgtgtacacatactcacgtatatgcacatatttatatacaggaagaaaaaagacagacaagatggggcttggtttataaccaccttgccctgtcttccttaactccagaagccagtttggtgaggggtgggggtgcggccaccaggtctgagctcttcctactgtggaaggctccagaaggcccttcacaaggagacccctcacctggatccagtcgactgcggggcttgcccctcatgtgggctggcctccatcggccacgtccaaagctgtcactgctactgcttcaggctcacatccccccgacctgatggcgtgcccgccccctctccctgcggcccatgccacaggtttctgtgttttgctttagggacagaaccacttaggaaggaaagaactcccggtctccagggtggtatttcagtgtctgtgataatgtcacgcaacacctcttcggggaccagtgcccaggatctaatggaagcggaattggggcaactgggcccatgtggccagagctcagttagccagtgccgggcggccacagattacactgaccaatctcctcccttggctctgcaagcctcccacccagccttctctggcttaacccttgttggcgaaaactcttccacagtggcctccttggggacccagaacccggaggaaggggcatgaggcaggaagtggggccgatgtctgcaacccagaccacttcgtggaatgggctcttgaccaaatccctttttttgcgatttacccgttcaagcaaaacaacgttttggttaactaaggattgtgctaaagccgataccaggtccttcacacgtgtgcactaggaacaggagcgaacagcacagagagacgctccctgtgggacgcagcagccccgtggccccggcccagttcccagccaccctccctggctctgctcacaccagagatttccatagcaggagcggttggtgcagaagtaggttcagatgaacctcagttaacgtcgccacccctcctcccaccatggtaccctgtaggagccctgtatgacatctgagcgtggtggaggtaggagggttgccagctgcagtgaccctgccacagaggcagggtcagtgcagaggtcgctttggttccgcttccctgggccacagaacggaacacagcataggttctgcagcaggagccgcagtggcaggatggagggtgcgaagggcaaggagtgcactgctgggcattcctggccagccccggccctctggtgcctgcttcctgtgacttcagaaggcaggtggacagagcctccctctggccttgtcctcttcccagccacagaacgggcagggtggcacccgaccccaggggagcagtacctggtcccccaccccctcctcccaaccacctccaaggccaagctgggtcccatagccagcacggcatggttctccccttccccccttcccaggtcaggggagttggacaagtagcaggtgtttgtttttaaagcacagccctttgggaaagcaacacattattgagactcactgtgattcccccgggagtcagactggctttgtcctcttcctctctggagggccatgggccatcagcaggagctccacatcgagccccaggccagaaccccctccctttcacagagagggaactttattgcacaattgggtgccttttagcttttgtgtgttgaaatgggcgttttggaagcaagggtcaggggacagcttctaaaggtgtgagtctctgacctgagcatctgggcctcgcctgggcccttcttcctccccaggggtggaaacgtggaggggccagcagcaccccggggtctgcccaggggagtcaaggccccgaggtgggggggcctattccaggaggagtgggatctcggccctgtccagagcgagttaatgtgtccatctgcccaaccctgtcctgagaaaggacctggttttggccaggacctgacaaatacccaatggcagcagtgtcaacagacgggagtccagccagggtgggtgcccttgtcattgaggttagggacagctatccccaggttatgcctggccccacccagcagggagttggggtccccccacaggctgtgagctctgtgggccctgggatgtgatctagctcagatgccctctcatccttgatgtcatagttgagtgcacccaagtggcacccactggcggccaggggcacagcctggtggtggtggcaatagaactgtgcccctcctcagctcctcgcttcccctcccacagccccagccttactccaccatgcggacaatcattttgtacggatcacgggagcaatgctgtacggttttgtacactggtggtttgtttcctagaaaacccattgtgtctctggatttctagcacattactaaaagagcctctgctttgtaaaaaaaaaaaaaaaaaaaaaaaaaaaaaaaaaaaaaaaaaaaaaaaaaaaaaaaaaaaaaaaaaaaaaaaaaaaaaaaaaaaaaaaaaaaaaaaaaaaaaaaaaaaaaaaaaaaaaaaaaaaaa

SEQ ID NO: 523 - DNA, 9990 bp, HOMO SAPIENS
aatagtgttggtgtcttgaaactgacgtaatgcgcggagactgaggtcctgacaagcgataacatttctgataaagacccgatcttactgcaatctctagcgtcctcttttttggtgctgctggtttctccagacctcgcgtcctctcgattgctctctcgccttcctatttcttttttttttttttaaacaaaaaacaacaccccctcccctctcccacccggcaccgggcacatccttgctctatttcctttctctttctctctctctctctctctctctcttttttaataagggtgggggagggaaaggggggggaggcaggaaagacctttttctctcccccccgcaataatccaagatcaactctgcaaacaacagaagacggttcatggctttggccgccgcgccaccatctttcgggctgccgagggtgttcttgacgattaatcaacagatgtacagatcagctctcaaaatgtcttctgtgtcttctgagcgtcttctaagacaattgcattagcctcctgctagttgactaatagaattaataattgtaaaaagcactctaaagccacatgccttatgaagtcaatgctgggtatgattttacaaatatggtccggaaaaagaacccccctctgagaaacgttgcaagtgaaggcgagggccagatcctggagcctataggtacagaaagcaaggtatctggaaagaacaaagaattttctgcagatcagatgtcagaaaatacggatcagagtgatgctgcagaactaaatcataaggaggaacatagcttgcatgttcaagatccatcttctagcagtaagaaggacttgaaaagcgcagttctgagtgagaaggctggcttcaattatgaaagccccagtaagggaggaaactttccctcctttccgcatgatgaggtgacagacagaaatatgttggctttctcatctccagctgctgggggagtctgtgagcccttgaagtctccgcaaagagcagaggcagatgaccctcaagatatggcctgcaccccctcaggggactcactggagacaaaggaagatcagaagatgtcaccaaaggctacagaggaaacagggcaagcacagagtggtcaagccaattgtcaaggtttgagcccagtttcagtggcctcaaaaaacccacaagtgccttcagatgggggtgtaagactgaataaatccaaaactgacttactggtgaatgacaacccagacccggcacctctgtctccagagcttcaggactttaaatgcaatatctgtggatatggttactacggcaacgaccccacagatctgattaagcacttccgaaagtatcacttaggactgcataaccgcaccaggcaagatgctgagctggacagcaaaatcttggcccttcataacatggtgcagttcagccattccaaagacttccagaaggtcaaccgttctgtgttttctggtgtgctgcaggacatcaattcttcaaggcctgttttactaaatgggacctatgatgtgcaggtgacttcaggtggaacattcattggcattggacggaaaacaccagattgccaagggaacaccaagtatttccgctgtaaattctgcaatttcacttatatgggcaactcatccaccgaattagaacaacattttcttcagactcacccaaacaaaataaaagcttctctcccctcctctgaggttgcaaaaccttcagagaaaaactctaacaagtccatccctgcacttcaatccagtgattctggagacttgggaaaatggcaggacaagataacagtcaaagcaggagatgacactcctgttgggtactcagtgcccataaagcccctcgattcctctagacaaaatggtacagaggccaccagttactactggtgtaaattttgtagtttcagctgtgagtcatctagctcacttaaactgctagaacattatggcaagcagcacggagcagtgcagtcaggcggccttaatccagagttaaatgataagctttccaggggctctgtcattaatcagaatgatctagccaaaagttcagaaggagagacaatgaccaagacagacaagagctcgagtggggctaaaaagaaggacttctccagcaagggagccgaggataatatggtaacgagctataattgtcagttctgtgacttccgatattccaaaagccatggccctgatgtaattgtagtggggccacttctccgtcattatcaacagctccataacattcacaagtgtaccattaaacactgtccattctgtcccagaggactttgcagcccagaaaagcaccttggagaaattacttatccgtttgcttgtagaaaaagtaattgttcccactgtgcactcttgcttctgcacttgtctcctggggcggctggaagctcgcgagtcaaacatcagtgccatcagtgttcattcaccacccctgacgtagatgtactcctctttcactatgaaagtgtgcatgagtcccaagcatcggatgtcaaacaagaagcaaatcacctgcaaggatcggatgggcagcagtctgtcaaggaaagcaaagaacactcatgtaccaaatgtgattttattacccaagtggaagaagagatttcccgacactacaggagagcacacagctgctacaaatgccgtcagtgcagttttacagctgccgatactcagtcactactggagcacttcaacactgttcactgccaggaacaggacatcactacagccaacggcgaagaggacggtcatgccatatccaccatcaaagaggagcccaaaattgacttcagggtctacaatctgctaactccagactctaaaatgggagagccagtttctgagagtgtggtgaagagagagaagctggaagagaaggacgggctcaaagagaaagtttggaccgagagttccagtgatgaccttcgcaatgtgacttggagaggggcagacatcctgcgggggagtccgtcatacacccaagcaagcctggggctgctgacgcctgtgtctggcacccaagagcagacaaagactctaagggatagtcccaatgtggaggccgcccatctggcgcgacctatttatggcttggctgtggaaaccaagggattcctgcagggggcgccagctggcggagagaagtctggggccctcccccagcagtatcctgcatcgggagaaaacaagtccaaggatgaatcccagtccctgttacggaggcgtagaggctccggtgttttttgtgccaattgcctgaccacaaagacctctctctggcgaaagaatgcaaatggcggatatgtatgcaacgcgtgtggcctctaccagaagcttcactcgactcccaggcctttaaacatcattaaacaaaacaacggtgagcagattattaggaggagaacaagaaagcgccttaacccagaggcacttcaggctgagcagctcaacaaacagcagaggggcagcaatgaggagcaagtcaatggaagcccgttagagaggaggtcagaagatcatctaactgaaagtcaccagagagaaattccactccccagcctaagtaaatacgaagcccagggttcattgactaaaagccattctgctcagcagccagtcctggtcagccaaactctggatattcacaaaaggatgcaacctttgcacattcagataaaaagtcctcaggaaagtactggagatccaggaaatagttcatccgtatctgaagggaaaggaagttctgagagaggcagtcctatagaaaagtacatgagacctgcgaaacacccaaattattcaccaccaggcagccctattgaaaagtaccagtacccactttttggacttccctttgtacataatgacttccagagtgaagctgattggctgcggttctggagtaaatataagctctccgttcctgggaatccgcactacttgagtcacgtgcctggcctaccaaatccttgccaaaactatgtgccttatcccaccttcaatctgcctcctcatttttcagctgttggatcagacaatgacattcctctagatttggcgatcaagcattccagacctgggccaactgcaaacggtgcctccaaggagaaaacgaaggcaccaccaaatgtaaaaaatgaaggtcccttgaatgtagtaaaaacagagaaagttgatagaagtactcaagatgaactttcaacaaaatgtgtgcactgtggcattgtctttctggatgaagtgatgtatgctttgcatatgagttgccatggtgacagtggacctttccagtgcagcatatgccagcatctttgcacggacaaatatgacttcacaacacatatccagaggggcctgcataggaacaatgcacaagtggaaaaaaatggaaaacctaaagagtaaaaccttagcacttagcacaattaaatagaaataggttttcttgatgggaattcaatagcttgtaatgtcttatgaagacctattaaaaaaatacttcatagagcctgccttatccaacatgaaattcccttcttttgttattctttcttttgatgagtaggttaccaagattaaaaagtgagataaatggtcaatgagaaagaatggaagatggtaaacaatcactttttaaaacctgttaagtcaaaaccatcttggctaatatgtactggggaaataatccataagagatatcaccagactagaattaatatatttataaagaaagagaccaaaactgtctagaatttgaaagggtttacatattattatactaaagcagtactggactggccattggaccatttgttccaaaacccataaattgttgcctaaatttataatgatcatgaaaccctaggcagaggaggagaaattgaaggtccagggcaatgaaagaaaaatggcgccctctcaatttagtcttctctcattggccatgtttcagattttgacctagaaatgcgagctgtggttaggcttggttagagtgcagcaagcaacatgacagatggtggcacgctgtttttacccagccctgcctgtacatacacatgcacaccctctctgatatttttgtcctttagatgttcaaatactcagtagtccttttgtttgcggtttagattcattttgtccacacatgtacccattttaaaaaacaatgtcctcgatgcttctgtagtgatttcattttagccaggtatttctttcttgtgtgtgatgaaccagtatggatttgcttttctaagcctcctgttggttactaatctcacttggcacattataactaaaggaatcccctcaattcaaaagcatagatggatacaaatgtcagaccgtgggtttaatttgtttagaacacatggcatttcttcacaaggtaacctgctgtatttatttattttcttttggttaaatataatttccaaactttgtggtcaggcagcgtctaaggttacgttaccacagactgacagttggtatatgtaccagccaatcccttcattaaatgtatacagatttagttaagtagcattaaataggattcttagaagtatgtcctcatagaacttttaatacttaaggctttgtaaaaactatccatgaagggaaagctcctcagcataactgctcagggaaatagggctaaataactgaacattaaataattggttaaaggtgctgttagtcgagcctcaatgcttgctacaaggatgtatgtacaaggactgactttaataatttgcattatattgtcccaaccagtagtttattttttgccacggagatgtagaagatattacaagctactggatgcactgtcagattaacttatttcattaaagaagttgggagaacaaataggaaaaaaaaaacttatttttctagtaaatattaatgtattacatttcaaataatggtgcctgacatattgaataattattttctacagtgtacgtatgcaacaaagatattccatcatgcattagagtcagttctggctctgcctagctgtttacatttgcaaatgtagcaaacaaggtaatgaagcaactatttctattgcagtagatatccttttgtgtgtgtgtgtgtgcattaaagttgtaaacggtaacatgaaacaaatgaaagttcttgctataatggtatggaaaacaagaaggaaatgaaaatatttttatgcctacttaggaaaaaaagggtagcacttattcattccaagtacttttttttttttaatttttaagctcttaactcacattgttatgcttaagatgataaacatatatcctctttttattgctttgtctatgtttcatatgaaacatttcagaaattattttgataagtgttgctggaatctgcaacgctgatttttttttgcattctgtagtcgcatttgcactccatttttacattaattcgcagttgctttgtatcattgttttgtttgggttttgtttctttttcacagtgccgggtcttcgtttcttaaagttggatggcaggtagagttcaaccagttcgtgactgttgtagcgaatgaagttaaaaaaatgtctttctgatgttgtgttgtcattttcatttttgcatttttttgtttgcatattaaaaaaagagaaaagagaaagcaagagacagaaatcaggactaagtcctctgcttcagtttcattgttaacgggccttattctgatctcacctgtcgcgtagctctaatattcacataaactgaaataaagaagtggaatgaggagctttgacattcaaattatgtgatgtaatttatcttccttaggaattttgatggatgcatctcaaaatgtatagccagacttgagaggtgacaattaaagatctaaaaaagagaggagattcccccaaacaacaatatttaattttcttagtaaaaagaataacagaatgcatcgtggcaatccttaagcaacattatctatgtggactgcttaaatcagcaaaacaccagaagtttggttaacttgggcaatatgacaagtattactttttgggcaaaactactcattaagcaatttctctagtgtgtcggacacaaataggttctttatttttggcatgtatgcctttttattttcattcaattttttttttttctcagacagacatagtagtatcaactagcattggaaaatacatatcactattcttggaatatttatggtcagtctactttttagtaaaatatttttggatagcgttgacacgatagatcttattccatacttctttattattgataattttattttcattttttgctttcattattatacatattttggtggagaagaggttgggcttttttgaaagagacaaaaatttattataacactaaacactccttttttgacatattaaagcctttattccatctctcaagatatattataaaatttatttttttaatttaagatttctgaattattttatcttaaattgtgattttaaacgagctattatggtacggaactttttttaatgaggaatttcatgatgatttaggaattttctctcttggaaaaggcttcccctgtgatgaaaatgatgtgccagctaaaattgtgtgccatttaaaaactgaaaatattttaaaattatttgtctatattctaaattgagctttggatcaaactttaggccaggaccagctcatgcgttctcattcttccttttctcactctttctctcatcactcacctctgtattcattctgttgtttgggatagaaaaatcataaagagccaacccatctcagaacgttgtggattgagagagacactacatgactccaagtatatgagaaaaggacagagctctaattgataactctgtagttcaaaaggaaaagagtatgcccaattctctctacatgacatattgagattttttttaatcaacttttaagatagtgatgttctgttctaaactgttctgttttagtgaaggtagatttttataaaacaagcatggggattcttttctaaggtaatattaatgagaagggaaaaaagtatctttaacagctctttgttgaagcctgtggtagcacattatgtttataattgcacatgtgcacataatctattatgatccaatgcaaatacagctccaaaaatattaaatgtatatatattttaaaatgcctgaggaaatacatttttcttaataaactgaagagtctcagtatggctattaaaataattattagcctcctgttgtgtggctgcaaaacatcacaaagtgaccggtcttgagacctgtgaactgctgccctgtttagtaaataaaattaatgcatttctagagggggaatatctgccatccagtggtggaaatgtggagtaaagaagctggtggtctgcttctgtgctgtatgccagccttttgccttaagttgagaggaggtcaactttagctactgtctttggtttgagagccatggcaaaaaaaaaaaaagaaaaaaagatcaagtcgtctttggtgagccagtaaggtgaaagcttgctgactgtccaaggcacaagagaaaattgaggaattgaaatgcaacctgagtatcaaactaaatattctaatcaaaggtaggtactgttaggtggaattctatcagcaggcaactgcaaatgagaagaagatagaaggacgcccgtcgggactttggagggcattgttattttcccaaagaaagacggccaagggcagaggcatggattctttgcagagcacttccttttggtttttcagtactgtttcatagacagtgggctcacatgttcctgatagtgctgcagttgcttagaaagcatcccagttaattgcagtaattagaacttctggaatatgctagggcagaagtatgtcaagtatgtcacatgaagaaaatgtgaaattcaagagtaatccacacgtgagaaactagacaatgtacattcatgtgttctcttgaaaggaaagggagagctgtaagcttcactctgtcctacaccggagaaaagcaggaataactttaccgtggaaataatgtttagcttttatcagagaaaattgtccttctagagcatagagtcccaaaactcaattctggttttcccctgttttttttttttttttttttcccaacatatgaactgcagcatatcactttttctttttgtgcctcaggttcctcacctgtaaaattgaaaaatatatgtattaataatattattaataataataatggtaatgtagtacttgtttgtaaagcactttgagatccttggttgaaaggcaccataggagtgccaagtattattatgtggccaagggggttatttaaactgtcagttcccaaaggccaggaaaggttggggtcatttttcttaaagacgagctgtaaatatcaactaggcagccaatagtgttgactatgaagatgcaaaactattactaggctgataaaatcatagtttcttaatggctaccaataaggcaaatatcacaataataaacgccaaattccttagggcggactatttgacaaccacatggaaaactttgggggaggcatgaggggggaacatctcaaaatgccaatgtaaaatttaacttacagcaatattcaccagcagaaaatgtctttcatatggaatgatttcatgttgctaagaaaaagaattcaatttgtagtcctgatttgaatactagaatgttggctataatagttctgttcttacaacacatgaaattttttcgttttattttattttgttttcatagtgcatgttcatttctactcacaaacatgttcttggtgtatttcttatgcaaacaatcttcaggcagcaaagatgtctgttacatctaaacttgaataataaagttttaccaccagttacaca

SEQ ID NO: 524 - DNA, 1944 bp, HOMO SAPIENS
aagcccggcctggcggcggcggtggcggtagctgccgtggcggcctctgcgcatgctccgtcgcctgcccgccctggccgctcgccgcccgcccgcccgacggagacgtcccagctatctgacttcatgtgaaagatggctaatgcagaagtgagtgtcccagtgggggatgtggttgtggtacctactgaaggaaatgaaggggagaatcctgaagacactaaaacccaagtgattttgcagttacagcctgtgcaacaagggatttatgaagctgggtcggagaacaacacggcagttgtagcagtagaaactcacacgatacacaaaattgaagaagggattgatacaggcactatagaagcaaatgaggatatggaaattgcttaccccataacttgtggggagagcaaagccatcctcctctggaagaagtttgtatgtccaggaataaacgtgaagtgtgtcaagttcaatgatcagttgatcagccccaagcactttgttcatctggctggcaagtccactctgaaggactggaagagagctattcgtctgggtgggatcatgctcaggaaaatgatggactccggacagattgatttttaccaacatgacaaagtttgctccaatacctgcagaagcaccaaatttgatcttctgatcagcagtgcaagagctccagtgccaggacagcagacaagtgtggtgcagacacccacttcggctgatggtagcatcacgcagattgccatctcagaagagagcatggaagaggcagggctggaatggaactcagctctcaccgctgctgtcaccatggccacggaggagggtgtaaagaaagactcagaggaaatttcagaggacactttgatgttctggaaaggaatagctgatgtagggctgatggaagaggttgtctgcaatatacagaaggaaatagaggagctactcaggggagttcagcagcggctcatccaggctcccttccaagtcacagatgctgctgttctcaacaatgtagcacacacatttggcctaatggacacagtcaagaaggttttagacaacagaaggaaccaagtagagcagggagaagaacagtttctctatactctgacagacttggaacgccagttggaggagcagaagaagcaaggccaggatcacaggctgaaatctcagacagttcaaaatgtggtactgatgcctgtgagcactcctaagcctccaaaaaggccccggctccagcggccagcctccaccactgtcttgagcccttctcctcctgtccagcagcctcagttcacagtcatctcacccatcaccatcaccccagtgggtcagtcattttccatgggcaatattccagtggccaccctcagccagggctccagtcctgtgactgtccacacactgccttctggccctcagctcttccgctatgccacagtggtctcctctgccaagagcagctcaccagacacagtgaccatccacccttcatctagcttggcgctgctgagctctactgccatgcaggatgggagtacactgggcaacatgaccaccatggttagccctgtggaattggtggccatggagtccggcctaacctcggcaattcaggctgttgaaagcacctcagaggatgggcagaccatcattgagattgatccagccccggacccagaagctgaagatactgagggcaaagcagtcatcttggagacagagctgaggactgaggagaaagttgtggctgagatggaagaacaccagcatcaagttcacaatgtggagattgtggtcttagaggattaactggggatctcagggccaggagttatgttttgatttggaattttaattatttgtttatttttatcattgtcccactcatttccacataggacccttttttaaaaaaaaaaaaaaaaa

SEQ ID NO: 525 - DNA, 1835 bp, HOMO SAPIENS
ggtgaccaagatggcggcggagctggtggaggccaaaaacatggtgatgagttttcgagtctccgaccttcagatgctcctgggtttcgtgggccggagtaagagtggactgaagcacgagctcgtcaccagggccctccagctggtgcagtttgactgtagccctgagctgttcaagaagatcaaggagctgtacgagacccgctacgccaagaagaactcggagcctgccccacagccgcaccggcccctggaccccctgaccatgcactccacctacgaccgggccggcgctgtgcccaggactccgctggcaggccccaatattgactaccccgtgctctacggaaagtacttaaacggactgggacggttgcccgccaagaccctcaagccagaagtccgcctggtgaagctgccgttctttaatatgctggatgagctgctgaagcccaccgaattagtcccacagaacaacgagaagcttcaggagagcccgtgcatcttcgcattgacgccaagacaggtggagttgatccggaactccagggaactgcagcccggagttaaagccgtgcaggtcgtcctgagaatctgttactcagacaccagctgccctcaggaggaccagtacccgcccaacatcgctgtgaaggtcaaccacagctactgctccgtcccgggctactacccctccaataagcccggggtggagcccaagaggccgtgccgccccatcaacctcactcacctcatgtacctgtcctcggccaccaaccgcatcactgtcacctgggggaactacggcaagagctactcggtggccctgtacctggtgcggcagctgacctcatcggagctgctgcagaggctgaagaccattggggtaaagcacccggagctgtgcaaggcactggtcaaggagaagctgcgccttgatcctgacagcgagatcgccaccaccggtgtgcgggtgtccctcatctgtccgctggtgaagatgcggctctccgtgccctgccgggcagagacctgcgcccacctgcagtgcttcgacgccgtcttctacctgcagatgaacgagaagaagcccacctggatgtgccccgtgtgcgacaagccagccccctacgaccagctcatcatcgacgggctcctctcgaagatcctgagcgagtgtgaggacgccgacgagatcgagtacctggtggacggctcgtggtgcccgatccgcgccgaaaaggagcgcagctgcagcccgcagggcgccatcctcgtgctgggcccctcggacgccaatgggctcctgcccgcccccagcgtcaacgggagcggtgccctgggcagcacgggtggcggcggcccggtgggcagcatggagaatgggaagccgggcgccgatgtggtggacctcacgctggacagctcatcgtcctcggaggatgaggaggaggaggaagaggaggaggaagacgaggacgaagaggggccccggcccaagcgccgctgccccttccagaagggcctggtgccggcctgctgaccccggccgcacactcgactttcctggtgctcaccacgcagaggggcacgggccagcctcgggcgcagagggaggagtgacctttctttttctttttattgtcgttcgttttgtttttccacccttttgcctggctcctggcacctgtacctctggactctcctatcgggggattaaaaaaaaaagtaaaatgaaaaaaaaaaaaaaaaaaaaaaaaaaaaaaaaaaaaaaaaaaaaaaaaaaaaaaaaaaaaaaaaaaaaaaaaaaaaaaaaaaaaaaaaaaaaaaaaaaa

SEQ ID NO: 526 - DNA, 564 bp, HOMO SAPIENS
  misc_feature (46)..(46): n is a, c, g, or t
  misc_feature (97)..(97): n is a, c, g, or t
tggctgttaccaggacaaccggaggcgattgaccgttatctgcggnttggagccgttagcgggagaggcagagatattcagaggtcttttaggatgngctaaagggtcgtgagggctctcttaaaattttcttcacaagcggttatccagtcgtgccccgcggccctgctgctggccccggggatctgagtcgtaccctcttgtttttctctgagtcagtcttaaggtgaaatgaagtgtggcccagtggctcctcactgtcgcttctctagttttctgcctccttttagaaaattgaattgaaaagacaggatgaagtggacacagcatgtgaagacaattctttcaagaagtttggctgtcaaggaaaacagagaatgtgctaaagaacatacagacacagagcagacaggccacctttgcaaccacatggaggtttgtctgatattgaagctaaagaagctaagctggaagacagagagaccaagtcctgatgacattgtttgaacccagagatccagacatgcctgaaaactagttttaccactggacttatccgttgaa

SEQ ID NO: 527 - DNA, 2315 bp, HOMO SAPIENS
cgtaggcgctcacgtgattactcgcttacgtgagcagaagtagttctggtcgtcgtctaccgtctcgctatagccgtttgagggaagaaggaggaaaattacccgctacaccaaaattgcattgagccaaacttgccaccaagagcccaacaatcaccatgatgctgagcacggaaggcagggaggggttcgtggtgaaggtcaggggcctaccctggtcctgctcagccgatgaagtgatgcgcttcttctctgattgcaagatccaaaatggcacatcaggtattcgtttcatctacaccagagaaggcagaccaagtggtgaagcatttgttgaacttgaatctgaagaggaagtgaaattggctttgaagaaggacagagaaaccatgggacacagatacgttgaagtattcaagtctaacagtgttgaaatggattgggtgttgaagcatacaggtccgaatagccctgatactgccaacgatggcttcgtccggcttagaggactcccatttggctgtagcaaggaagagattgttcagttcttttcagggttggaaattgtgccaaatgggatgacactgccagtggactttcaggggcgaagcacaggggaagcctttgtgcagtttgcttcacaggagatagctgagaaggccttaaagaaacacaaggaaagaatagggcacaggtacattgagatcttcaagagtagccgagctgaagttcgaacccactatgatccccctcgaaagctcatggctatgcagcggccaggtccctatgataggccgggggctggcagagggtataatagcattggcagaggagctgggtttgaaaggatgaggcgtggtgcctatggtggagggtatggaggctatgatgactatggtggctataatgatggatatggctttgggtctgatagatttggaagagacctcaattactgtttttcaggaatgtctgatcatagatacggagatggtgggtccagtttccagagcaccacagggcactgtgtacacatgagggggttaccttacagagccactgagaatgatatttataatttcttctcacctcttaatcccatgagagtacatattgaaattggacccgatggcagagttaccggtgaggcagatgttgaatttgctactcatgaagatgctgtggcagctatggcaaaagacaaagctaatatgcaacacagatatgtggagctcttcttaaattctactgcaggaacaagtgggggtgcttacgatcacagctatgtagaactttttttgaattctacagcaggggcaagtggtggcgcttatggtagccaaatgatgggagggatgggcttatccaaccagtctagttatggaggtcctgctagccagcagctgagtggtggttatggaggtggttatggtggtcagagcagtatgagtggatatgaccaagttctgcaggaaaactccagtgactatcagtcaaaccttgcttaggtagagaaggagcactaaatagctactccagatataaaagctgtacatttgtgggagttgaatagaatgggagggatgtttagtatatccagtatgattggtaaatgggaaatataattgattctgatcactcttggtcagcttctctttctttatctttctttctccttttttaagaaaacgagttaagtttaacagttttgcattacaggcttgtgattcatgcttactgtaaagtggaagttgagattattttaaaacttcaagctcagtaattttgaacactgaaacattcatctaggacataataacaaagttcagtattgaccataactgttaaaacaatttttagctttcctcaagttagttatgttgtaggagtgtacctaagcagtaagcgtatttaggttaatgcagtttcacttatgttaaatgttgctcttataccacaaatacattgaaaacttcggatgcatgttgagaaacatgcctttctgtaaaactcaaatataggagctgtgtctacgattcaaagtgaaaacatttggcatgtttgttaattctagctttttggtttaatatcctgtaaggcacgtgagtgtacactttttttttttttaaggatacgggacaattttaagatgtaataccaatactttagaagtttggtcgtgtcgtttgtatgaaaatctgaggctttggtttaaatctttccttgtattgtgatttccatttagatgtattgtactaagtgaaacttgttaaataaatcttccttttaaaaactggaaaaaaaaaaaaaaaaaa

SEQ ID NO: 528 - DNA, 4669 bp, HOMO SAPIENS
ctgcttgtcaaaaggcggcagcggagccgtgtgcgccgggagcgcggaacagcttgtccacccgccggccggaccagaagcctttgggtctgaagtgtctgtgagacctcacagaagagcacccctgggctccacttacctgccccctgctccttcagggatggaggcaatggcggccagcacttccctgcctgaccctggagactttgaccggaacgtgccccggatctgtggggtgtgtggagaccgagccactggctttcacttcaatgctatgacctgtgaaggctgcaaaggcttcttcaggcgaagcatgaagcggaaggcactattcacctgccccttcaacggggactgccgcatcaccaaggacaaccgacgccactgccaggcctgccggctcaaacgctgtgtggacatcggcatgatgaaggagttcattctgacagatgaggaagtgcagaggaagcgggagatgatcctgaagcggaaggaggaggaggccttgaaggacagtctgcggcccaagctgtctgaggagcagcagcgcatcattgccatactgctggacgcccaccataagacctacgaccccacctactccgacttctgccagttccggcctccagttcgtgtgaatgatggtggagggagccatccttccaggcccaactccagacacactcccagcttctctggggactcctcctcctcctgctcagatcactgtatcacctcttcagacatgatggactcgtccagcttctccaatctggatctgagtgaagaagattcagatgacccttctgtgaccctagagctgtcccagctctccatgctgccccacctggctgacctggtcagttacagcatccaaaaggtcattggctttgctaagatgataccaggattcagagacctcacctctgaggaccagatcgtactgctgaagtcaagtgccattgaggtcatcatgttgcgctccaatgagtccttcaccatggacgacatgtcctggacctgtggcaaccaagactacaagtaccgcgtcagtgacgtgaccaaagccggacacagcctggagctgattgagcccctcatcaagttccaggtgggactgaagaagctgaacttgcatgaggaggagcatgtcctgctcatggccatctgcatcgtctccccagatcgtcctggggtgcaggacgccgcgctgattgaggccatccaggaccgcctgtccaacacactgcagacgtacatccgctgccgccacccgcccccgggcagccacctgctctatgccaagatgatccagaagctagccgacctgcgcagcctcaatgaggagcactccaagcagtaccgctgcctctccttccagcctgagtgcagcatgaagctaacgccccttgtgctcgaagtgtttggcaatgagatctcctgactaggacagcctgtggcggtgcctgggtggggctgctcctccagggccacgtgccaggcccggggctggcggctactcagcagccctcctcaccccgtctggggttcagcccctcctctgccacctcccctatccacccagcccattctctctcctgtccaacctaacccctttcctgcgggcttttccccggtcccttgagacctcagccatgaggagttgctgtttgtttgacaaagaaacccaagtgggggcagagggcagaggctggaggcagggccttgcccagagatgcctccaccgctgcctaagtggctgctgactgatgttgagggaacagacaggagaaatgcatccattcctcagggacagagacacctgcacctccccccactgcaggccccgcttgtccagcgcctagtggggtctccctctcctgcctactcacgataaataatcggcccacagctcccaccccacccccttcagtgcccaccaacatcccattgccctggttatattctcacgggcagtagctgtggtgaggtgggttttcttcccatcactggagcaccaggcacgaacccacctgctgagagacccaaggaggaaaaacagacaaaaacagcctcacagaagaatatgacagctgtccctgtcaccaagctcacagttcctcgccctgggtctaaggggttggttgaggtggaagccctccttccacggatccatgtagcaggactgaattgtccccagtttgcagaaaagcacctgccgacctcgtcctccccctgccagtgccttacctcctgcccaggagagccagccctccctgtcctcctcggatcaccgagagtagccgagagcctgctcccccaccccctccccaggggagagggtctggagaagcagtgagccgcatcttctccatctggcagggtgggatggaggagaagaattttcagaccccagcggctgagtcatgatctccctgccgcctcaatgtggttgcaaggccgctgttcacccacagggctaagagctagcgctgccgcaccccagagtgtgggaagggagagcggggcagtctcgggtggctagtcagagagagtgtttgggggttccgtgatgtagggtaaggtgccttcttattctcactccaccacccaaaagtcaaaaggtgcctgtgaggcaggggcggagtgatacaacttcaagtgcatgctctctgcagccagcccagcccagctggtgggaagcgtctgtccgtttactccaaggtggggtctttgtgagagtgagctgtaggtgtgcgggaccggtacagaaaggcgttcttcgaggtggatcacagaggcttcttcagatcagtgcttgagtttggggaatgcggccgcattccctgagtcaccaggaatgttaaagtcagtgggaacgtgactgccccaactcctggaagctgtgtccttgcacctgcatccgtagttccctgaaaacccagagaggaatcagacttcacactgcaagagccttggtgtccacctggccccatgtctctcagaattcttcaggtggaaaaacatctgaaagccacgttccttactgcagaatagcatatatatcgcttaatcttaaatttattagatatgagttgttttcagactcagactccatttgtattatagtctaatatacagggtagcaggtaccactgatttggagatatttatggggggagaacttacattgtgaaacttctgtacattaattattattgctgttgttattttacaagggtctagggagagacccttgtttgattttagctgcagaacgtattggtccagcttgctcttcagtgggagaaaacacttgtaagttgctaaacgagtcaatcccctcattcaggaaaactgacagaggagggcgtgactcacccaagcatatataactagctagaagtgggccaggacaggcccggcgcggtggctcacgcctgtaatcccagcagtttgggaggtcgaggtaggtggatcacctgaggtcgggagttcgagaccaacctgaccaacatggagaaaccctgtctctattaaaaatacaaaaaaaaaaaaaaaaaaaatagccgggcatggtggcgcaagcctgtaatcccagctactcaggaggctgaggcagaagaattgaacccaggaggtggaggttgcagtgagctgagatcgtgccgttactctccaacctggacaacaagagcgaaactccgtcttagaagtggaccaggacaggaccagattttggagtcatggtccggtgtccttttcactacaccatgtttgagctcagacccccactctcattccccaggtggctgacccagtccctgggggaagccctggatttcagaaagagcaagtctggatctgggaccctttccttccttccctggcttgtaactccaccaacccatcagaaggagaaggaaggagactcacctctgcctcaatgtgaatcagaccctaccccaccacgatgtggccctggcctgctgggctctccacctcagccttggataatgctgttgcctcatctataacatgcatttgtctttgtaatgtcaccaccttcccagctctccctctggccctgccttcttcggggaactcctggaaatatcagttactcagccctgggccccaccacctaggccactcctccaaaggaagtctaggagctgggaggaaaagaaaagaggggaaaatgagtttttatggggctgaacggggagaaaaggtcatcatcgattctactttagaatgagagtgtgaaatagacatttgtaaatgtaaaacttttaaggtatatcattataactgaaggagaaggtgccccaaaatgcaagattttccacaagattcccagagacaggaaaatcctctggctggctaactggaagcatgtaggagaatccaagcgaggtcaacagagaaggcaggaatgtgtggcagatttagtgaaagctagagatatggcagcgaaaggatgtaaacagtgcctgctgaatgatttccaaagagaaaaaaagtttgccagaagtttgtcaagtcaaccaatgtagaaagctttgcttatggtaataaaaatggctcatacttatatagcacttactttgttgcaagtactgctgtaaataaatgctttatgcaaaccaaaaaaaaaaaaaaaaaa

SEQ ID NO: 529 - DNA, 10835 bp, HOMO SAPIENS
caaaaatcagtctgatctcgggaaacctggagaaatttattttctgtactctaatgttctttcattttggtgaccatcaaggtgctgggagaggaattagatggctgtaattcaaagttaatggaattagatgcagcagtacagaaattcttggaacagaatggccaactgggtaagccactggccaagaagataggaaaactgactgaacttcaccagcagaccattagacaagctgagaatcggctctccaagctcaatcaggcagcatcacatttagaagaatacaatgaaatgcttgaattaattttgaagtggattgaaaaagctaaagtcttggctcatggaactattgcatggaattctgcaagccagcttcgggaacaatatattttgcatcagaccctgctagaagaatccaaagaaattgacagtgagctggaagcaatgactgagaaattacagtacctcactagcgtgtactgtacagaaaaaatgtctcagcaagtggcagaactgggacgggagactgaggagttgcgacagatgatcaaaattcgtttgcagaacctccaagatgcagctaaggatatgaaaaaatttgaagcagagttgaaaaagttacaagctgccttggagcaagcccaggcaacactgacttctccagaagttggacgtctcagtctcaaggagcagctctctcatcggcagcatttgttgtctgagatggagtcactgaagccgaaggtgcaagcagtgcagctctgccagagtgccctccggatccccgaggatgtggttgccagcttacctctctgtcatgctgctctgcggctgcaggaagaggccagccggctgcagcacaccgccatccagcagtgtaacatcatgcaggcagctgtggtacaatatgaacaatatgagcaagaaatgaaacatctccagcaactgatagaaggagctcacagagagattgaggataaacctgttgccaccagtaacatacaggagctgcaggctcagatttctcggcatgaggagctggcgcagaaaattaagggctaccaggagcagatcgcttctttgaattccaagtgcaagatgctgacgatgaaagccaagcacgccaccatgctgctgacggtgaccgaggtcgaggggctggcggaagggacagaggacctggatggggagctcctccccacgccttcggcccacccctctgtggtcatgatgactgcaggtcgctgtcacactttgctgtcaccggtcactgaggagtctggggaggagggaaccaacagtgagatttcctctccacctgcctgtcgctccccttcacctgtggctaatacagatgcttctgttaaccaggacattgcatattaccaagccttgtctgctgagaggttgcagacagatgctgcaaaaattcaccccagcacatccgcatcccaggagttctatgaaccgggattggagccatccgctactgccaaactgggtgatttgcagcgttcttgggaaaccttaaagaatgtgatcagtgagaagcagcgcacactctatgaagctttggaacgccagcagaagtaccaggactccctccagtccatctctacgaagatggaggccattgagctgaaactcagtgagagcccagagcctggcaggagtccagaaagccagatggctgaacatcaggcattgatggatgagattctcatgctccaggatgaaatcaatgagctccagtcctctctcgcagaggagctggtatccgagtcttgtgaggccgaccctgcggagcagctggccttgcagtccacgctcactgtcttagccgagcgaatgtccaccatcaggatgaaagcctcggggaaacggcagcttttggaggagaagttgaatgatcagctggaggaacaaaggcaggaacaggccctgcagaggtatcgctgtgaagccgatgagctggacagctggctcttgagtaccaaggccactctggacactgcgctgagtccacccaaggagcccatggacatggaggcccagcttatggactgccagaatatgctggtggaaatagagcagaaggtggtggctttatcagaactgtcagtccacaatgagaacctgctgctggagggcaaagctcacaccaaggacgaggccgagcagctggctggaaagctgagaaggctcaaggggagcctgctggagctgcagagagccctgcatgataagcagctcaacatgcagggaacagcacaggagaaggaggagagcgatgttgacctaacagccacgcagagccccggcgtccaggaatggctggcccaagctcgcaccacatggacccagcagcggcagagcagtctccagcaacaaaaagagttagaacaggaattagccgagcagaagagtctccttcgctcagtagccagtcgtggagaggagattctaattcaacattcggcggcagagacctctggtgatgctggcgaaaaacctgatgtgttatcccaggagttggggatggaaggggagaaatcatccgctgaagaccagatgagaatgaaatgggaaagcctacatcaagaatttagtaccaagcagaaactactacagaatgttctggaacaggaacaagagcaagtgctttatagcaggccaaatcgactcttgtctggtgtgccactgtacaaaggggacgtgccaacccaagataaatctgcagttacatctttgctggatggactgaaccaagccttcgaggaggtttcatcccagagtggaggggcaaagaggcagagtatacacttggagcagaagttgtatgatggagtctcagccacctctacttggttggatgacgttgaagaacgtttatttgttgccacagcacttttaccagaagaaacagagacttgtctcttcaaccaagagattcttgccaaagacattaaggaaatgtctgaagaaatggataagaacaaaaacttgttttcccaagcttttccagagaatggtgataatcgagatgttattgaagatactttgggttgtcttttgggcaggttatccttgctagactcagtagtgaatcaacgatgtcatcagatgaaagaaagacttcagcaaatactaaatttccagaatgatctgaaagtgctgtttacatcactggctgacaacaaatacatcattctgcaaaaactggcaaatgtgtttgaacagcccgtagcagaacaaatagaggcaatacaacaggctgaagatggactcaaagaatttgatgcaggaatcattgaattaaagaggcgtggtgacaagctacaggtcgagcagccgtccatgcaagaactctccaagctccaggacatgtatgatgagctgatgatgatcattggctcccggaggagtggtctgaatcagaaccttacactcaagagtcagtatgagagggccctacaagatctggctgacctgctagaaactggtcaggagaagatggcaggagaccagaaaatcatcgtgtcttccaaagaggaaatccagcaactacttgacaaacataaggaatactttcagggcctggaatctcatatgatcttgactgaaacactcttcagaaagataatcagctttgcagtccaaaaggaaacccagttccatacagagctgatggctcaggcttctgctgtactgaaacgggctcacaagaggggtgtggagctggagtacattctagagacgtggtcccatctggatgaggaccagcaggagctcagcagacagctggaggtggtggaaagcagcatcccaagcgtgggtctggtggaggagaacgaggacaggcttattgaccgcataacactctaccagcatttaaaatctagccttaatgaataccagcccaaattatatcaagtattagatgatgggaaacgacttctgatatccatcagctgctcagatctagaaagccaactaaatcaacttggagagtgctggctaagtaacaccaataaaatgtctaaggaacttcacagactggaaacaatattgaaacactggaccagatatcaaagtgaatctgcagatctaattcactggttacaatctgcaaaagaccggctagaattttggactcagcaatctgtgacagtcccacaagagctggaaatggtccgtgatcatctaaatgctttcctggagttttctaaagaagtggatgcccaatcttccctgaaatcatctgttctgagtactggaaatcagctccttcgactaaaaaaggtggacacagccacgctgcgctctgagctgtcgcgcattgatagccagtggactgacctgctaaccaatatcccagccgtccaggagaagctccaccagctccagatggataaactgccttcccgccatgccatttctgaagtcatgagttggatttctctaatggaaaatgttattcagaaggatgaagataatattaaaaattccataggttacaaggcaattcatgaataccttcagaaatataagggttttaagatagacattaactgtaaacagctgacagtggattttgtgaaccagtccgtgctacaaatcagcagtcaggatgtggaaagtaagcgtagtgataagactgattttgctgagcaacttggagcaatgaataaaagttggcaaattctgcaaggtctagtaactgagaagatccagctgttggaaggcttattggaatcttggtcagaatatgaaaataatgtacaatgtctgaaaacatggtttgaaacccaggaaaagagactaaaacaacagcatcgaattggagatcaggcttctgttcaaaatgcactgaaagactgtcaggatctggaagatttgattaaagcaaaagaaaaagaagtagagaaaattgagcagaatggacttgctttgattcagaacaagaaagaagacgtctctagcattgtcatgagcacactgcgagagctcggccaaacctgggcaaatttagatcacatggttggacaattaaagatactgctgaaatcagtgcttgaccaatggagtagtcacaaagtggcctttgacaagataaacagttacctcatggaggccagatactctctttcccgattccgtctgctgactggctccttagaagctgtgcaagttcaggtggacaatcttcagaatctccaagatgatctggaaaaacaggaaaggagcttacagaaatttggctctatcaccaaccaattattaaaagagtgtcacccacccgtgacagaaactcttaccaatacactgaaagaagtcaacatgagatggaataacttgctggaagagattgctgagcagctacagtccagcaaggccctacttcagctttggcaaagatacaaggactactccaaacagtgtgcttcgacagttcagcagcaggaggatcgaaccaatgagctgttgaaggcagccacaaacaaggacattgccgatgatgaggttgccacatggattcaagattgcaacgacctcctcaaaggactgggcacagttaaagattccctcttttttctccatgagctgggagagcaactgaagcaacaagtggatgcttccgcagcatcagctattcaatcggatcaactctctttgagtcaacacttgtgtgccctggagcaagctctctgcaaacagcagacttcattacaggctggagttcttgattatgaaacctttgccaagagtttagaagctttggaggcctggatagtggaagctgaagaaatactacaagggcaggaccctagccactcatctgacctctccacaatccaggaaaggatggaagaacttaagggacagatgttaaaattcagcagcatggctccagatttagaccgtctaaatgagcttggatataggttacccttgaatgataaggaaatcaaaagaatgcagaatctgaaccgccattggtctctgatctcctctcagactacagaaagattcagcaagttgcagtcatttttgctacaacatcagactttcttggaaaaatgtgaaacatggatggaattcctagttcagacagaacaaaagttagcagtagagatttcaggaaattatcagcaccttttggaacagcagagagcacacgagttgtttcaagccgagatgttcagtcgtcagcagattttgcactcaatcattattgatgggcaacgtcttctagaacaaggtcaagttgatgacagggatgaattcaacctgaaattgacactcctcagtaatcaatggcagggagtgattcgcagggcccagcagaggcgggggatcattgacagccagattcgccagtggcagcgctatagggagatggcagaaaagcttcgtaaatggttggttgaagtgtcctacctccccatgagtggtctcggaagtgttcctataccactgcaacaagcaaggaccctctttgatgaagtgcagttcaaagaaaaagtgtttctgcggcaacaaggcagctacatcctgactgtggaggctggcaagcaactccttctctcggcggacagtggcgctgaggccgccttgcaggccgaactcgctgaaatccaagagaaatggaaatcagccagcatgcggctggaagaacagaagaaaaaactagccttcttgttgaaagactgggaaaaatgtgagaaaggaatagcagattccctggagaaactacgaactttcaaaaagaagctttcgcagtctctcccggatcaccatgaagagctccatgcagaacaaatgcgttgcaaggaattagaaaatgcagttgggagctggacagatgacttgacccagttgagcctgctgaaggacaccctctctgcctatatcagtgctgatgatatctccattcttaatgaacgcgtagagcttctgcaaaggcagtgggaagaactatgccaccagctctccttaaggcggcagcaaataggtgaaagattgaatgaatgggcagtcttcagtgaaaagaacaaggaactctgtgagtggttgactcaaatggaaagcaaagtttctcagaatggagacattctcattgaagaaatgatagagaagctcaagaaggattatcaagaggaaattgctattgctcaagagaacaaaatacagctccaacaaatgggagaacgacttgctaaagccagccatgaaagcaaagcatctgagattgaatacaagctgggaaaggtcaacgaccggtggcagcatctcctggacctcattgcagccagggtgaagaagctgaaggagaccctggtagccgtgcagcagcttgataagaacatgagcagcctgaggacctggctcgctcacatcgagtcagagctggccaagccaatagtctacgattcctgtaactcggaagaaatacagagaaagcttaatgagcagcaggagcttcagagagacatagagaagcacagtacaggtgttgcatctgtcctcaacctgtgtgaagtcctgctgcacgactgtgacgcctgtgccactgatgccgagtgtgactctatacagcaggctacgagaaacctggaccggcggtggagaaacatttgtgctatgtccatggaaaggaggctgaaaatcgaagagacgtggcgattgtggcagaaatttctggatgactattcacgttttgaagattggctgaagtcttcagaaaggacagctgcttttcccagctcttctggggtgatctatacagttgccaaggaagaactaaagaaatttgaggctttccagcgacaggtccacgagtgcctgacgcagctggaactgatcaacaagcagtaccgccgcctggccagggagaaccgcactgattcagcatgtagcctcaaacagatggttcacgaaggcaaccagagatgggacaacctgcaaaagcgtgtcacctccatcttgcgcagactcaagcattttattggccagcgtgaggagtttgagactgcgcgggacagcattctggtctggctcacagagatggatctgcagctcactaatattgaacatttttctgagtgtgatgttcaagctaaaataaagcaactcaaggccttccagcaggaaatttcactgaaccacaataagattgagcagataattgcccaaggagaacagctgatagaaaagagtgagcccttggatgcagcgatcatcgaggaggaactagatgagctccgacggtactgccaggaggtcttcgggcgtgtggaaagataccataagaaactgatccgcctgcctctcccagacgatgagcacgacctctcagacagggagctggagctggaagactctgcagctctgtcggacctgcactggcacgaccgctctgcagacagcctgctttctccacagccttcctccaatctctccctctcgctcgctcagcccctccggagcgagcggtcaggacgagacaccccggctagtgtggactccatccccctggagtgggatcacgactatgacctcagtcgggacctggagtctgcaatgtccagagctctgccctctgaggatgaagaaggtcaggatgacaaagatttctacctccggggagctgttggcttatcaggggaccacagtgccctagagtcacagatccgacaactgggcaaagccctggatgatagccgttttcagatacagcaaaccgaaaatatcattcgcagcaaaactcccacggggccggagctagacaccagctacaaaggctacatgaaactgctgggcgaatgcagtagcagtatagactccgtgaagagactggagcacaaactgaaggaggaagaggagagccttcctggctttgttaacctgcatagtaccgaaacccaaacggctggtgtgattgaccgatgggagcttctccaggcccaggcattgagcaaggagttgaggatgaagcagaacctccagaagtggcagcagtttaactcagacttgaacagcatctgggcctggctgggggacacggaggaggagttggaacagctccagcgtctggaactcagcactgacatccagaccatcgagctccagatcaaaaagctcaaggagctccagaaagctgtggaccaccgcaaagccatcatcctctccatcaatctctgcagccctgagttcacccaggctgacagcaaggagagccgggacctgcaggatcgcttgtcgcagatgaatgggcgctgggaccgagtgtgctctctgctggaggagtggcggggcctgctgcaggatgccctgatgcagtgccagggtttccatgaaatgagccatggtttgcttcttatgctggagaacattgacagaaggaaaaatgaaattgtccctattgattctaaccttgatgcagagatacttcaggaccatcacaaacagcttatgcaaataaagcatgagctgttggaatcccaactcagagtagcctctttgcaagacatgtcttgccaactactggtgaatgctgaaggaacagactgtttagaagccaaagaaaaagtccatgttattggaaatcggctcaaacttctcttgaaggaggtcagtcgtcatatcaaggaactggagaagttattagacgtgtcaagtagtcagcaggatttgtcttcctggtcttctgctgatgaactggacacctcagggtctgtgagtcccacatcaggaaggagcaccccaaacagacagaaaacgccacgaggcaagtgtagtctctcacagcctggaccctctgtcagcagtccacatagcaggtccacaaaaggtggctccgattcctccctttctgagccagggccaggtcggtccggccgcggcttcctgttcagagtcctccgagcagctcttccccttcagcttctcctgctcctcctcatcgggcttgcctgccttgtaccaatgtcagaggaagactacagctgtgccctctccaacaactttgcccggtcattccaccccatgctcagatacacgaatggccctcctccactctgaactaagcagatgccatctgcagaagtgctggtagcataaggaggatcgggtcataagcaatcccaaactaccaacaagaggaccttgatcttggcgaaagccctcggtgtggcagctttagccctcctccagatcacatgtgtgcaaattatggcttcagaggtggaagataaacagtgacgggggaacaaacagacaacaagaaggtttggaagaaatctggtttgagactctgaaccttagcactaaggagattgagtaaggacctccaaagttccccggactcatgaattctgggcccttggcccattctgtgcacagccaaggacttcagtagaccatctgggcagctttcccatggtgctgctccaaccatcagataaatgaccctcccaagcaccatgtcagtgtcgtacaatctaccaaccaaccagtgctgaagagattttagaaccttgtaacatacaatttttaagagcttatatggcagcttcctttttaccttgttttcctttggggcatgatgttttaacctttgctttagaagcacaagctgtaaatctaaaaggcacttttttttagaggtataaagaaaaactagatgtaataaataagatcatggaaggctttatgtgaaaaaagttgaatgttatagtaaaaaaaaaaagatatttatgtatgtacagtttgctaaagccaagttttgtttgtattgatttctttgcatttattatagatattataaaata

SEQ ID NO: 530 - DNA, 1759 bp, HOMO SAPIENS
gcgtctgcgcctgcgcgcaagagaggcggggccagcgctcggcatggcggagccagatctggagtgcgagcagatccgtctgaagtgtattcctgggacgatgccggagtgtgaaggagtttgagaagctgaaccgcattggagagggtacctacggcattgtgtatcgggcccgggacacccagacagatgagattgtcgcactgaagaaggtgcggatggacaaggagaaggatggcatccccatcagcagcttgcgggagatcacgctgctgctccgcctgcgtcatccgaacatcgtggagctgaaggaggtggttgtggggaaccacctggagagcatcttcctggtgatgggttactgtgagcaggacctggccagcctcctggagaatatgccaacacccttctcggaggctcaggtcaagtgcatcgtgctgcaggtgctccggggcctccagtatctgcacaggaacttcattatccacagggacctgaaggtttccaacttgctcatgaccgacaagggttgtgtgaagacagcggatttcggcctggcccgggcctatggtgtcccagtaaagccaatgacccccaaggtggtcactctctggtaccgagcccctgaactgctgttgggaaccaccacgcagaccaccagcatcgacatgtgggctgtgggctgcatactggccgagctgctggcgcacaggcctcttctccccggcacttccgagatccaccagatcgacttgatcgtgcagctgctgggcacgcccagtgagaacatctggccgggcttttccaagctgccactggtcggccagtacagcctccggaagcagccctacaacaacctgaagcacaagttcccatggctgtcggaggccgggctgcgcctgctgcacttcctgttcatggcgacggccggggactgcctggagagctcctatttcaaggagaagcccctaccctgtgagccggagctcatgccgacctttccccaccaccgcaacaagcgggccgccccagccacctccgagggccagagcaagcgctgtaaaccctgacggtgggcctggcacacgcctgtattcccacaccaggtcttccgatcagtggtgtctgtgaagggtgccgcgagccaggctgaccaggcgcccgggatccagctcatccccttggctgggaacatcctccactgacttcctcccactgtctgccctgaacccactgctgcccccagaaaaaggccgggtgacaccggggggctcccagcccgtgcaccctggaagggcaggtctggcggctccatccgtggctgcaggggtctcatgtggtcctcctcgctatgttggaaatgtgcaaccactgcttcttgggaggagtggtgggtgcagtccccccgctgtctttgagttgtggtggacgctggcctgggatgagagggcccagaagaccttcgtatcccctctcagtcgcccggggctgtcccgtgcatgggttggctgtggggaccccaggtgggcctggcaggactccagatgaggacaagagggacaaggtatggggtgggagccacaattgaggataccccgagactaccaggagagccctgggctggaggctgagctgcatccctgctccccacatggaggacccaacaggaggccgtggctctgatgctgagcgaagctataggctcttgttggataaaagcttttttaacagacatggtttcaaaaaaaaaaaaaaaaaa

SEQ ID NO: 531 - DNA, 3213 bp, HOMO SAPIENS
atgtgcttcagtttcataatgcctcctgctatggcagacatccttgacatctgggcggtggattcacagatagcatctgatggctccatacctgtggatttccttttgcccactgggatttatatccagttggaggtacctcgggaagctaccatttcttatattaagcagatgttatggaagcaagttcacaattacccaatgttcaacctccttatggatattgactcctatatgtttgcatgtgtgaatcagactgctgtatatgaggagcttgaagatgaaacacgaagactctgtgatgtcagaccttttcttccagttctcaaattagtgacaagaagttgtgacccaggggaaaaattagactcaaaaattggagtccttataggaaaaggtctgcatgaatttgattccttgaaggatcctgaagtaaatgaatttcgaagaaaaatgcgcaaattcagcgaggaaaaaatcctgtcacttgtgggattgtcttggatggactggctaaaacaaacatatccaccagagcatgaaccatccatccctgaaaacttagaagataaactttatgggggaaagctcatcgtagctgttcattttgaaaactgccaggacgtgtttagctttcaagtgtctcctaatatgaatcctatcaaagtaaatgaattggcaatccaaaaacgtttgactattcatgggaaggaagatgaagttagcccctatgattatgtgttgcaagtcagcgggagagtagaatatgtttttggtgatcatccactaattcagttccagtatatccggaactgtgtgatgaacagagccctgccccattttatacttgtggaatgctgcaagatcaagaaaatgtatgaacaagaaatgattgccatagaggctgccataaatcgaaattcatctaatcttcctcttccattaccaccaaagaaaacacgaattatttctcatgtttgggaaaataacaaccctttccaaattgtcttggttaagggaaataaacttaacacagaggaaactgtaaaagttcatgtcagggctggtctttttcatggtactgagctcctgtgtaaaaccatcgtaagctcagaggtatcagggaaaaatgatcatatttggaatgaaccactggaatttgatattaatatttgtgacttaccaagaatggctcgattatgttttgctgtttatgcagttttggataaagtaaaaacgaagaaatcaacgaaaactattaatccctctaaatatcagaccatcaggaaagctggaaaagtgcattatcctgtagcgtgggtaaatacgatggtttttgactttaaaggacaattgagaactggagacataatattacacagctggtcttcatttcctgatgaactcgaagaaatgttgaatccaatgggaactgttcaaacaaatccatatactgaaaatgcaacagctttgcatgttaaatttccagagaataaaaaacaaccttattattaccctcccttcgataagattattgaaaaggcagctgagattgcaagcagtgatagtgctaatgtgtcaagtcgaggtggaaaaaagtttcttcctgtattgaaagaaatcttggacagggatcccttgtctcaactgtgtgaaaatgaaatggatcttatttggactttgcgacaagactgccgagagattttcccacaatcactgccaaaattactgctgtcaatcaagtggaataaacttgaggatgttgctcagcttcaggcgctgcttcagatttggcctaaactgcccccccgggaggccctagagcttctggatttcaactatccagaccagtacgttcgagaatatgctgtaggctgcctgcgacagatgagtgatgaagaactttctcaatatcttttacaactggtgcaagtgttaaaatatgagccttttcttgattgtgccctctctagattcctattagaaagagcacttggtaatcggaggatagggcagtttctattttggcatcttaggtcagaagtgcacattcctgctgtctcagtacaatttggtgtcatccttgaagcatactgccggggaagtgtggggcacatgaaagtgctttctaagcaggttgaagcactcaataagttaaaaactttaaatagtttaatcaaactgaatgccgtgaagttaaacagagccaaagggaaggaggccatgcatacctgtttaaaacagagtgcttaccgggaagccctctctgacctgcagtcacccctgaacccatgtgttatcctctcagaactctatgttgaaaagtgcaaatacatggattccaaaatgaagcctttgtggctggtatacaataacaaggtatttggtgaggattcagttggagtgatttttaaaaatggtgatgatttacgacaggatatgttgacactccaaatgttgcgcttgatggatttactctggaaagaagctggtttggatcttcggatgttgccttatggctgtttagcaacaggagatcgctctggcctcattgaagttgtgagcacctctgaaacaattgctgacattcagctgaacagtagcaatgtggctgctgcagcagccttcaacaaagatgcccttctgaactggcttaaagaatacaactctggggatgacctggaccgagccattgaggaatttacactgtcctgtgctggctactgtgtagcttcttatgtccttgggattggtgacagacatagtgacaacatcatggtcaaaaaaactggccagctcttccacattgactttggacatattcttggaaatttcaaatctaagtttggcattaaaagggagcgagtgccttttattcttacctatgatttcatccatgtcattcaacaaggaaaaacaggaaatacagaaaagtttggccggttccgccagtgttgtgaggatgcatatctgattttacgacggcatgggaatctcttcatcactctctttgcgctgatgttgactgcagggcttcctgaactcacatcagtcaaagatatacagtatcttaaggactctcttgcattagggaagagtgaagaagaagcactcaaacagtttaagcaaaaatttgatgaggcgctcagggaaagctggactactaaagtgaactggatggcccacacagttcggaaagactacagatcttaa

SEQ ID NO: 532 - DNA, 321 bp, HOMO SAPIENS
  misc_feature (277)..(277): n is a, c, g, or t
agaggttgaggcccatggaatgcattaggggcaggtggggtggtggtgctctgtagcctttaggacttctagaatcaggcttctgggccaccttcttagcaggtgtatacctctttgttccagactgactttctgtctcacaatatcttcactatttccacagttgcagccaagacaggaaactgaaagctgaggccagaagggtggtgtactggggggaggggaaaattgagtgtcactttggaaaactggggcccccatctaaggattgctgccnctgtagattcaaaagcaataaaacagcagctcattaactcttaa

SEQ ID NO: 533 - DNA, 5794 bp, HOMO SAPIENS
cgccgccgcagccgccgccaccaacgccaacaacaacgtgtcgggagcagccgcggccgaagccggagcaggggccggagtcgcggctggagtggggcctgcgcgtgtgagtggccgagagttgcccgtgccggagacctcaaactccgggcgggagcgctttcggtcggccgagccgccgtcgcccgcggcaccgtgtccccaaggcccagacagcggggcgggggtctatcaggcgcgggactggcttctctcaggccgacccttctagccgggctccggatcttcctcggcctcgggcccccttcacgttcaggacggaggccggagaacggtgatcatcacacaccccagccggcttcctggccagggcattttctctgcggccaagcagtgttgggattgtagctgctgggagccccctcctgccgccacctctcctgcaaggaagggactgacgcgttcccactttcttactctgcacctccccactctcttcccattcaagaacgagtttctcttccctctccattggaaatcttgctccggaggtccgaaacacgtattttaagcgtgcccttcctcacctcctggagcacccttagaagtattgcctacttatccgggctgagaatccttcatttttgacctggcttttttttcgccctttgggagataaaggtccctctccaccctctactaacactctgcacccaaggccttatcctttggggtcaccagctccttggccatttctatgtgatttcccccacccatctgagttccagtttcctctgggctccaatctccagtccctggcggatctggtcagtcccacccctaggtgggagtgaccagggggctctggcccaggattcccaaccctggaaggcagctccaaggcaggaagagaattgggcatcgggtacgaacctggcagctcaggagtcggggctccactcaccccacacaaaaagatgaaaaagcgcaaagagctcaatgcattgattggtttggctggggacagccggagaaagaagcccaagaaaggcccaagcagtcaccgcctgcttcgcactgagcctcccgactcagactctgagtccagctccgaagaggaagaggaattcggtgtggttggaaatcgctctcgctttgccaagggagactatttacgatgctgcaagatctgttatccgctctgtggttttgtcatccttgctgcctgtgttgtggcctgtgttggcttggtgtggatgcaggttgctctcaaggaggatctggatgccctcaaggaaaaatttcgaacaatggaatctaatcagaaaagctcattccaagaaatccccaaacttaatgaagaactactcagcaagcaaaaacaacttgagaagattgaatctggagagatgggtttgaacaaagtctggataaacatcacagaaatgaataagcagatttctctgttgacttctgcagtgaaccacctcaaagccaatgttaagtcagctgcagacttgattagcctgcctaccactgtagagggacttcagaagagtgtagcttccattggcaatactttaaacagcgtccatcttgctgtggaagcactacagaaaactgtggatgaacacaagaaaacgatggaattactgcagagtgatatgaatcagcacttcttgaaggagactcctggaagcaaccagatcattccgtcaccttcagccacatcagaacttgacaataaaacccacagtgagaatttgaaacaggatatcctgtaccttcacaactctttagaggaggtaaacagtgccctagtggggtaccagagacagaatgatcttaaactcgagggaatgaacgagacagtcagtaatcttacccagagagtcaacctgatagaaagcgatgtggttgctatgagcaaggtagaaaagaaagcaaacctgtccttcagcatgatgggtgatagatctgccactctgaaaagacagtctttggatcaagtcaccaacagaacagatacagtaaaaatccaaagcataaagaaagaagatagttcaaattctcaggtatccaagctaagagagaaactccagctgatcagtgctcttacaaacaaacctgagagcaacaggcctccagagaccgccgatgaagagcaagtagagagtttcacatcaaagccatcagcattgccaaaattttcacagtttcttggagacccagttgagaaagctgcccaactaagacctatctccctaccaggagtttctagcactgaagatcttcaggatttattccgcaagactggccaggacgtggatgggaagctgacctaccaggaaatctggacctccctaggttctgctatgccagaaccagagagcttgagagcatttgattccgatggagatggaagatactcattcctggagctaagggtagctttaggtatctagcttcatcaggcatattttagaaatggactgcctaatatctatttacctaacaacaaaacaacccttacttacccatcagtcctctagtcctccaaactactgtagcagatactttgccaccttttaacttgtttgaagaagctatataaaagttatttttttaaagaagaagaccattttacttatgatgttcagaaatctatgatttcctacaaccagtaagatcttacattttaaaattgccagaaaaaaaattaaagccctctttttttctctttcctttttttgaggggaggagaccttatcttttaaagctgggaaatgtatatagagagagaataagccacttttatatttcacttaaatttgccttaaattagctgcactttatagagactcagaaaatgtcttttctttaaaagataggccttttctgtttgtaaatatttaaatgaaagaaagcattgtgcatattgtgtggaaagtaggaagaatggttttgaacaggatatgaacaaatgacttattaaaaattgctgatctggtgtaggtggcagctgaaactacatccatgtctccataaggtatccctcaaaggcccaggcgctgccagggggtttgtcctggtagctggaggaaccgatttcagggagtagacactggagacaatactgactccaggcatggctcatggaagtaggattctggttctttgttcctattccctcagctaatcccaacctgggaatcagagaagtcttggggatttttctcatttttagtactatttcagggtttatgagcataaaaagttatccattggggagctccattttccctgctgagtgagctagattgccttccccacccacccacttaagtctgtcttaaagccgtagctggctcccaccaccagtaccatctccatttgaatggcagggctaaattcccccagccattatctcacactgaccacccagagctttagaagagagctgtgcttctaattttgacccagaaaaccataccccttgagattttacctagaggctaaccaagagcctaatatgtttctctgggggatgactaaagccaaaaaggctgtgagatgaaacatgtgaaataatattcagtttccttaccattaccagctcagaagtagctagaggctttctacccaaaggatgccaaagtatagcagggcaggcctggagctagggccttcacatggtggtagcaagtttttcaaatctaatacaatcaagtacaatacttcctttaaatgcttctgtggacctggcatgaaagatccctagattgaaaggaataatacctccatgtctcctgtatgttgagtctagaattgctgtgttgttcttagaagcagtctttgggcaacaacttgaaaggggaaaaaaaaactacaaaaacttaactttggtataggccaagtcagggagaaagtagagaaagctgtcatgccacagacttctttagtggagatcatttcctttttaactttgttcaggttgcccttcaccatggatacagtccggtacccttaaacatttaagggctgttttttttttctttacatgatgttcagcttggtattaaccaaacttaaattttttttccagaagtattaaaatttagttaaagcaagatgaagtcttttcccatgaatgtgtccccttatctcattatagcttatgctcagtttcactttcttggaaaggttaaaacaaattagcctggcactttaggtaacttgaaaataactctcacccttctgactgccttccatccactctcaccccacacctttttttaatatatatacacccttacagattttctaacaaccaaataaaattctagcaataaattgaattatactgctatatttgtatatactgtaccataaatagtatgtctgtacctggaaggtatttttttgagaactgatttatatgaaatatacttgagggtaatgtagcttgtcctttttagtttcaaattcttattcataggcagatactttgaagacaccttaactctttgttgtgtgtattttcccttgcatcagataactatacatggagaaatccattttgttttttggtttatcttctgttcttcctaccttgtgcttgtctgactagtatcacccctgagccagtatacagtaccatcctctccccctaccaagtttggcagaggtgtttatactgcattctcagatctatgaatatttttgtcatcctgcctgagaaagtacatcttccaggcaaaagtagggtatcttgaactcctttcttctgagttgagcagactcactggcttaagcatcccataagcctattatttagtgtgaatttgggacttttatttgtatgttgtcttaacttactaagcctgtgacttgtatttagctgtagtcaagcctcaccagccatatctcatctctgagaggaagactggatagtgagtttggttttggttttggttttaaacccttttaccttttcagtctggcagctcctactgctgctttcctaagttactcaaagcactgcttcttggtccttgttttcttttgccttgtactatcttgtataatgtttactaaaagagcctccccataaatcagagaggcaaaaaggtagcatataaaaagaagaaccaaaagaagagaaaacctgacttctagatgactgtggtgtcatctaaaaggcagaggtgcctgaccctcaggaatgtgtatgatgcaacagagctgaagaatgggttcccttcacctactgctggccattgtcccttctgttggagattcctttctttatggttgctgttcataaccccttcaacacccccccttgctggtcctgccggtcacagttgaggattttggctgtgatgggctcatactcataatggcctgttgagttgtttttagtgacaggttttgtttgctgcacacctcattggcttgcttaccaacaccagctagaagtggtccctctttcatatccaaaccagaacacatttgggtattcctgagactttatagagcgtgtattgtttgttatacgaacctaacctaccttgttgttttctcatattaagaaatttaaatctactttgttttagtgaagctattttggtaatgtataagcaattttggttctgtttagggagaattcagggtttccatgacttgatttgagctttgcatatttcaaataagtaacacagccattttaatttagctaaataaaaaaatttcttttttctctcaaaaaaaaaaaaaaaaaaaaaaaaaaaaa

SEQ ID NO: 534 - DNA, 145 bp, HOMO SAPIENS
ttatcttatgatttatttgtgtacttattttcagacggagtctcgctctgggcggggcgaggcgaggcgaggcacagcgcatcgctttggaagccgcggcaacgcctttcaaagccccattcgtatgcacagagccttattccct

SEQ ID NO: 535 - DNA, 7478 bp, HOMO SAPIENS
actggcagctggccgggcgctcgcagtgggagctgctgcaggctccgcggcggcggcaacggaggctgcgggggcggcggcgcgagcggccgggcttggtaggggagccgagcccggcccgggatcccgagcagcgagagtgtggggtacctaggcccctcacgctggacttcacagtctccgggccgcctgacctccgcacgggtatatgggatggaagcgggaccctcgggagcagctgcgggcgcttacctgccccccctgcagcaggtgttccaggcacctcgccggcctggcattggcactgtggggaaaccaatcaagctcctggccaattactttgaggtggacatccctaagatcgacgtgtaccactacgaggtggacatcaagccggataagtgtccccgtagagtcaaccgggaagtggtggaatacatggtccagcatttcaagcctcagatctttggtgatcgcaagcctgtgtatgatggaaagaagaacatttacactgtcacagcactgcccattggcaacgaacgggtcgactttgaggtgacaatccctggggaagggaaggatcgaatctttaaggtctccatcaagtggctagccattgtgagctggcgaatgctgcatgaggccctggtcagcggccagatccctgttcccttggagtctgtgcaagccctggatgtggccatgaggcacctggcatccatgaggtacacccctgtgggccgctccttcttctcaccgcctgagggctactaccacccgctggggggtgggcgcgaggtctggttcggctttcaccagtctgtgcgccctgccatgtggaagatgatgctcaacattgatgtctcagccactgccttttataaggcacagccagtgattgagttcatgtgtgaggtgctggacatcaggaacatagatgagcagcccaagcccctcacggactctcagcgcgttcgcttcaccaaggagatcaagggcctgaaggtggaagtcacccactgtggacagatgaagaggaagtaccgcgtgtgtaatgttacccgtcgccctgctagccatcagacattccccttacagctggagagtggacagactgtggagtgcacagtggcacagtatttcaagcagaaatataaccttcagctcaagtatccccatctgccctgcctacaagttggccaggaacaaaagcatacctaccttcccctagaggtctgtaacattgtggctgggcagcgctgtattaaaaagctgaccgacaaccagacctcgaccatgataaaggccacagctagatccgctccagacagacaggaggagatcagtcgcctgatgaagaatgccagctacaacttagatccctacatccaggaatttgggatcaaagtgaaggatgacatgacggaggtgacagggcgagtgctgccggcgcccatcttgcagtacggcggccggaaccgggccattgccacacccaatcagggtgtctgggacatgcgggggaaacagttctacaatgggattgagatcaaagtctgggccatcgcctgcttcgcaccccaaaaacagtgtcgagaagaggtgctcaagaacttcacagaccagctgcggaagatttccaaggatgcggggatgcctatccagggtcaaccttgtttctgcaaatatgcacagggggcagacagcgtggagcctatgttccggcatctcaagaacacctactcagggctgcagctcattattgtcatcctgccagggaagacgccggtgtatgctgaggtgaaacgtgtcggagatacactcttgggaatggctacgcagtgtgtgcaggtgaagaacgtggtcaagacctcacctcagactctgtccaacctctgcctcaagatcaatgtcaaacttggtggcattaacaacatcctagtcccacaccagcgctctgccgtttttcaacagccagtgatattcctgggagcagatgttacacaccccccagcaggggatgggaaaaaaccttctatcacagcagtggtaggcagtatggatgcccaccccagccgatactgtgctactgtgcgggtacagcgaccacggcaagagatcattgaagacttgtcctacatggtgcgtgagctcctcatccaattctacaagtccacccgtttcaagcctacccgcatcatcttctaccgagatggggtgcctgaaggccagctaccccagatactccactatgagctactggccattcgtgatgcctgcatcaaactggaaaaggactaccagcctgggatcacttatattgtggtgcagaaacgccatcacacccgccttttctgtgctgacaagaatgagcgaattgggaagagtggtaacatcccagctgggaccacagtggacaccaacatcacccacccatttgagtttgacttctatctgtgcagccacgcaggcatccagggcaccagccgaccatcccattactatgttctttgggatgacaaccgtttcacagcagatgagctccagatcctgacgtaccagctgtgccacacttacgtacgatgcacacgctctgtctctatcccagcacctgcctactatgcccgcctggtggctttccgggcacgataccacctggtggacaaggagcatgacagtggagaggggagccacatatcggggcagagcaatgggcgggacccccaggccctggccaaagccgtgcaggttcaccaggatactctgcgcaccatgtacttcgcttgaaggcagaacgctgttacctcactggatagaagaaagctttccaagccccaggagctgtgccacccaaatccagaggaagcaaggaggagggaggtggggtagggaggagtgtaggatgccttgtttccttctatagaggtggtgtaagagtggggaacagggccagcaagacagaccaccagccagaaatctctgatatcaacctcatgtcccccacccctcaccccatcttgtcacatctggccctgaccccactggaccaaaaggggcagcactggtgcccaccatacacacaggtgtctcatgtgactcacagtgctaaagactcatgcttgacagcttggtaaggtcaactctgtagccctgcagacaaaagctggttaggtttgggtttgatactttagatgggaaagtgaggggcttgagaaagtgggtgggaggagggaaggattttttaggagccttaatcagaaaaggactagatttgtttaagaagaaaaatgaaaccagacccagatcaatattttaggatactagatgttttaatgggttcagaatccagtttgtaggaagattttttaatggttttggttgctcctcccccagctgccaccccccaccttacccttattcctctctgtccacattttctgccccaccttacttctcctccctgacagacatccagcccctagtaatacttaaggcactatggcacttagctttgaagtgacacgaccctgtcttccttccgcccgctggtgggtaaccagtgccttccctgtaacggtaatgctgcagaactgcaaccttttgtacctttctttggggaatggggtgggggtgggagaggaggtagatggggaagaaataccccagacccaacaaacctccagccagaaagccagctattttgcatttgaaggaattgacttcctcattcattgagctttttaaaagatcacaacctcaagatggttaaaatccattgacatttgcactttcaaacatgacaagtctcggagctgctgagatgacaggcccctggcctttccacttatgcctccttttctccttattcctcctacctcccgccccgcccaggtctggagttactttcatagcatttttcactcttggcttcttttctcccttgatggtcaagtctcttatgtttcaatatttcttaactggggtgtcttataacaaaaaactcttaggtctaaaatgagaaaaaagagagaaaacaaaatgttatttttataccataacttgagtgtattgccaaaatttggaaatccttcccatgcctgatgagtttatatcccagaaacattgagccatcagaatgaactgtgtacctgatttgttctctgacctggctaggtagggagggggtggttatcgccccaagatggggtccaggctccatccttcctctgtgcagataatacctttttcttgctatagcctccctcctctgcactgtcctgcactctttcttgcaagtgcatctttttccttcccctggactgtcctctgaccctttggctcatcctagattgcagtgtgtcctgtggacaggctggggaattttgctgctccctattgcttctgtttacaaaaatgaatttttcctggtttcccactagggcatgtgggtgggtggcatggacttttttttttttttttttttgtcttgagacatggggtttggctgtcttgcaggactggagaaggtggtggttctagcttggtctctgttggccttgaagcaagcatcccccctgccctttttccttgactgttcatttttttcctgccccactgcttgggatggggagttgcaacttcagtgtggaatttcctctttgaggagcctgggcttggatctatcctgatctggtgatgaagccatgattactttagacctagcccaggcttggaggccagctggaggaagaagggtctaaatcctggcctgtagagttagaactaccatttcctccccttagctgcccttgtatgacccggatttgctatgcaaaacaatctatcccaggttctgttctggttggctacattgttcagcaactcacaaaacgtagcacaaacattcattatggagaaagcatcaggactgttgagtaactcctcctttacttttttcctgctggctacagcatggggtgccctataggcacaagcccagctgaagaacagaatggagggctctgggaggaggcagctcactggagagcctacattccttacacaagtgcctaaagagagtgatgctaacactccatctgccctgtccattgccttcatatacagtctacttcgtgttctgtcaccctttggggaggggagttctcctgggacagtgggctctgcatgttctccacttggatacattttggggctaggatcagggcactattcctggagggtccagtcattcaccagcatttgcaaatgtccatagggagcaggtggcagcctctactcccagcaacaagtttgtgttctctccttttctctctttgcctcactctctccagttggttttcagctggggcttgaaatgcatttttagccctttgacgtggcttatgccattcaagaaataaaaagcaagagaatcagctttgggcaatgacaagaaatgagttcttactctgatttttttgtaaaaagataatttttgagacttgaaaaataccccgaccttgagattattcctgtttgaaaggtggtgcatgcagatggagaagtggtgttggcagcaagctttggctcatgtggatttggtttaagtggtgcttcttacccaagcttcaaggaagtgcttgggggacccccagcctcatcctcttagttgggtctcttgttccctttgtaccactgttttgccttccttttcctcttctctctttgcctggcttcctttcccttttcttctattcactctgcttgcttgctggccggcctgcctgcctgcctgcctgcctgcctgcctgtctgcctatgtgatgatgaaatctctgcatggctgcaatgatcccactgttagctggcagggtcaggcttagctccttgactgcagaagaccaagaacctgttccccaagcccagagatgtccacctgggctggactgccctcaagcttatactagagaagagcaactgacctgcccaacttgtgtgaagtcaggagggtttctggcattttccacacctgtccactccttggagctggtttctctcattgctttttctaaatctggttctttttctctttacctggggcctggcttttctgagattgtcttagggttgagctatttgggtatcctgggtttgagtgttaggggatggacataaaggaaaaagagtgatgagaagagaatggagagaatttgaataaaaggtgggaaaggagagcactgttctttgattgtttatccagtccaacctgatccattagggatcgaggtgctacactggcctccagggataagcctggggctactgttgctgggaacttaggcttaacataaagccgaagaaggtacctagaaatttgaaacttccctaaaaagctcctaatgcccacctgctagatagcttctctgtggcctcctatttagctaagcagcagtgtttttggatactttttttttctgtttgtgaataaggccagcactcaagatgggcagccaagggtgcactgactattagctggcccataggatatctgtaaggctggtgggacagttttggacctggaatcatgtgtaactaacaaggttggacgtttcttccccatcagggtagaaaaatcatctcaaactagccaaaaggcagttttggaaactacattgggggacgttatttttatttatatatggggcctaggccaatccaggatggtagctggaataccttccttcttaaaatctgatcatggcagggatatgcagggcactttttactatttggccttctaagcagattgggaaggaggtattttctggttttcgctttcctccgacttaataggacttgccttctccctgggcagggagagaggctgggttggtgctctcccttactctactcatactgacttagagcctctggctgctgtttgggcatccaagaaagggaggggaaggaatgagctaaaaacaaaacagaatgaggtgggaaagggagattttcttctttacagaggaaaataggaaaccctccaagaattgtgcaagtaaagacatttgttgaatgcactgagtcccttggtgtagtagcaataaggaaaaatgaaattactttcctgtgcacacagtccagcctaattggtatgtgatgttgcacttagcagccatgtggtgggcatgtgtgactactctggttttcactttagtttctaaactttttatccctctcaagtccagcatggatggggaaatgtctctggatccccacagctgtgtacttgtttgcatttgtttccctttgagatttgtgtttgtgtcctgctttgagctgtaccttgtccagtccattgtgaaattatcccagcagctgtaatgtacagttccttctgaagcaagcaacatcagcagcagcagcagcagcagcacaattctgtgttttataaagacaacagtggcttctatttctaa

SEQ ID NO: 536 - DNA, 6889 bp, HOMO SAPIENS
gcactgcgaacgccggctgagctgagtctcgctgctcggtgcgaggcggcggagagcgaggcctggtgagcaccgccgaggcgcgggccagctcttcgaggttgtgcgcgggagtggcacggcgggcgggcgagcgaggggctaacttcagcggtggcaccgggatcggttgccttgagcctgaaatcatgaccaccccaggaaaagagaactttcgcctgaaaagttacaagaacaaatctctgaatcccgatgagatgcgcaggaggagggaggaagaaggactgcagttacgaaagcagaaaagagaagagcagttattcaagcggagaaatgttgctacagcagaagaagaaacagaagaagaagttatgtcagatggaggctttcatgaggctcagattagtaacatggagatggcaccaggtggtgtcatcacttctgacatgattgaaatgatattttccaaaagcccagagcaacagctttcagcaacacagaaattcaggaagctgctttcaaaagaacctaaccctcctattgatgaagttatcagcacaccaggagtagtggccaggtttgtggagttcctcaaacgaaaagagaattgtacactgcagtttgaatcagcttgggtactgacaaatattgcttcaggaaattctcttcagacccgaattgtgattcaggcaggagctgtgcccatcttcatagagttgctcagctcagagtttgaagatgtccaggaacaggcagtctgggctcttggcaacattgctggagatagtaccatgtgcagggactatgtcttagactgcaatatccttccccctcttttgcagttattttcaaagcaaaaccgcctgaccatgacccggaatgcagtatgggctttgtctaatctctgtagagggaaaagtccacctccagaatttgcaaaggtttctccatgtctgaatgtgctttcctggttgctgtttgtcagtgacactgatgtactggctgatgcctgctgggccctctcatatctatcagatggacccaatgataaaattcaagcggtcatcgatgcgggagtatgtaggagacttgtggaactgctgatgcataatgattataaagtggtttctcctgctttgcgagctgtgggaaacattgtcacaggggatgatattcagacacaggtaattctgaattgctcagctctgcagagtttattgcatttgctgagtagcccaaaggaatctatcaaaaaggaagcatgttggacgatatctaatattacagctggaaatagggcacagatccagactgtgatagatgccaacattttcccagccctcattagtattttacaaactgctgaatttcggacaagaaaagaagcagcttgggccatcacaaatgcaacttctggaggatcagctgaacagatcaagtacctagtagaactgggttgtatcaagccgctctgtgatctcctcacggtcatggactctaagattgtacaggttgccctaaatggcttggaaaatatcctgaggcttggagaacaggaagccaaaaggaatggcactggcattaacccttactgtgctttgattgaagaagcttatggtctggataaaattgagttcttacagagtcatgaaaaccaggagatctaccaaaaggcctttgatcttattgagcattacttcgggaccgaagatgaagacagcagcattgcaccccaggttgaccttaaccagcagcagtacatcttccaacagtgtgaggctcctatggaaggtttccagctttgaagcaatactctgctttcacgtacctgtgtcagaccaggctacccagtcgagtcctcttgtggagcccacagtcctcatggagctaacttctcaaatgttttccataatactgtttgcgctcatttgcttgccttgcgcacctgctctcttacacacatctggaaaacctccggctctctgtggtggaatacccttctaataaaagggtaaccagaacggcccactctcttttacggaaaaatccctaggctttggagatccgcacttacattagagttatgggaatatacacatattaatgtggctccctttttcttgtgggggaataaaagaggactcctcctcattccctttaacatgggggaaaaaactgacattaaaagatgagactaaatctttatcttgaattttacacaactacttacgacaagggagatgtttagacctgttgtgtatacttcagagtacttttcatgagttcttccacagtgaacccttggattacctggtggctttttctagccagatttgcattaatccttactgagattggatggttttctttcctctattggcgccattcttcagatattaaagttaaaccatccactccctcaccttcagccttcagtgaatgtgctttctagttgtcaggaatgctgaagaattaacactttgactcctaaatgtgatactggtttgtagattcccttagagcagaaaggagaggggcacatattaatttgtatcgcttttgcttctctttggtcttttgtgtcttagaatttggaagtggttcatttctgttgctggtatgaggatttcgaatacttagtaatcgaaaaccatatcctgtaatttaataaaaaaaactaaggacgaaaaaaccctccaattttcccaaatgcaatcagtgtaactaggggctgtgtttctgcattaaaataaatgtttcaggctttgtggtcctgatcaaggtcctcattaaaaaattggagttcaccctaggtgcttttcccctctgtgactggcagataacacatacttttgaaagtaactttgggatttttttcttaggtgcagctcgattctaatcttttcatgctgcacacgattcctttaatgtagcatccttatctgaaagaaataaccatcttctcaacatgacctgcttaacccaaataagaacagtgatcttataacctcattgtttcctaatcattttatttcatctcctgctagtactgtgccgcttccccctccccccacacaaaataaaaacagtatctgccttctggctcatttaatgatgactgcaatctgtacctgcaaatggcgcttccagtactgtgttcagtgatccacatttgtgcttggactggaatgaaaaaatacgcttaattgccaagacaactgcaaatgagttcaatacgacttctcggtgctagttggccatcttgactcaatgttgggatacactaccagagaagatttttttgttgatgtgctgttcaaagtgaattctgaaggaaaaggttgctcacctctgtttcagagcatacccttttaaacctttttagacttgtcctcttctagaattcattataaccccaaagtgtaaaaactatttggaagttgcccctgacaagctattatacatctctggtaaatcctgctgaatgtaagggatattcagagcttttcatacctcatcatgatgttatttaagcagccaacttatgtgacctgatttaaacttttaaaaaatccacttcattcaaactagaaagagtcaaagacaaaggacatttatcagccaagagtgtgacgcattcttcgcatctagtctgtagtagtgtctgtgctctgggatggataccgtctgatgtctgtttgttattgatggcgcagccactgcaaaactagtcaactcccatctataactgttactttttctagtgctgctttgtgctgagagaacattttagtttactgcacttgacctgtaaaagactgattctttgtaattttagggataaattaggtggttaatttaaagaagaaatttcaatgttgcctttacatcacattaaaatataacttctttcagaaggataatagaagcactgattcatagtaaaaatcttgtttttagctttgacttttttgtggctgttttttaaaattgtaaattactagtaacatgtcatttctataggatgttttaaattatgtaccttccattggatagttaaaataatttcattttataagccaatttgagtgggaaagatacaaagcacacagttgtctccccacattaggaagagtagtgtgcattcagacattcggaatttttgctagtagttggagatgtttcagtgagtgaattaaaacaaagtctatttaactgacgtgatctattttgtgtctaaaacagaggaatttatcttgtcctagaagttcatgaactataagatctaagtttttttttcttttttaacaataaaatgattttttcttaaagtatcaaagttggaattggctaaaagtgaagtagcataactcagatatgttggaacttggtactgaagcaggctttttggtaacagaaatgacattttaaggggtaactgtatatcctgtttttagttctttgcctctcagattctgttaacttagtttaaattcactgaataccctaccactaaggcgttgctcattacaaaagcatgttaatttcaatacaggaaaactcttttgtagttttatatatggattggggaaagtgactttgttttacttttcctttttattcccctccatcctccaaacttccaatctatattatttgtaatgagaactttggtgggggaaaaaaagcattaagagaattttggatgtaaaggcatctggtatctgatggaccagcaggtagatgtggttggattgagaaattttgggtaaggtagatgatagaagaaagagattttaggagacacagttctctgtggaacactttctttcatgttcctgtaactaattgatcaagacccttttaaacgcttatctttgtcagttccgcttttgaaaaaactattgccctaggattgtttcttccatatgacagatgaaggttattggctctgagtcatttttggcattatcgtcacagataaaaagattggcaattaatctcataaaaaatctgaattattccagattgctgccgatttttgcctaagaaacaatatgtaagtatattttataaaccaaactttgtcaaccaattctattgtacgtctacccacaggcaactttgaatttacttctctagtgctaaataaacatttcagcgatttaatcccccaacttgggggatgcattatgaaaaggttttcctggagtcaaggggtttttctttctcgctagttttgtgaaaatttttatatcaataggcaaatcattataactttttaggggttgatggtttttaagtatattggaaattgtggtgtctaaggatgatgttcagtgaagaaaagggatccacttttagaaaccagcattgtttgctttcaactttcatactgtatgctaactcctacgttccaaaatgtgctcatttgcagacacaggtatgcctatatacatggaagtctcaaatctgaatttttatccatctcaatatgaccatttctctctgttgtgagctgaacagattaagtatatatctgccaggttgggaaatattttggtctatcttttcctgtcatcagaacttaatttaaaaaaattatcaaaggtcagatgtgactactacagtaagttggctatcataaagaatattccataaaatgttttatctgccatacaaaattactgggtttatggccggatgtggtggctcatgcctgtaatcccagcagttcaggattacaggttatatacaggttataacaatggataccaggacatcagaatatctgataaagcaaatatttatatgctaatttaaaatatcaaattgctactggacataaaatacatctggaagcttggggtaagaagaaagaaaagaagtgttccgttctgttttcaactaagggtaaacgaagtcccagagtgttttccctgtaggtcaaattaaggtaacatgtctttatttgatcatctattgtacaccagatacctggctaagggctttccttttttctcatgtagtcttccaaatgttctttgataattgtcactatattatagatgacaaagtgaagacttacgagaaattactttgccccaaggttacaacacttagatggctgtccaagggcggggaagagccctgcaaattctgtgtcttgaagaaagcagtggccacgcagtagttccgtgcccaggatctcccagaactagacttggcaaccacagctgggccagccttttttgttagaccattcttcctgactcctgcttaccatcagcacccttaaaatgacgaaatcaggcttaagttgcttttaggttacacagactggagtgtaggccctctcaggccaaacatctttcctcttctgtggtgctaaaattctgtatgaccagacaagtatggtaataggttttttttttttttttttttgtgcaaatgattttgtgtttagtaaaataatggctaaacacatggatccattcaaacgcacaaatgtggaaagtattgacacggaaggaaaggctttgaagaattactgcctcaggaagcagtgccatggatgcgaatttaacacagtctacttcttcctaaaggaatatcatcccaaggaatgtcaaaaattaaaatcaccttttaatgtactggttgttgagtgtttctgctttacctcaagtcattctgaccactctacatcctgcttcaaagtgttctgacacttagatttggaatggctctaatgattctttgtacttgaatgtggtctgtcaggccatgggtgagtgccttgcacatagtagacattcaataaatactaaatgaaggaatatgcatgcatctttgtgatgttagtaaagggtgcttgataaaagaaaat

SEQ ID NO: 537 - DNA, 721 bp, HOMO SAPIENS
tctgctttcatcagggctgcagcccccaggcagcagtactgggagcccctctcatctccgagaataaactctgaagccagcgaccctgcggacctgaatcatcagggagcctgtcagaggaggggcagtgactctgcgggacaagcaagcaggctatataagtttcagaaggctgggctccactcagatcttttccagcagctgctgcctgccagagaggcgccttcagagacccagcgcttacacaatacccaccatgtcccaggctggtgctcaggaagcccctatcaagaagaagcgcccccctgtgaaggacgaggacctgaagggggcccgaggaaacctgaccaagaaccaggaaatcaagtccaagacctaccaggtcatgcgagagtgtgagcaagctggctcggccgccccgtcggtgttcagccgcacccgcacaggtaccgagactgtctttgagaagcccaaagccggacccaccaagagtgtcttcggctgagaagtgtgcgccactccccttgctgcccgaatgctcggaaacaggagcctttcccaggaactcttttttatgccagaacgcttcctctcccctgctgtctctggggctgccaccctcccccacagtccaggcccttcagccaagggctctgcaccagcaccttggaagcaccaataaagaggatgcccacgtggccccagcaaaaaaaaaaaaaaa

SEQ ID NO: 538 - DNA, 2990 bp, HOMO SAPIENS
aaagctgagaaggtgggaaggggcggagctcgccctgtggctgctcggtggtgggtgaggtatcagctttctccgctagttcccaccctggtagtccttagcccctggaatgcgtgagggagatgcttagggagttctcgaagtggggcgtagaggcatcgcctggcaaggcctgggagcgaaaaagatctctacttcgtggagccgttggacgctaccggggagccactggtggggaccttttttgggccccctttccttcgtggggtactatggagttcccagaacacagtcagcagctgctgcagagcctccgggagcagcggtcccagggtttcctttgtgactgcaccgtgatggtgggtagtacccagttcttggcccatcgggctgtgctggcctcctgcagcccattcttccagcttttctacaaggagcgggaattggacaagagggatctggtgtgtattcacaatgaaattgtcacagccccagcctttgggctgcttctggactttatgtatgctggccagctgaccctgagaggggatacccctgtggaggatgtgctggcagctgccagctacttgcacatgaatgacatcgtcaaggtgtgtaagcggcggcttcaagcccgggccctggcagaggcagacagtaccaagaaggaggaggaaaccaactcacagcttcctagtttggagtttttgtctagtacttcccgtggcacccaaccttcgttggcatctgctgagacatcaggccactggggcaaaggggaatggaaaggctctgctgctccctcacctactgtccgtcctccagatgagccaccaatgtctagtggggctgacactacacagcctggcatggaggttgacgcaccacatctgcgggcacctcatccaccagtggctgatgtctctcttgccagccctagtagctccactgagaccattcctacaaactacttctcttctggcatctcagcagtttcattggagccactgccatctcttgatgtgggtcctgagagtctgagggtggtggaaccaaaggatcctggaggaccactgcaaggcttctatcccccagcctcagccccaacgtcagccccagcccctgtctcagctccagttccatcccaggctccagccccagctgaagctgagctggtccaggtgaaagttgaagctattgtgatctctgatgaagagactgatgtgtcagatgaacagcctcagggtcctgagagagctttcccatctggaggagcagtgtatggggcacagccctcccagccagaggcttttgaagacccaggggcagcaggactggaggaggtggggccaagtgaccacttcctgccaacagaccctcatctaccctaccatctgctgccaggtgcagggcagtatcatcgaggactggtgacctcacctctgcctgcacccgcatccctgcatgagccactttacctgtcttctgagtacgaagcagctccaggaagctttggggtttttactgaggatgttcccacctgcaagacatgtgggaagaccttctcatgctcttacacactacggcgacatgccacggtgcacacacgtgagcgaccctatgagtgccgctactgcctgcggagctacacgcagtcaggggacctctaccgccacatccgcaaggctcacaatgaggacctggccaaacgcagcaaaccagatccagaagtgggaccccttctaggggtgcagcctctccctggctccccaacagcagacagacagagcagcagtggtggagggccacctaaagattttgtattggccccaaaaactaacatctaagggagcatgagctgatgctaggctgctcttaccatccttagatggcagctcagaaggttggtggcaccttatcacccctgctgggtgacaagaataaaggctctgcccaggctgaaagttcctacccttttttttttttaatcttttatttttttgagacagagtctcactctgtcacccagactggagtgcagtggcgcgatctcggctcactgcaagctcagcctccccgattcacgccattctcctgcctcagcctcccgagtagctgggactacaggcgcctatcaccatgcctggctaattttttttgatttttagtagagacagggtttcaccgtgttagccaggatggtctcgatcttctgacagatctgacctcgtgatccgcccatctccacctcccgcagtgctgggattacaggcatgagccaccgcgcccagctgcctttttttttttgagtcttgctctgtcactgaggctggagtgcagtggcgcaatttcagctcactgcaacctctgcctcccaggttcaagcgattcctttttttttttttttttttgagacagagtctcactctgtcccccaggctggagtgcagtggcgcgatcttggcccaccacgcccgcctaattttttgtattttttagtagagacggggtttcaccgtgttagtcaggatggtctcgatctcctgacctcgtgatccacccgcctcagcctcccaaagtgctgggattacaggcttgagccaccgtgcctggcctcaagcgattctcttaactcagcctcttgagtagctgggattacaggaacgcgccaccacgcccagctaattcctgtatttttagtagagacagggtttcaccatgttggccaggctggtctcaaattcctgaccccaggtgatctgcccaccttggccttaaaaagtgctgggattaaaggcgtgagccaccatgcccagcctcctacccttttctttgcccagccagataagcaggactttatggggcaaagcctatgtcagctctctccaagggcactgggaattttcctgaggtgtaatcgcttctcactgtatgttctggaacataaagctagcaatgaaggtatttctttgaaaaaaaaaaaaaaaaaa

SEQ ID NO: 539 - DNA, 503 bp, HOMO SAPIENS
  misc_feature (353)..(353): n is a, c, g, or t
cttgcctccctagtttaacttagcacaaacgactagccctaagccgagttatgcggcaagtctaaaatggcggccacttttcctccacaatctgaacacgcccttagcttaactgcagagtcattctctgccaaagcggtaggtacactcacacaccaccaaatgatcagcagcaaaaaaaagtgtagatattccagagagtgcaacaacccacaaaaccaacattttttcatccataaaaagcaccgatgggcgatgaaaaaaaaaaatcaaagcaggtatccgcggccccgatgggccagaaaaacaaaaattaaagcaggtatccgaggccccgatgggcaaggaaaaanaaaaaaaaaaaaagcaggtatccgaagctccgatgggccaaaaaaagaaaatttttaaaaagcagatatccgtcaccccgatgggccagagtgttgggggttcagaggggaagggaatcagcaggtatccgataccccgatgggctaagg

SEQ ID NO: 540 - DNA, 10796 bp, HOMO SAPIENS
atgtgggggcttttgatctggacactgctagctctgcatcagatccgcgcggccagagcccaagatgatgtgtccccgtatttcaagacagagcctgtgcggacacaggtgcacttggaaggaaaccgcctggtgcttacatgcatggccgagggcagctggccactggagttcaagtggctccacaacaacagggagctgaccaagttctccctggaatacagatacatgatcaccagcctggaccgcacccacgctggcttttaccgttgcatcgtgcggaaccgaatgggggccctgctgcagcggcaaaccgaggtccaggtggcctacatggggagctttgaggaaggtgagaagcaccagagcgtctcccacggagaagcagctgtcatccgtgccccgcgcatcgccagcttcccccagccacaggtgacctggttccgggacggccgcaagatcccgcccagcagccgcatagccatcacgctggagaacacccttgtcatcctgtcaacggtggcccctgacgcaggtcgctactatgtgcaggctgttaacgacaaaaacggggataacaagaccagccagcccatcacgctcaccgtggagaatgtaggggggcctgcagaccccatcgcacccaccatcatcatcccacctaaaaacaccagcgtggtggccggcacctcagaggttaccttggagtgtgtggccaatgccaggcccctgatcaagctacatatcatttggaagaaggacggggtattgctgtcgggcggcatcagtgaccacaaccgccggctcaccatccccaaccccaccggcagtgacgccggctactacgagtgtgaggctgtcctgcgcagcagcagcgtcccctctgttgtccggggcgcctacctctcagtgctggaaccgcctcagtttgtcaaggagccagaaagacacatcactgcggagatggagaaggtggtggacatcccctgtcaggccaaaggtgtgccgccgccctccatcacctggtacaaggacgcagccgtggtggaggtggagaagttgacccgcttccggcagcgcaacgacgggggcctgcagatcagcggcctggtgcccgatgataccggcatgttccagtgcttcgcccgcaatgcagccggcgaggtgcaaacttccacctacctggctgtcaccagcatcgcccctaacatcaccagaggccccctggacagcacggtgatcgatggcatgtcagtggtgctagcatgtgagacctcgggggcgccccgaccagctatcacttggcagaaaggggagcgcatcttggccagtggctctgtgcagctgcctcgcttcacacccctggagtcgggcagcctcctcatcagccccacacacatctccgatgcggggacctacacctgcctggccaccaactctcggggggtcgatgaggcctcagcagacctagtcgtttgggctcggacccgcatcaccaagcccccccaggatcagagtgtcatcaagggcacccaggcctccatggtgtgcggagtgacccacgacccccgagtaaccatcaggtacatctgggagaaggacggggccaccctgggcacggagagccatcctcgtatccgcctggacagaaacggctccctgcacatctcacagacgtggtcgggagacatcggcacgtacacctgccgggtgatctcagcaggaggcaacgactctcgcagtgcccacctgcgagtcaggcaactgccccacgcgcccgagcacccagtggccactctcagcaccgtggaaaggcgagccatcaacctgacgtggaccaagccctttgatggcaacagccccctgatccgctacattctggagatgtcggagaacaatgccccctggactgtactcctggccagtgtggaccccaaagctacctcagtgacagtcaagggcctggttcctgcacgctcctaccagttccgtctttgtgccgtcaacgacgtggggaaaggacagttcagcaaagacaccgagagggtctccctccccgaggagccccccacggcccctccacagaacgtcatcgccagcggtcgaaccaaccagtccatcatgatccagtggcagccgcctcctgagagccaccagaatggaattctcaagggttacatcatcaggtactgcctggccgggctgcccgtggggtaccagtttaagaacatcacggatgctgatgtgaacaacctgctgctggaggatctcatcatttggaccaactacgagatcgaggtggctgcttacaacagcgctgggctgggggtctacagcagtaaagtcaccgagtggacgctgcagggagttcccacggtccctccgggcaatgtgcacgcggaagccaccaattccacgaccatccgcttcacctggaacgcccccagcccccagttcatcaacggcatcaaccagggctacaagctgatcgcctgggagccggaacaggaagaggaggttaccatggtgaccgcccggcctaactttcaagacagcatccacgtgggcttcgtgtctggcctgaagaagttcaccgagtacttcacctcagtgctgtgtttcaccacccccggggacgggccacgcagcaccccgcagctggtgcgcacccatgaggatgtgcctgggcccgtgggacacctgagcttcagtgagatcctggacacatcgctgaaggtcagctggcaagagccgggagagaaaaatggcatcctcacagggtaccggatctcctgggaggagtacaatcgaaccaacacccgtgtgacccactacctgcccaacgtgaccctggagtaccgtgtcacgggcctcaccgcgctcaccacctacaccatcgaggtggccgccatgacctcaaagggccagggccaagtgtccgcctccaccatctcctctggggtgcccccagaactcccagggccccccaccaacctgggcatttccaacatcggcccccgctctgtgaccttgcagttcaggccaggctacgatgggaaaacctccatctcccgctggctggtggaagcccaggtaggcgtggttggggagggagaggagtggttgctgatccaccagctctccaatgagcccgatgcccgctccatggaggtgcccgacctcaaccccttcacctgctacagcttccgcatgcgccaggtgaacatcgtgggcaccagcccccccagtcagccttctagaaagatccagaccctgcaggcaccccctgacatggccccagccaatgtgtctctgcgcacagccagtgagaccagcctgtggctgcgctggatgcctctcccggagatggaatacaatgggaaccctgagtccgtgggctataagatcaagtacagccggtcagacgggcatggcaagacgctgagccacgtggtgcaggaccgtgtggagcgggactacaccatcgaggacctggaggagtggacagagtaccgcgtccaggtccaggccttcaacgccatcgggagcgggccctggagccagacggtggtgggcaggacccgggagtcagttccctcttccggccccaccaatgtgtctgcactggccaccacctccagcagcatgctggtgcgctggagcgaggtccccgaggctgatcgcaacgggctcgtgctgggctataaggtgatgtataaggagaaggactcggacacccagccccgattctggctggtggaaggcaactcgtctcgcagtgcccagctcaccggcttgggcaaatacgtgctctatgaagtccaggtgctggccttcacacgcatcggggacggcagccccagccaccctcccatcctggagcggacgctggatgatgtcccaggaccacccatgggcatcctgttcccagaggtgcggaccacgtctgtgcggctgatctggcagccccctgccgcccccaatggcatcattcttgcttaccagatcacacaccggctcaacaccaccacggccaacaccgccactgtggaggtgctggcacccagcgcccggcagtacacagccacgggcctcaagccagagtctgtctacctgttccgcatcacggcccagacccgcaagggctggggagaagctgccgaggccttggtggtgaccaccgagaagagagaccgtccgcagccccccagcaggccgatggtgcagcaggaggatgtgagagcacgcagcgtgctgctgtcctgggagccagggagcgacgggctctcccctgtgcgctactacaccatccagacccgcgagctgcccagcggcaggtgggcactgcactcggcctccgtgagccacaatgcctccagcttcattgtggacaggctgaagcccttcacgtcctacaagttccgagtgaaggcgaccaatgacattggcgacagcgagttcagcgaggagtcggagtcactgaccaccctgcaggctgcccccgatgaagcacccaccatcctctccgtgacgccccacaccaccacctccgtgctaatccgatggcagccgccagcagaggacaagatcaatggcatcctcctgggcttccggatccgataccgggagctgctctatgaaggactgaggggcttcacgcttcgaggcatcaacaacccaggggccacatgggctgagcttacctccatgtactccatgcggaacctgagccggcccagcctcacgcagtacgagctggacaacctgaacaagcacaggcggtacgagatacggatgagcgtgtacaacgctgtgggtgaggggccctccagccccccgcaggaggtctttgttggggaggcagtgcccacagcagcacctcgtaacgtggtcgtccacggcgccacggccacacagctggacgtgacttgggagccacctccgctggacagccagaatggagacatccaggggtacaagatttatttctgggaagcccagcgggggaacctcacagagcgagtgaagacgcttttcctggctgagaacagcgtgaagctcaagaacttgactggctacacggcctacatggtcagcgtggccgccttcaacgccgctggggatgggcctcggagcacccccacccaaggccagacccagcaagcagcccccagcgctcccagctcggtcaagttcagtgagctgaccacaacctcagtgaatgtgtcctgggaagccccgcagttccccaatggcatcctggagggctacaggctggtgtacgagccctgcagccccgtggatggagtcagcaagatcgtgaccgtggacgtgaaggggaacagccccctgtggctgaaggtgaaggacctggcggagggggtgacctacaggttccgcatcagagccaagaccttcacctacgggccggagatcgaagccaacgtcaccacgggccccggagaaggtgccccaggaccgcctggcgtgcccatcatcgtgcggtacagctctgccatcgccattcactggtccagcggagacccgggcaaagggcccatcacccgctacgtcatcgaggccagaccttcagacgagggactatgggacatcctcatcaaagacatccccaaggaggtgagctcctacacgttcagcatggacatcctgaagccgggcgtgagctatgacttccgggtcatcgcggtcaacgactatggtttcggcacccccagcagcccctcccagtctgtgccagcccagaaagccaaccccttctatgaggagtggtggttcttggtggtcattgccctggtcggcctcatcttcatcctgcttctggtcttcgtgctcatcatccggggccagagcaagaagtacgccaagaagacagactcggggaacagtgccaagtctggagccctaggccacagcgagatgatgagcttggatgaaagcagcttccctgccctggaactcaacaacaggcggctctccgtcaagaactctttctgccgaaagaacggcctgtacaccaggtctccccccaggcccagcccaggcagcctgcactactcggatgaggatgtcaccaaatacaacgacctcatccctgcagagagcagcagcctgacggagaagccctcagaaatctccgactctcagggaagtgacagcgagtacgaggtcgactcaaaccaccagaaggcccactcctttgtcaaccactacatcagtgaccccacatactacaactcgtggcggcgacagcagaagggcatctcgagggcacaggcctacagctacacggagagcgactcgggtgagccagaccacaccaccgtcaccaacagcaccagcacccagcagggcagcctctttcggcccaaggccagtcggactccaacgccccagaacccccctaaccccccaagtcagcagagcaccctctaccgtccccccagcagcctggccccaggctcccgggctcccatagcaggattttcatcatttgtttgacatcagaagaggaaaaagcagaaagagaaatggcaccaaactcctccttcacccctcctctcactgcctgccagaaaacaaaaacaccaagaaaccaagtcaacttttcacctcctgagtttatttttccagagattccagggccagcaaagccggcgttcagaaggagggagaaaaccgtgagaggatgtgtgtggccagcagctcttcagctttgagatggtggggttcactgctcccttgggaattacacggagctggggaagtggctgtgtcactgctatggacacggagtggggcgggcatctggagagagagagggagcggaggctaaggactggaggccgccaggcaggcgtggccgagggaagaaaaagcttctggatgtccagccagctgcccccttccagcccctccaggacccctggacccactgccgctgctctctgcaaaaagaatgggcatcccggaggccacgcctatcttctctctctgctcctccttccctccatgcaccatcactgtggctggcaggcatcggacagcctcatccagaccccctgccctgtcttggcaacctctactgcccatctcccctgctcaacttctccaccaagcatttggtttatttagaaaaaggaagaaaaacaaaaaacaaaaaactaaagggtgagaatttgcttagcgccttccttgttcctgcatattttttaaaatattgaatccaaggaagagagcccaagggtaggggagaaaccccccacaactgacccctgcctccctgtgctggaattgactttcctgagcatggacaaggaaaggtgaagtctggggagcagaggtgtaaataaggcgactggccttggcactgtgggatgattaggtttaacgcattgtgggcaagataagaatgacactttgactgttctctttcttccaatccaggttccatccgtcctctctttaaaggggtagtcagcttcccaaggctggggagtggggcacagctgagggatctccctctgggcagacacgtcactctccactggatagatcctcaccacacacacacacacacacacatctcccatgcacttacaaggaacagggtctagggatcctctccagaacaaactcatctgggccctcctagccagacagcacactcactttcagatctgtgtccctctcactgccacccggcagcctcctaagcacagaggcacaggagcccagaggggtggcccaagtccctggtccagaggctggaatacccagagtttgctcagtcagcctagcacccagtttacaggcaaaaaggcaaagacaccctaacccccagtaacagcttccaggctgggctccgcctggccagggcggggaggggaaggggcaggtcaggaagctcagtccaaagtggacccagcatttgaattgcacgcccagcaggggcaggtcagatgggaccaagtgacaagaatagctgatgggagggaatgcttttacacacacacacacacacacacacacacatacacatacacaatctgctccaaggagtgttctgcaaaaagccacatccagtggccaggatcttcccgtccacttggtacttacggatgccagggtttagggagaagcctttctatctaactccatacattgtccaaggccctctgtgccctcagccagccctgtaaggccagcccaacacctgccccaccgctgagatgggtggcagatggcccacaggggcctgtctgattcagcgtgagccccttcgtggagcagggctccctctgtgcactgtgtacaggcgctgctggccctgcccaagagatgatgctctgttggggtgggtgagcagagttcaaggaagcccaagtaggagatttgggaaacatgccaaggtaagagagagcctggaccactctcctacagccccaagtcagtcactgtgctaatggtgaccgggaagggaagtcagggtctggggcccaaagaacgggcacacccagccatgagtttttcctgaagcacttgacccctgggaaatgtgaacggggagatgctggaagatggctcagcagacaggccagcccagctccagtgtccaaaaagcggtttctccaataaggaggcctgggaagggaagcacaatcttccccaaaggagaaccaagggctgaggttctgcccctccaggaagtaaggtgctctcggggcctccttggacttgtctgggggctgcagtggagtcagctggacacctgctccacccctgccacctccgcccccaccctctgcagcatctggcatctccatggcagcacatctgcagctgccggcctgtgatcgtgccgcacagctttcttttctttcctctcatcttttttttttttttttttttaaataacttcatccctttccctctctgctgagcatttaaccatttaaggaagttcccagtttgcattagggaattatttaagcccagcccagtgagggattatttgggaggaagcaggagtgagtaaaaacattgtgtctgtgtatatattgcacatgaggtcaattttcctttgcctttaatgaatcacctggtgcactaagatattccacccccccactccccacacgctcattcgcacccatgctgacacctacgtgtacatgcgggatggtgcccatgcacgcctgtgcttacacacatgcacacacaaatatgcacagaacacacatctgtatgtgtgttagcaaagagactcctgaactccctctgatggctgaagccatctctcccctgtgaggcacaggtggcctgggttgcttgcacttggggcgtggctgggatctattgtctgagagggtgaggacaccacgcaaatttagacaagcccatgagatcaggctgggcccatggtgaaagtcccacacttagtcaatacccactcatctggaatattgtctccacagccccagccacagctggaagcccaggcctgcagctgtggaactctagattttttcaggacacgtctctttgcccttgtttacatatctactggcacagccgaggctcccaaccgtcctcccagaaacctggccacattagaaaggggtggtgggccctgccctttgtagaaagagtgggaccctttctggcctgtgattttccgtgccagtgatgccagggcccctgcctgtgggactccacccaaagcaggttcacaccaggacacacctggcacctttggcattgcctccttgtgccctaagcaatctcccagtgttgcacccaggagcccatgctgggcacaccagggctttccccttcctggctgcgcctccagagttgacgtcagctccacacccacactgccaagacaaaccaaaaagatgctctgggctccagaaccaccatcctcctagggctccagagagtttgcaaacccaggctgcctccccttctgtccatccctcaccccccggcccccaaaactcctacccccaaacctggcactgccgtgatttagaggaaacaaggacacagcgggggctgcccccacctggtgcacgctgcctcaaggccttctgttgctgcccacgcctccctgggcagtgcttctaaaggtgccagagcctcaccacagtgccactctggctgggcaggggcttccctcagcttcccagagtgcacatctgaaggtgcctaccctgggtgaggggctggtgggcaggaaggtaaaggggagaccatctgagcagccgccacccgctccccagtgcctctgtatggccctatccagggacacccatgggcatgcgcacatggcaatcctgaccaccacctgagcacaggtgccccctcgggaccaccccccttctctttgtttccatcagaataaccaaaagcatttaaacgtgttacctttctccatccatctagactccagaaacaaaaatcaacacaaatctttattttttgatttaaaagatataacaaaaaattatggggagagtattcattatggcaggtgtctgtctgtaagaaaaaaatatatatctctatgtcatatagcgtgttagcaggtttattttttaaatgaaaggtaagaaagaaattgatttgaaatatataccacaagaagtcccgtgtcctgtcaaactgtcagtattttataaataaacttttttttttggaaaaaaaaaaaaaaaaaaaaaaaaaaaaaaaaaaaaaaaaaaaaaaaaaaaaaaaaaaaaaaaaaaaaaaaaaaa

SEQ ID NO: 541 - DNA, 314 bp, HOMO SAPIENS
tggtctctgttctcatgttctgacccccagaaggcctctaaatcactcaacttggagactcgccagttttttctaatcagctgcctgaaagcggttcagagttctgtcaacaagcccttgcacgctgggcttattaatgctgggccactcagagccatgactcaggaacatggcttggggtcaacactgaaaagcagaaatcacagtactgataatgggaattttgtaggaggaaacaggcttttggaacttaatgcctttgttaggtttctggatttgcagatctcattgtgtgggcctgctttaggaggaaa

SEQ ID NO: 542 - DNA, 3198 bp, HOMO SAPIENS
atttgaggtgttctgaccagaagaagacagagcggatgatcattcattcaccacgttgacaacctcgcctgtgattgacagctggagtggcagaaagccatgagatttggtagttgggtctgaggggcgctcttttttttccttttctttctttctttctttttttttttttaaactgatttttgggggagagaagatctgcttttttttgcccccgctgctgtcttggaaacggagcgcttttatgctcagtgactcgggcgctttgcttcaggtcccgtagaccgaagatctgggaccagtagctcacgttgctggagacgttaagggatttttcgtcgtgcttttttttttttttttttttttttccgggggagtttgaatatttgtttcttttcacactggccttaaagaggatatattagaagttgaagtaggaagggagccagagaggccgatggcgcaaaggtacgacgatctaccccattacgggggcatggatggagtaggcatcccctccacgatgtatggggacccgcatgcagccaggtccatgcagccggtccaccacctgaaccacgggcctcctctgcactcgcatcagtacccgcacacagctcataccaacgccatggcccccagcatgggctcctctgtcaatgacgctttaaagagagataaagatgccatttatggacaccccctcttccctctcttagcactgatttttgagaaatgtgaattagctacttgtaccccccgcgagccgggggtggcgggcggggacgtctgctcgtcagagtcattcaatgaagatatagccgtgttcgccaaacagattcgcgcagaaaaacctctattttcttctaatccagaactggataacttgatgattcaagccatacaagtattaaggtttcatctattggaattagagaaggtacacgaattatgtgacaatttctgccaccggtatattagctgtttgaaagggaaaatgcctatcgatttggtgatagacgatagagaaggaggatcaaaatcagacagtgaagatataacaagatcagcaaatctaactgaccagccctcttggaacagagatcatgatgacacggcatctactcgttcaggaggaaccccaggcccttccagcggtggccacacgtcacacagtggggacaacagcagtgagcaaggtgatggcttggacaacagtgtagcttcccccagcacaggtgacgatgatgaccctgataaggacaaaaagcgtcacaaaaagcgtggcatctttcccaaagtagccacaaatatcatgagggcgtggctgttccagcatctaacacacccttacccttctgaagaacagaaaaagcagttggcacaagacacgggactcaccatccttcaagtgaacaattggtttattaatgcccggagaagaatagtgcagcccatgatagaccagtccaaccgagcagtaagtcaaggaacaccttataatcctgatggacagcccatgggaggtttcgtaatggacggtcagcaacatatgggaattagagcaccaggacctatgagtggaatgggcatgaatatgggcatggaggggcagtggcactacatgtaaccttcatctagttaaccaatcgcaaagcaagggggaaggctgcaaagtatgccaggggagtatgtagcccggggtggtccaatgggtgtgagtatgggacagccaagttatacccaaccccagatgcccccccatcctgctcagctgcgtcatgggccccccatgcatacgtacattcctggacaccctcaccacccaacagtgatgatgcatggaggaccgccccaccctggaatgccaatgtcagcatcaagccccacagttcttaatacaggagacccaacaatgagtggacaagtcatggacattcatgctcagtagcttaagggaatatgcattgtctgcaatggtgactgatttcaaatcatgttttttctgcaatgactgtggagttccattcttggcatctactctggaccaaggagcatccctaattcttcatagggacctttaaaaagcaggaaataccaactgaagtcaatttgggggacatgctaaataactatataagacattaagagaacaaagagtgaaatattgtaaatgctattatactgttatccatattacgttgtttcttatagattttttaaaaaaaatgtgaaatttttccacactatgtgtgttgtttccatagctcttcacttcctccagaagcctccttacattaaaaagccttacagttatcctgcaagggacaggaaggtctgatttgcaggatttttagagcattaaaataactatcaggcagaagaatctttcttctcgcctaggatttcagccatgcgcgcgctctctctctttctctctcttttcctctctctccctctttctagcctggggcttgaatttgcatgtctaattcatttactcaccatatttgaattggcctgaacagatgtaaatcgggaaggatgggaaaaactgcagtcatcaacaatgattaatcagctgttgcaggcagtgtcttaaggagactggtaggaggaggcatggaaaccaaaaggccgtgtgtttagaagcctaattgtcacatcaagcatcattgtccccatgcaacaaccaccaccttatacatcacttcctgttttaagcagctctaaaacatagactgaagatttatttttaatatgttgactttatttctgagcaaagcatcggtcatgtgtgtattttttcatagtcccaccttggagcatttatgtagacattgtaaataaattttgtgcaaaaaggactggaaaaatgaactgtattattgcaatttttttttgtaaaagtagcagtttggtatgagttggcatgcatacaagatttactaagtgggataagctaattatactttttgttgtggataaacaaatgcttgttgatagcctttttctatcaagaaaccaaggagctaattattaataacaatcattgcacactgagtcttagcgtttctgatggaaacagtttggattgtataataacgccaagcccagttgtagtcgtttgagtgcagtaatgaaatctgaatctaaaataaaaacaagattatttttgtcaaaaaaaaaaaaaaaaaa

SEQ ID NO: 543 - DNA, 1267 bp, HOMO SAPIENS
acaccacttgtgtctgagttcacgcagcatgttcctctgtcagggattccgcaaatatctccctgaggtaaaaaaggaaagtgtgctgcgctccagcacccagagcagtgagcccagtcccgagtcccggagagagctccagcaataggggccatgtcgccgtagccccagcctctcggtccgcagcctcagcagcgtcccagccggctggcttcatgctgcggtgcagctgcaccatgttcctgggttgagggggcaatcgggcacgctcctccccatgggttgcccatcatgtctaatggatatcgcactctgtcccagcacctcaatgacctgaagaaggagaacttcagcctcaagctgcgcatctacttcctggaggagcgcatgcaacagaagtatgaggccagccgggaggacatctacaagcggaacattgagctgaaggttgaagtggagagcttgaaacgagaactccaggacaagaaacagcatctggataaaacatgggctgatgtggagaatctcaacagtcagaatgaagctgagctccgacgccagtttgaggagcgacagcaggagacggagcatgtttatgagctcttggagaataagatccagcttctgcaggaggaatccaggctagcaaagaatgaagctgcgcggatggcagctctggtggaagcagagaaggagtgtaacctggagctctcagagaaactgaagggagtcaccaaaaactgggaagatgtaccaggagaccaggtcaagcccgaccaatacactgaggccctggcccagagggacaagtaggtgccttcggtgctctttttgtcgcttgtcttttgcccattctcaaggcatacagcagctgtcctgttccctttcaaggactgacagtaggagcttcactatttctaagactttatgggcccacaaccgaagacattcttttcagggttgaattttcagtggtatccattatgaaaactcacttcatggattcagtgggcaaatagcggcaagcaagagacatggattcacttattcagcaaacatttactgggcatgccacatgccagataccgggctaagtatctggcatgtgttacagaaacaaaagacctaaatcttgtcaccaagaaacatgttacatgattttaataagttccctgatagaagagcatggggtgctctggggaaatattggagggtcatccattccacattaaaagagcaagttgtctgcaaaaaaaaaaaaaaaaaa

SEQ ID NO: 544 - DNA, 268 bp, HOMO SAPIENS
tggtggctcacgcctgtaatcccagcactttgggaggccgaggtgggtggatcacctgaggtcaggagttcaagaccagcctggccaacatggtgaaaccccgtctctactaaaaatacaaaaattagccgggcgtggtggcgcgcgcctgtaatcccagctactcgggaggctgaggcaggagaatcgcttgaacccgggaggtggaggttgcagtgagccgagatcgcgccactgcactccagcctgggcgacagagcgagactcc

SEQ ID NO: 545 - DNA, 1110 bp, HOMO SAPIENS
ctttccgctcggctgttttcctgcgcaggagccgcagggccgtaggcagccatggcgcccagccggaatggcatggtcttgaagccccacttccacaaggactggcagcggcgcgtggccacgtggttcaaccagccggcccgtaagatccgcagacgtaaggcccggcaagccaaggcgcgccgcatcgccccgcgccccgcgtcgggtcccatccggcccatcgtgcgctgccccacggttcggtaccacacgaaggtgcgcgccggccgcggcttcagcctggaggagctcagggtggccggcattcacaagaaggtggcccggaccatcggcatttctgtggatccgaggaggcggaacaagtccacggagtccctgcaggccaacgtgcagcggctgaaggagtaccgctccaaactcatcctcttccccaggaagccctcggcccccaagaagggagacagttctgctgaagaactgaaactggccacccagctgaccggaccggtcatgcccgtccggaacgtctataagaaggagaaagctcgagtcatcactgaggaagagaagaatttcaaagccttcgctagtctccgtatggcccgtgccaacgcccggctcttcggcatacgggcaaaaagagccaaggaagccgcagaacaggatgttgaaaagaaaaaataaagccctcctggggacttggaatcagtcggcagtcatgctgggtctccacgtggtgtgtttcgtgggaacaactgggcctgggatggggcttcactgctgtgacttcctcctgccaggggatttggggctttcttgaaagacagtccaagccctggataatgctttactttctgtgttgaagcactgttggttgtttggttagtgactgatgtaaaacggttttcttgtggggaggttacagaggctgacttcagagtggacttgtgttttttctttttaaagaggcaaggttgggctggtgctcacagctgtaatcccagcactttgaggttggctgggagttcaagaccagcctggccaacatgtcagaactactaaaaataaagaaatcagccatgaaaaaaaaaaaaaaaaaaaaaaaaa

SEQ ID NO: 546 - DNA, 4190 bp, HOMO SAPIENS
gttttggcaagggattaaagtgctcccccctgtggcagcagtgacccagaaatgagtttgattcacatagtccttcctccataacaagccaaacgccagaccgagagtgcctccgtgcgcgagtgcccggtgtgtgcgcgccggcgagagcaggggcccgcccggctccccgcccgccgcggcccgaactcatgcagctccgagcgagcgagcggcgcccagcccagcgcctcggccgaacccctccgcagcaggctgcctgctgtttcccggggagatcatgaaacgaggtcgccttcccagcagcagtgaggattctgacgacaatggcagcctgtcaactacttggtcccagaattcccgatcccagcataggagaagctcctgctccagacatgaagatcgaaagccttcagaggtgtttaggacagacctgatcactgccatgaagttgcatgactcctaccagctgaatccggatgagtactatgtgttggcagatccctggagacaggaatgggagaaaggggtccaggtgcctgtgagcccggggaccatccctcagcctgtggccagggttgtgtctgaagagaaatccctcatgttcatcaggcccaagaagtacatcgtgtcatcaggctctgagcctcccgagttgggctatgtggacatccggacgctggctgacagcgtgtgtcgctatgacctcaatgacatggatgctgcatggctggaactgaccaatgaagaatttaaggagatgggaatgcctgaactagatgaatacaccatggagagggtcctagaggaatttgagcagcgatgctacgacaatatgaatcatgccatagagactgaggaaggcctggggatcgaatatgatgaagatgttgtctgtgatgtctgccagtctcctgatggtgaggacggcaatgagatggtgttctgtgacaaatgcaacatctgtgtgcaccaggcctgttatggaatcctcaaggtaccagagggcagctggctgtgccggacatgtgccctgggggttcagccaaaatgtctgctgtgtccgaagaagggtggagctatgaagcccacccgtagcggaaccaagtgggtccacgttagctgtgctctgtggatccctgaggtgagcattggcagcccagagaagatggagcccatcaccaaggtgtcacacattcccagcagccggtgggcgctagtgtgcagcctctgcaatgagaagtttggggcctctatacagtgctctgtgaagaactgccgcacagccttccatgtgacctgtgcttttgaccggggcctggagatgaagaccatcttagcagagaatgatgaagtcaagttcaagtcctattgcccaaagcacagctcacataggaaacccgaggagagtcttggcaagggggctgcacaggagaatggggcccctgagtgttccccccggaatccgctggagccctttgccagccttgagcagaaccgggaggaggcccaccgggtgagtgtccgtaagcagaagctgcagcagttggaggatgagttctacaccttcgtcaacctgctggatgttgccagggctctgcggctgcctgaggaagtagtggatttcctgtaccagtactggaagttgaagaggaaggtcaacttcaacaagcccctgatcaccccaaagaaagatgaagaggacaatctagccaagcgggagcaggatgtcttatttaggaggctgcagctgttcacgcacctgcggcaggacctggagagggtaatgattgacactgacaccttatagtgacttagagaagaagatgcaaagaggcgaacgctcgcccagagcaagaaatgatagccagtcatatactctcagacccttgtacacaccacagcatgaggttgtgttggttaaaaatatttatgggctggtaaactcattgtacatatgtgcaaaactgctactgagtggggagcttctttgtggtttttttttttttaaaaacactttcccattaatctttactgttttgtaagatcaaatggggtgtgtcttccccacccccattccttcattctagagctagagtgaatgagccccaagaaaatgacccaaggagttgactcaggatggtttacagactgatttagaaaaccagaacggatttcatttctaatggagggggccagagatgggaaaatttcttgttcagtccggggaaacacacctaggtgctggtgatgggcttatgaaggaagctaagcacggctgctcactggcccccactttgtttcttgggtaattcacaggggaattcccagtactgtcatggagcagagcaggcagtgggtgctgatgtgtgtgcatgagctgtatgtacacatgcatatatctgttacagaagatactcctggcagtgaggtgctaagtcatcactgaggctgtgtgtgtgtgtgtgtgtgcgcgtgcccgtgtccatccatgtctctgttgtgtgtctgtgtgcgggtatgggtgggattcctggtggacaggggtgtcagatctgtctgaggagccccagtcatgctcagcacgctacagatgtgttgtttgtcacactgagattgctgaatgtcgtggctgttggctgccgagcctcagctgctggcatttccttctgctgtttgctgcttttgtgcctcccccactttccatcacctctggagtcccgtctggacgtcccttcctgctacaggaataatgaggcgtgggctgcctcccgctagggcctcctgctccctgtaggtagtttctggctgaggcttgctaattggggatgcttcttagagcatcttccacatcaactcccctggctgctggctaccgattaaattcattagtgtgaaagaggtgggagtgaggttttctggcctgaagcagtctgcactgaaaggtacccaagtggcctgaaacagtgtagggaaagacctgggaaacactggaccaaaaaagcctgatctcatggagacctgcatggccctgttagagatggcgtagaagtgaaagtcttaaagggagcattagagatccttttaatacacgactgagtgccagcttatttgtgatgccccttcccagaccaggttaggattcctgggaaggccgcggattccggccctggaagaggcaggatcctggagcagttttgtgaggcttttgtgctcccatacgccccctggtggtgagtgtaaagaagactttgcctctcacaactacatgtatgtgtggcatttttgttagagatgagaaaaggattgagaaggataaactggaatcctggtaagaagcctttatgccagcccgacacctgctgtaattggggtgcatgagctatggagtcagatagttgttgggagggggaggacaagaagtctattgtttggactgtgtttgtctcacaatcaccacaaaataaaagtgtagaaaatgcttgtggtgtactaactcttttctgtacttaagttactcagattaacatgcacttctaattctaaacattttttttggagtcatcactgtcgctgtttaagtagaacaatgccaacgatgtatgagaaacagggaataaatcaggatttgtgtgtgtatgtgtgtggcattacttacatttactttattaaaaagcctaaggaactttaaagaatttgtattcagtttatttttattttttcaagacagagtctcactttgttgcccaggctggagtgcagtggcgtgatctcggctcactgcagcctccgcctcccgggttcaagtgattctcctgcctcggtctcatgagtagctgggattacaggcgtgcgccaccatgcctggctaatttttgtatttttagtagagacggtttcaccatgttggtcaggttggtcttgaactcctgacctcaagtgatctacctgtcttggcctcccagagtgttgggattacgccactgtacccagccttagactcagtttaaaatgggcttattgtaatgaaaaaaaatacgctacccaaaatttgccatgatgcctgtgatggtgaaggcattaaacaattgaaatctttgccttgcccagagagttgcagttatttgtaattataaacagtaagtgtatcagggcaggggtgacaataaaaaaccaatcattactaccaa

SEQ ID NO: 547 - DNA, 5673 bp, HOMO SAPIENS
tgccggggccggcgagccaaagaggagccggccgcgcgggccgggaggggacggccgccggagccgcgaggccaactgtcgcctggttgggcccggaaatgggacgtcgcgctttctcagggagcgtagaagcagccagggcctctccaagccgctgctgtgacagaaagtgagtgagctgccggaggatgtccaccgccacgacagtcgcccccgcggggatcccggcgaccccgggccctgtgaacccaccccccccggaggtctccaaccccagcaagcccggccgcaagaccaaccagctgcagtacatgcagaatgtggtggtgaagacgctctggaaacaccagttcgcctggcccttctaccagcccgtggacgcaatcaaattgaacctgccggattatcataaaataattaaaaacccaatggatatggggactattaagaagagactagaaaataattattattggagtgcaagcgaatgtatgcaggacttcaacaccatgtttacaaattgttacatttataacaagcccacagatgacatagtgctaatggcccaagctttagagaaaatttttctacaaaaagtggcccagatgccccaagaggaagttgaattattaccccctgctccaaagggcaaaggtcggaagccggctgcgggagcccagagcgcaggtacacagcaagtggcggccgtgtcctctgtctccccagcgaccccctttcagagcgtgccccccaccgtctcccagacgcccgtcatcgctgccacccctgtaccaaccatcactgcaaacgtcacgtcggtcccagtccccccagctgccgccccacctcctcctgccacacccatcgtccccgtggtccctcctacgccgcctgtcgtcaagaaaaagggcgtgaagcggaaagcagacacaaccactcccacgacgtcggccatcactgccagccggagtgagtcgcccccgccgttgtcagaccccaagcaggccaaagtggtggcccggcgggagagtggtggccgccccatcaagcctcccaagaaggacctggaggacggcgaggtgccccagcacgcaggcaagaagggcaagctgtcggagcacctacgctactgcgacagcatcctcagggagatgctatccaagaagcacgcggcctacgcctggcccttctacaagccagtggatgccgaggccctggagctgcacgactaccacgacatcatcaagcacccgatggacctcagcaccgtgaaaaggaagatggatggccgagagtacccagacgcacagggctttgctgctgatgtccggctgatgttctcgaattgctacaaatacaatcccccagaccacgaggttgtggccatggcccggaagctccaggacgtgtttgagatgaggtttgccaagatgccagatgagcccgtggaggcaccggcgctgcctgcccccgcggcccccatggtgagcaagggcgctgagagcagccgtagcagtgaggagagctcttcggactcaggcagctcggactcggaggaggagcgggccaccaggctggcggagctgcaggagcagctgaaggccgtgcacgagcagctggccgccctgtctcaggccccagtaaacaaaccaaagaagaagaaggagaagaaggagaaggagaagaagaagaaggacaaggagaaggagaaggagaagcacaaagtgaaggccgaggaagagaagaaggccaaggtggctccgcctgccaagcaggctcagcagaagaaggctcctgccaagaaggccaacagcacgaccacggccggcagacagctgaagaaaggcggcaagcaggcatctgcctcctacgactcagaggaagaggaggagggcctgcccatgagctacgatgaaaagcgccagcttagcctggacatcaaccggctgcccggggagaagctgggccgggtagtgcacatcatccaatctcgggagccctcgctcagggactccaaccccgacgagatagaaattgactttgagactctgaaacccaccactttgcgggaactggagagatatgtcaagtcttgtttacagaaaaagcaaaggaaaccgttctcagcaagcgggaagaaacaggcagccaagtcgaaagaggagctagctcaggaaaagaagaaggagctggaaaagcgtctgcaggatgtcagcgggcagctgagcagcagcaagaagcccgcccggaaagagaagcccggctcagcaccctcagggggcccgtccaggctcagcagcagcagctcctccgagtctgggagcagcagctccagcgggtccagctctgacagcagtgactcagaatgaactggcttcggacagaacaggacagatggatgtcgcacacgccgagactctgccgtacccctctgtggttcatattactacttctgttccatggtgtgcaggtctgcttcttaattcagtgttatgatatcttccagtttttgctttcataggtcagagatctatcttgtgtgtgcgttagacttgatgagaaggtgtgaactctgcagaaagtctcttcttcatcactgaattcagtcacttggagatgacaacttcaaatgctaacccgatgaccccagaaaaccgtgtgagattcgtaccgaagaaccttgtggaatccctttgcttaggcccaacctggtcgatagctcgagaaagaattttttccaaggaaatgtctcggatatgggtactgtatttgaaagctgttagctttgtcaacacgcattgtccttgtcatttgggccccgagctctgaccctcgtgtctgacgcggccacctctttctggaggggctgaggacagatgtgcctgcttgtggagaccaggctgggcctaagcgaagggtcatcgcagccccagcccggagcgtggagcccttggggggtggtcgggtgggatgtgcgttctccgctcgtggtgatgtcaggagctcctcggagggaacagagcggctgtgtatgcagcctgcaggtttccatacactgaagcttttacctcaactttaaaaaaaaaaaaagaagaaaagatttaaaaaaaaaaaaaaaggagactttttttgtaaggttcggcaattttctacggaagtccagcccgctgtgagtccccgcctggctagcgctgcccctgctgctgctgccgcgccacccttgggaaccacttcccgagcttatgtgtatataaatagttatttattaacatcattggtcatttttaaaaaaaagaaaataagaaaaaaccgcagaagaaatgcattcacacagtcgcagagatgcaggccttgccagtggtgtgccgggcgcgggtcctgtctggcggcggcctgtcgtctccaggtgctaactcctgccaccgcgcggtgctcacccacgtctgttcgcgcgctcgcccctgggtttgttgggttttttggtttttttctttgtggtttttttttttttttttttttgtatgaaacttggaggcttacaggtatagacagctttcagctacagcacattctaattttttattttgtttagttcttttgtattcacttctggtctctttaagactgttttaaaagaaatcaatttagggaaccccagttatataatataaactttgtaatctgagagaaaaaatgtatagtaaatctaagtcttgatttttaactttctattgtaaaaaataataatatacagagtttaatagaaggtgatgttttggttttgttttcccagaggctgccatatggtctttgagtacggggatgtcccaaactggcccaccaatgagcatggcggctccggccaggaatgccagagttagcctcccaggcttgcgggtggacatgcctgctccctgccagcctccagtggcctggccaggccctcccgagcctgtctgccctccccaggggtggaggagtctctgggccccaggaggattccctcccggagactcgcacggtgctccctgctcacgcgttgtcacagttagtccggaaatgactgaaaccaggcattctcccggacctcagcgtgggggagcctccaggcagacgctgggtatggagctgtggtgtggtctgtcctgtatggtggccagtgctttctgccagcatttctggatggatatagggactatcattagtatcctaatacacggtgattttaaaacaaccataaaattgattcagagtccactgacccttacagatgtaggtatacccttactggagagggaactctgatgaggagatgctggtaaattatcattttttaaattgctggtgagtctgacacttggtgagttttcagccagtttgttaaacttttaattaagttttgtttataataaaaatataaatggatttgaaagtttccattttttaaagttaccctcgttttcaaaggtattttctaaacagatctttaatggactatttaaaccgaatttaaggaattcacacacgacagttgacaggtcttcacgcaggctggttggtaacgtgctgccagcacagggctgggtgatacgtacaccctaagccgggggtgcctggggctggggggcgctccttgcaatgcccctccagccacagggcagtgaggtgctgcctgtgtgagccgtcgggggagcggccggctgtgggggcagcgcagcaggagcatcgtggggcctttccttctcggctggttctctgtgacggtggcgtcggctcgcctctgctcctttcatctagaaagaagccactgaccctgacagcccacggcgggtacactgagcagctgcattggtgctgtcacttttttaaggctttctgtccagacttcaacactggtttcttttcagagtttcgaaggattaatgacttcctcagcgcccttgctggcgggctgagggtgacagtcacgtccgtttcttctgtattagaaggctgcggtgattcaattagattgtcccactgctgagacctgtagggcagcttctaacatgcttttttcaaggggagaggagtagtgacaagtcgtgtgtcggaattggatttgagaacactctgaatgacccctggaggccgagggggcaggcttcgggcgtgaactgaactccagacccctctttgtgttgggcagtgtcatcttgcttacaaactgtaagacacatttttttgtgtgtttgtttttgttgttgttcttttgcagcactcacgcctctgacagtcttttgggaaagagtaacacccacatacagaatttgtcacatccagagtagcactgttccttaatactggcataatgcttccaggaagtttttcttttttatatttaaaatgttacttttctgtatgatgtgcatgcaagtttaccgtaacttttcttaaactttttagtgccgtttctagtatattcctgtaaatgtcagttactgaaaatgagtccaatgtaagtagtttagcttgtttattgcaatgctggcctcaacacaacagaataaaaatggtagaaagtactctttgatgtttctggtaatcatggacccttctcctggggcatttgttttgttttcataataaaaagcaaaaaaaaaaaaaaaaaaaaaaaaaaaaaaaaaaaaaaaa

SEQ ID NO: 548 - DNA, 414 bp, HOMO SAPIENS
  misc_feature (371)..(372): n is a, c, g, or t
ggacttctagatagacgcactcttataatataaggtaatgttataacagacaagggctagaatcagggtacgtgggtgaataggtagttatgtccctcggctgctccactgacatttcattttttagctcttctcttaaaataatatttgctgaagggagcactgggaaggccccatacttcctatatgactggagcacggaattctgcctcccaggggctctggggtgaggggtatcctccctgcaccgctccgggggttagggtgcccctgagttgtgccttactgagtctgcacatcctgcacagagctcctgcctggagccattctaaaactcagccgctcctattccccaaggatctgtgtctttnngcctccagccatgcctgaaatttcaccattataagcctgctt

SEQ ID NO: 549 - DNA, 263 bp, HOMO SAPIENS
ttaagttcctaagcagcccagttagttgttcaatacatgaggatcaaataatgttactgacagatcaaacttcatgaagatggcctaagaaagttttaaaatataatgaggcaaaaatggagagacttgctatggctaaggtacataagcaaggttcagctgccagtcattggctgggtttactctcctcctcctccagtctgttatctcccaactctatccaagcaccattttatacctttaagaatgtgtgggccggacgt

SEQ ID NO: 550 - DNA, 428 bp, HOMO SAPIENS
aggaggtctcaaagccccaaagcgtatcttcccagagcatcaagttggaaaatctaagaagagctaccctagagggtctgggattttttcttagttaagttgggctatcagaaaagctgctttcttgagcctcatggtcacagtagccctgcccctgcagaaatgcactgattagcatgtgggcgtcatactcatccataagacaagctctatacaacctactgcagggcctctaaatgtgctgttgaggaccgtgaccattgcctcactggtctacccactgaaaacccatgtgaaaatttccttccactctaaatgtcaggaaaaaaaaaaaatggcttccattaaggaactggactctcctccactggtggacaatgagaagaacacaactgattgcatttcccattttgctttgaccatcagga

SEQ ID NO: 551 - DNA, 4169 bp, HOMO SAPIENS
gggtcccccggagccggccttcgggaggcgcggcccgggaggaggcctgggcctgcgggccgggagcagcaggggcggcccgcgggagggagcggaagtcccggggcgggcgcgggcagcggcgcgagcagggcgggcgagttccgcgctccctccccatggccgggagcgggccgcggcgacggcggcggcgctgacaggccccgggcggggcggggcaggcgggcctgggcgggggcctggggctgtgggaagatgaacgccctcctagagcagaaggagcagcaggagaggctgcgggaggccgcggccttaggggacattcgggaggtgcagaaactggtggagagcggggtggatgtgaactcccaaaatgaggtcaacggctggacttgtttacactgggcatgtaaacgaaaccatggtcaggtggtctcttacctgttaaaatcaggagctgacaaagaaattcttaccacaaaaggagaaatgccagtccagttaacatcaaggagagaaatcaggaagattatgggagtggaagaagaagatgatgatgatgatgatgatgacaacctcccccagctgaagaaggagtcagaactgccctttgttcccaactatttggccaacccagccttcccttttatctatacacccacagcagaggattcagcccagatgcagaatgggggcccctccacaccccctgcatcaccccctgcagatggctcacctccattgcttccccctggggaacctcccctgttagggacctttccccgggaccacacctctttggcactagttcagaatggtgatgtgtcggccccctctgccatactcagaacaccagaaagcacaaaaccgggtcctgtttgtcagccaccagtgagtcagagccgctccctgttttcttctgtcccgtccaagccaccaatgtctctggagcctcaaaatgggacgtatgcaggaccagcgccagcattccagccatttttcttcactggagcatttccatttaatatgcaagagctggtactcaaggtgagaattcagaacccatctcttcgagaaaatgatttcattgaaattgaactggaccgacaggagctcacctaccaagagttgctcagagtgtgttgctgtgagctgggtgttaatccagatcaagtggagaagatcagaaagttacccaatactctgttaaggaaggacaaggatgttgctcgactccaagatttccaggagctggaactggttctgatgataagtgaaaataattttctgttcagaaatgctgcatccacactgactgaaaggccttgctataacaggagagcttcaaaactgacttactaatgcagcagggacttttatcactgagtattatgacagtgtgcatcacctctgggccaaggacaagccattgatctaaatgcctcagatgcccgggagggcctctggtgccactgcatagtatatactaacatcattctgccaaggtaggaagcccctgacccccaagcagtggtgccactcttccaagcctcttggtgcacagtaaacctattgcttgaagctttgaacagctgagaagtggtctggagaggcagaagctgaaggttctatatccagtgtgttttatgtccagaatgtaagagagttgtctaagcagcagctgagagagagcggagcctatttctagccactcctgttgacagtgcacctgaagggctgggatgcgtttttcttggtgttgcatgctcacaactctgctgacattgggaacttatgagagaggaagactcgggaaagcacagatactggacagatggattctggtgtggggaaagcacagatactggacagatggattctagtgtgacttgtgactgtgaggtttcctataacatatttataaatgttactcaggttaaaagtatttaagaatacagttaactaattgtaaatatgctgttaaccaaaagagctttccctccctcactttttcctttgtaaacactcatgactgcttctctgtctcgagtcatctctgcattaactccccttcgtggtcactagagggctctctgatgccttctaaaagaacaactgcttttttacaatgccccccacccccaccccgcccatagagacagggtctcactatgtggcccaggctggtctcaaacttctggccttaagtgatgctcctgtccttggcctcccaaagtgctgggattacaggtgtgagccactgcacccagcccactttttttttactctgaagtgattccagtcatatgtgtgtgtaactgcatcctatgagaagagcacaaatattgctgttccatgttctccactttcattttccactacaaatgaaaagcaatttttgagactgaatctgttgctattttaaaggttattgtgggaaactgagctaaaggagttagcatctttatttttgtatcaaaaataaaggttattttgaaattattaggatttttacacaattctgaaatctgttgcttttgtaaacaaattgtttgatcttagtgatccccctactactaccaccaattcacttcacaaagtcagttatgagtctaccagactttgttctgaaaaatagaaacaaaacacctgattaagctcttgagtatggcataggaattttttagaagaatgcattcaaggattcttttcctttccttcagtgtcattaatgttaaaagagcagccactgttttgttgaaacaaacagcttaacttcagaaataagaactagcacacttagacaaacaggagagcaggggtttgaagccagctgtcgaagagcatccctgctgtcttaagaagctttttccccatagtgcctatagtttccaaagaaactcaacttcctaactgtgttaacttaattttattagaacactacagttgagtgagaacgtgcagaagatgtcaacagaagagaatgttgtgctaagataatggcctcctgctgctgcctaaatgctgaaatgaggttgagatgtttttcaaggctaacttcatggactcactctgtttagtgacttaattgtatcccaccaattactgctggtgacttactcacccttgtacagtgtttgcatagcagagtgaaggttacttattaccctctttctctcaagtgctttaaagaagaaacctccctggtgtttcttttctttttttttttgagacggagtcttgctttgttgcccaggctgaagtgcagtggcataatctcagctcactgaaacctctgcctcccgggttcaaacgattctcctgcctcagcctcccaagtagctgggattacaagcatgtgccaccatgcccagctaatttctgtattttagtagagacaaggtttcaccatgttggccaggctggtctcgaactcctggcctcaagtgatccacctgccttggcctcccaaagtgctccgattacaggtgtgagccacccggcccagcccctcccttgtgtttcaaccaatcggaagtgaatttaactagatgtagtaaccttttttttctttacttctaaaacagttacagtttactaataaagttaagtctggttctgtcctagaggaaataaattcactattaattcatgtcttaagttacttgggttaaaacactttcagccacccagattaattaaagtggagcagtggagcccctggctgggagatggcctccagaggagcagctgcagggcatgttctgggcttagcgacagaggcaagcaagggactggtgtctctggtgagaggtgggtttgatgtatctctgtcctatgctggtctctcttctcctttataaaatcctctgtggtcaactgactactgcgtatcgcagtggaataagactgcacagttgctggtaggtgagtttaaagtcttaatctatgcattcagagaaatatttttatatgctttgtgtaatttataacaaggattttttttttagctttgttaactgtgaattcacccctcctcctccactgcatatttaaagcatgtgttcacactgtgtgtaaacattcactgaagattttttctttgtgcattgctgactgttcaaacataacaagtattattaaaattaaatattaactgaccgatccta

SEQ ID NO: 552 - DNA, 1956 bp, HOMO SAPIENS
gtgcgtgagtttggtggcggccggctgtgcagagacgccatgtaccggctcatgtcagcagtgactgcccgggctgccgcccccgggggcttggcctcaagctgcggacgacgcggggtccatcagcgcgccgggctgccgcctctcggccacggctgggtcgggggcctcgggctggggctggggctggcgctcggggtgaagctggcaggtgggctgaggggcgcggccccggcgcagtcccccgcggcccccgaccctgaggcgtcgcctctggccgagccgccacaggagcagtccctcgccccgtggtctccgcagaccccggcgccgccctgctccaggtgcttcgccagagccatcgagagcagccgcgacctgctgcacaggatcaaggatgaggtgggcgcaccgggcatagtggttggagtttctgtagatggaaaagaagtctggtcagaaggtttaggttatgctgatgttgagaaccgtgtaccatgtaaaccagagacagttatgcgaattgctagcatcagcaaaagtctcaccatggttgctcttgccaaattgtgggaagcagggaaactggatcttgatattccagtacaacattatgttcccgaattcccagaaaaagaatatgaaggtgaaaaggtttctgtcacaacaagattactgatttcccatttaagtggaattcgtcattatgaaaaggacataaaaaaggtgaaagaagagaaagcttataaagccttgaagatgatgaaagagaatgttgcatttgagcaagaaaaagaaggcaaaagtaatgaaaagaatgattttactaaatttaaaacagagcaggagaatgaagccaaatgccggaattcaaaacctggcaagaaaaagaatgattttgaacaaggcgaattatatttgagagaaaagtttgaaaattcaattgaatccctaagattatttaaaaatgatcctttgttcttcaaacctggtagtcagtttttgtattcaacttttggctataccctactggcagccatagtagagagagcttcaggatgtaaatatttggactatatgcagaaaatattccatgacttggatatgctgacgactgtgcaggaagaaaacgagccagtgatttacaatagagcaagattttatgtttacaataaaaagaaacgtcttgtcaacacaccttacgtggataactcctataaatgggctggtggtggatttctgtctacagtgggtgaccttctgaaatttgggaatgcaatgctttatggttaccaagttgggctgtttaagaactcaaatgaaaatcttttacctggatacctcaaaccagaaacaatggttatgatgtggaccccagtccctaacacagagatgtcttgggataaagagggtaaatatgcaatggcgtggggtgttgtggaaaggaaacaaacgtatggttcgtgtagaaagcaacggcattatgcttcacatactggaggggcagtgggtgccagtagtgtcctgctggtccttcctgaagaactggatacagagactataaataacaaggttcccccaagaggaatcattgtttctatcatatgtaacatgcaatctgttggcctcaatagcaccgctttgaagattgcccttgaatttgataaagacagatcagactgataaccttaacaccataggtgcaaaatgagttgttctgaggtttttttgaaacattaaagttccaaaacatgacatttttaagaataaatttgaaatagagtataactgaatgcagagaattatgtacctctaattgcttaattttgtaatggtcttttattgtagaattggttctttatactcagggaagtaattatattgtttttactttttgaaaaaagtgttaactcttgaaataaaatattctgataaaataaaaaaaaaaaaaaaaaa

SEQ ID NO: 553 - DNA, 4185 bp, HOMO SAPIENS
cggccgcgagcgcagtggtgtggagcgcgccgggtcccggagccggctgtctgagggatggacgagacgagcccactagtgtcccccgagcgggcccaacccccggactacaccttcccgtcgggctcgggcgctcactttccgcaggtgcccgggggcgcggtccgagtggcggcggcggccggctcgggcccctctccgccaggctcgccgggccacgaccgcgagcggcagccactgttggatcgggcccggggcgcggcggcccagggccagacccaaaccgtggcggcgcaggcccaggctctggccgctcaggccgcggcggcagcccacgccgctcaggcccaccgcgagcggaacgagttcccggaggatcctgagttcgaggcggtggtgcggcaggccgagctggccatcgagcgctgcatctttcccgagcgcatctaccagggctccagcggaagctacttcgtcaaggaccctcaggggaggatcattgctgtcttcaaacccaagaatgaagagccctatgggcatcttaatcctaagtggaccaagtggctgcagaagctgtgctgtccttgctgctttggccgtgactgccttgtccttaaccagggctatctctcagaagcaggggccagcctggtggaccaaaaactggaactcaacattgttccccgtacaaaggtagtatacctggccagtgagaccttcaactatagtgccattgaccgagtgaagtccaggggcaagcggcttgcactagagaaagtgccaaaagttggacagcggtttaaccgcatcgggctaccaccaaaggttggttcattccagctctttgttgaaggctacaaagatgcagactattggctgcggcgttttgaagcagaacctcttcctgagaacactaaccggcaactactgctccagtttgagcggttggtggtgctggattacatcatccgcaacactgatcgaggcaatgacaactggctgattaaatatgactgtccaatggatagttctagctctcgggacacagactgggtggtggtgaaggagcctgttatcaaggtggctgccatagacaatgggctggccttcccactgaagcatcctgactcctggagggcatatcctttttactgggcctggttgccccaggcgaaagtcccattttctcaggagatcaaagatctgatccttccaaagatatcggaccctaacttcgtcaaggacttggaagaggacctatatgaactcttcaagaaagatcctggtttcgacaggggccagttccataagcagattgctgtcatgcggggccagatcttaaatctgacccaggccttgaaagacaacaagagtcccctgcacctcgtccagatgccacctgtgattgtcgagacggcccgttcccaccagcggtcttctagcgagtcctacacacagagctttcagagccggaagcccttcttttcatggtggtagctccagaggcaggcagaggaaatattgtcagagactggtgggaggaagcctggggagtggggtgcaggaaaagccagagaagccggtggagagcagcacctttaagagccctctctctctgcttgccaccctgctcagagctttccacccacagggagaagcacaatcaggaacagtgagtgctcctcgcccttctgatgtgggggaggctggagctccatgcacgtagtccagatgcctgggaaggaacatctcccttccagcatctgctggtagcaggctgggacagtcccttccttccctgaaaccctgctctattgcaattccctattatattctgcatcagaaaaacaaacaaaacaaaaacaactttaaatgcttgtagcagaaccccgggtcatctcatgtcagaaacctttaatccaggcctaaatttgcatagacctgacattcagctgccttgcagttgcttcctcccatgagccaaggtggtgtcagagggcaactggatgactcgcagtaccacagcactgggacagacagaagccacacctttcttttgggtttttgccaagcctcctccatctcccatcagtgctgtgggctggctgcaagcctcgaaacagttctcctggaagggaggtttttgctttacccccgccagcacttccgcacacaatcatagagaacctctctgctctctgctggcctacagcttgtctgtttctcaagcagaggcaggaagagctagtcttagcatttatattttaataggaagttgactcccagcatgtaaaagtgatccacgcagccggagtgtatgccgggagctaagtggtctatgggtgaacatatcccaccttgcttcctgagtccttggtcccaatcttctcatttgttcctctcgttttaaattttttccccccaactcttttgatgtaagagttcagtttgtcttcgggagtgggtctctgcaagggctctgggatgagtcttggcttccaagaggacaggctattaggttcttggacttttttctgtgctaccgctgctgcttggtggaagtaacaggacgtggattctgcctcataagtggcagtttcccttttctctctgacttgtcctaggccgatttctctatggcttccctgagaaaggtgaggcccaaaggagagaggccttcaaactgtcccaggtcctgcgcagctcagtgcgtatcttcttgcttccatgtgtcttttcccctgctgcctcactccccacccccacttgccaggtgtttgagccatttctacaccaaagcaaagtacggcctcaggagggagtaaaaagggtgccatctgtgtctggaggggcagctgtgttcatgccctgtgctactggacatttcacaattctggcaccttgcgattggtcagtcaacctcagaaagtaactatcttgaaggtttgaaaaacaaccaaagaaagggagtgaggactatggctgcatgtcctctgcttgcccggctgcagagcagagatgtgcagccctctggtcagctggtccaggctggtccccgccggtccccttccagtccagccaccaagagtccacttgtcccgggcttccacctggctgacaggaagaatttctgagagctggatgtgcatgccctgtggacgaaggtacagctcgcctgcctgccccaatcccagccccgacaatcacatgcagctgactcggacactggccttgggaacaatgttcgagagaacacttgccccttgactgtaggagccagaaggggacccaggtgtgcatagctctctgtagacatttttacccaaacctgttggtaaagtgcccatctggtgctcaagagagcctgggggtctaacagggagcccggctgcctcacctggccacagcctccacaccagatctccacattgtcttgatccagaccagctctgtgatcagaaggaaattgggtccagtgtaggagagagctggtcctgggcctggcaggcaagagtgtgggcatcctttcctggcctttctccactctccctcaagcctgtgctcaggttgccttgaatgtggactctggaagagccaggggcccagaatgccgggggaggcttctgagtggcactcatggaacaccgtccctctgccagccataggccctgcctccagtgtcagggaatggaggctgggctgcgagagtgttgctgccccctgtgtcattcttctaatccaatgtagaaattgtacgtaatgtatttaaatcaacgcaaatgtatgaataacaaatacagttctgaccttttttgtccagtttctttgggggaaggaagacaaagaaggtaggaacggaattttgagggcaaagaaacctgtgtttccatggaattgctgagacgtggctcctggggctatttctccctaataaaggatgatccaggtcctcatttccaaagtcccaatgctctgaaaaccaaaagtattttcataacccatttgaaaccaaacctgacctgaacttacactgataggaagctatgggtaattatgatgtgttccttttagtgtgattctttgttgcagaaatgtcaatatattttatgacatggttccctactagggattatacagtatttgctgactacttcctaagagccaaaaataaaaaatctgaattcc

SEQ ID NO: 554 - DNA, 1250 bp, HOMO SAPIENS
ctctgctccggtgcaggcccgcagggcgccctgggctgggagcaacgcgactgaccgtggtcgtgggcggacggcggctgcagcgtggaggagctggggtcgctgtgggtcgcgaagcagagcccgggacgtgcgcgcttggtgcacgatcctgaaggggagctccgaggggcccgggtcgccagggctgctgcggccattcccggagcccggcgcggggcccgcgagatactggtttaggccgtcccagggctccgggcgcacccggtggccgctgctgcagcggagggagcgcggcggcgcgggggctcggagacagcgtttctcccggaagtcttcctcgggcagcaggtgggaagtgggagccggagcggcagctggcagcgttctctccgcaggtcggcaccatgcgccctgcagccctgcgcggggccctgctgggctgcctctgcctggcgttgctttgcctgggcggtgcggacaagcgcctgcgtgacaaccatgagtggaaaaaactaattatggttcagcactggcctgagacagtatgcgagaaaattcaaaacgactgtagagaccctccggattactggacaatacatggactatggcccgataaaagtgaaggatgtaatagatcgtggcccttcaatttagaagagattaaggatcttttgccagaaatgagggcatactggcctgacgtaattcactcgtttcccaatcgcagccgcttctggaagcatgagtgggaaaagcatgggacctgcgccgcccaggtggatgcgctcaactcccagaagaagtactttggcagaagcctggaactctacagggagctggacctcaacagtgtgcttctaaaattggggataaaaccatccatcaattactaccaagttgcagattttaaagatgcccttgccagagtatatggagtgatacccaaaatccagtgccttccaccaagccaggatgaggaagtacagacaattggtcagatagaactgtgcctcactaagcaagaccagcagctgcaaaactgcaccgagccgggggagcagccgtcccccaagcaggaagtctggctggcaaatggggccgccgagagccggggtctgagagtctgtgaagatggcccagtcttctatcccccacctaaaaagaccaagcattgatgcccaagttttggaaatattctgttttaaaaagcaagagaaattcacaaactgcagctttctaaaaaacaa

SEQ ID NO: 555 - DNA, 1999 bp, HOMO SAPIENS
ccggagccccgccagagcccgacttcagccccagccagatcccgcgtcaacggaggcggaacggcggaccccgtaccctggcagcatcggagcaccggcgggtgaaggcaaggtccctggactggtcatatacctcttgtggccctggcagaatcaagatgaggccctgtcatgcctccccagtgaggcctacagtctgagcagacagcatggcctgccactggcagtgaacaccatgtctgcaggaggtggccgggcctttgcttggcaagtgttcccccccatgcccacttgccgggtctatggcacagtggcacaccaagatgggcacctgctggtgttggggggttgtggccgggctggactgcccctggacactgctgagacactggacatggcctcgcacacatggctggcactggcacccctgcccactgcccgggctggtgcagctgcggtagttctgggcaagcaggtgctagtggtgggtggtgtggatgaggtccagagcccggtagctgctgtagaggccttcctgatggatgagggccgctgggagcgtcgggccaccctccctcaagcagccatgggggttgcaactgtggagagagatggtatggtgtatgctctggggggaatgggccctgacacggccccccaggcccaggtacgtgtgtatgagccccgtcgggactgctggctttcgctaccctccatgcccacaccctgctatggggcctccaccttcctgcacgggaacaagatctatgtcctggggggccgccagggcaagctcccggtgactgcttttgaagcctttgatctggaggcccgtacatggacccggcatccaagcctacccagccgtcgggcctttgctggctgcgccatggctgaaggcagcgtctttagcctgggtggcctgcagcagcctgggccccacaacttctactctcgcccacactttgtcaacactgtggagatgtttgacctggagcatgggtcctggaccaaattgccccgcagcctgcgcatgagggataagagggcagactttgtggttgggtcccttgggggccacattgtggccattgggggccttggaaaccagccatgtcctttgggctctgtggagagctttagccttgcacggcggcgctgggaggcattgcctgccatgcccactgcccgctgctcctgctctagtctgcaggctgggccccggctgtttgttattgggggtgtggcccagggccccagtcaagccgtggaggcactgtgtctgcgtgatggggtctgaaggcttggtgggagctgtccactggagcagctcattgccagaggcagctatttctatggctccttttgctgctgaggacactcactgtggctctgtgggatgagagaggcatgggggtgagcacttgaaacactgccttggggccttgggttaggggagcctttgtctttagtgcaggacacacatatgcttacacctacctttatcaccattcgttcatgaatcatgcctagctccatccttgccctgggacctactaggccttccatccaactgggaaatggggagaagcaaagctggcctcatgctcttcagggtcagttcctatctggagttgaccaggcctaccccagttgccattcctgaaaaatctcagctgccaggctgcctttagggtccctgcagacccaggagagttgagagggtgggggacacagagagaatagagaggatgtgggaactgccagagggccggagcgcaggagttcaagtggaggaatgctggctttgagccctctacactgctggttgtatgaccttggacaagtcacttcacctctctgtgcctcagcatcctcatctataaatggggatctctgaaaccttcctaccctacctacctcacagggctgttgtgaggacccagggagtttggatgtggaagtaaaagtgctgctaaaacctaaaaaaaaaaaaaaa

SEQ ID NO: 556 - DNA, 7321 bp, HOMO SAPIENS
ttttgtagataaatgtgaggattttctctaaatccctcttctgtttgctaaatctcactgtcactgctaaattcagagcagatagagcctgcgcaatggaataaagtcctcaaaattgaaatgtgacattgctctcaacatctcccatctctctggatttctttttgcttcattattcctgctaaccaattcattttcagactttgtacttcagaagcaatgggaaaaatcagcagtcttccaacccaattatttaagtgctgcttttgtgatttcttgaaggtgaagatgcacaccatgtcctcctcgcatctcttctacctggcgctgtgcctgctcaccttcaccagctctgccacggctggaccggagacgctctgcggggctgagctggtggatgctcttcagttcgtgtgtggagacaggggcttttatttcaacaagcccacagggtatggctccagcagtcggagggcgcctcagacaggcatcgtggatgagtgctgcttccggagctgtgatctaaggaggctggagatgtattgcgcacccctcaagcctgccaagtcagctcgctctgtccgtgcccagcgccacaccgacatgcccaagacccagaaggaagtacatttgaagaacgcaagtagagggagtgcaggaaacaagaactacaggatgtaggaagaccctcctgaggagtgaagagtgacatgccaccgcaggatcctttgctctgcacgagttacctgttaaactttggaacacctaccaaaaaataagtttgataacatttaaaagatgggcgtttcccccaatgaaatacacaagtaaacattccaacattgtctttaggagtgatttgcaccttgcaaaaatggtcctggagttggtagattgctgttgatcttttatcaataatgttctatagaaaagaaaaaaaaaatatatatatatatatatcttagtccctgcctctcaagagccacaaatgcatgggtgttgtatagatccagttgcactaaattcctctctgaatcttggctgctggagccattcattcagcaaccttgtctaagtggtttatgaattgtttccttatttgcacttctttctacacaactcgggctgtttgttttacagtgtctgataatcttgttagtctatacccaccacctcccttcataacctttatatttgccgaatttggcctcctcaaaagcagcagcaagtcgtcaagaagcacaccaattctaacccacaagattccatctgtggcatttgtaccaaatataagttggatgcattttattttagacacaaagctttatttttccacatcatgcttacaaaaaagaataatgcaaatagttgcaactttgaggccaatcatttttaggcatatgttttaaacatagaaagtttcttcaactcaaaagagttccttcaaatgatgagttaatgtgcaacctaattagtaactttcctctttttattttttccatatagagcactatgtaaatttagcatatcaattatacaggatatatcaaacagtatgtaaaactctgttttttagtataatggtgctattttgtagtttgttatatgaaagagtctggccaaaacggtaatacgtgaaagcaaaacaataggggaagcctggagccaaagatgacacaaggggaagggtactgaaaacaccatccatttgggaaagaaggcaaagtccccccagttatgccttccaagaggaacttcagacacaaaagtccactgatgcaaattggactggcgagtccagagaggaaactgtggaatggaaaaagcagaaggctaggaattttagcagtcctggtttctttttctcatggaagaaatgaacatctgccagctgtgtcatggactcaccactgtgtgaccttgggcaagtcacttcacctctctgtgcctcagtttcctcatctgcaaaatgggggcaatatgtcatctacctacctcaaaggggtggtataaggtttaaaaagataaagattcagattttttttaccctgggttgctgtaagggtgcaacatcagggcgcttgagttgctgagatgcaaggaattctataaataacccattcatagcatagctagagattggtgaattgaatgctcctgacatctcagttcttgtcagtgaagctatccaaataactggccaactagttgttaaaagctaacagctcaatctcttaaaacacttttcaaaatatgtgggaagcatttgattttcaatttgattttgaattctgcatttggttttatgaatacaaagataagtgaaaagagagaaaggaaaagaaaaaggagaaaaacaaagagatttctaccagtgaaaggggaattaattactctttgttagcactcactgactcttctatgcagttactacatatctagtaaaacctcgtttaatactataaataatattctattcattttgaaaaacacaatgattccttcttttctaggcaatataaggaaagtgatccaaaatttgaaatattaaaataatatctaataaaaagtcacaaagttatcttctttaacaaactttactcttattcttagctgtatatacatttttttaaaagtttgttaaaatatgcttgactagagtttccagttgaaaggcaaaaacttccatcacaacaagaaatttcccatgcctgctcagaagggtagcccctagctctctgtgaatgtgttttatccattcaactgaaaattggtatcaagaaagtccactggttagtgtactagtccatcatagcctagaaaatgatccctatctgcagatcaagattttctcattagaacaatgaattatccagcattcagatctttctagtcaccttagaactttttggttaaaagtacccaggcttgattatttcatgcaaattctatattttacattcttggaaagtctatatgaaaaacaaaaataacatcttcagtttttctcccactgggtcacctcaaggatcagaggccaggaaaaaaaaaaaaaagactccctggatctctgaatatatgcaaaaagaaggccccatttagtggagccagcaatcctgttcagtcaacaagtattttaactctcagtccaacattatttgaattgagcacctcaagcatgcttagcaatgttctaatcactatggacagatgtaaaagaaactatacatcatttttgccctctgcctgttttccagacatacaggttctgtggaataagatactggactcctcttcccaagatggcacttctttttatttcttgtccccagtgtgtaccttttaaaattattccctctcaacaaaactttataggcagtcttctgcagacttaacgtgttttctgtcatagttagatgtgataattctaagagtgtctatgacttatttccttcacttaattctatccacagtcaaaaatcccccaaggaggaaagctgaaagatgcactgccatattatctttcttaactttttccaacacataatcctctccaactggattataaataaattgaaaataactcattataccaattcactattttattttttaatgaattaaaactagaaaacaaattgatgcaaaccctggaagtcagttgattactatatactacagcagaatgactcagatttcatagaaaggagcaaccaaaatgtcacaacccaaaactttacaagctttgcttcagaattagattgctttataattcttgaatgaggcaatttcaagatatttgtaaaagaacagtaaacattggtaagaatgagctttcaactcataggcttatttccaatttaattgaccatactggatacttaggtcaaatttctgttctctcttccccaaataatattaaagtattatttgaactttttaagatgaggcagttcccctgaaaaagttaatgcagctctccatcagaatccactcttctagggatatgaaaatctcttaacacccaccctacatacacagacacacacacacacacacacacacacacacacacacacattcaccctaaggatccaatggaatactgaaaagaaatcacttccttgaaaattttattaaaaaacaaacaaacaaacaaaaagcctgtccacccttgagaatccttcctctccttggaacgtcaatgtttgtgtagatgaaaccatctcatgctctgtggctccagggtttctgttactattttatgcacttgggagaaggcttagaataaaagatgtagcacattttgctttcccatttattgtttggccagctatgccaatgtggtgctattgtttctttaagaaagtacttgactaaaaaaaaaagaaaaaaagaaaaaaaagaaagcatagacatatttttttaaagtataaaaacaacaattctatagatagatggcttaataaaatagcattaggtctatctagccaccaccacctttcaactttttatcactcacaagtagtgtactgttcaccaaattgtgaatttgggggtgcaggggcaggagttggaaattttttaaagttagaaggctccattgttttgttggctctcaaacttagcaaaattagcaatatattatccaatcttctgaacttgatcaagagcatggagaataaacgcgggaaaaaagatcttataggcaaatagaagaatttaaaagataagtaagttccttattgatttttgtgcactctgctctaaaacagatattcagcaagtggagaaaataagaacaaagagaaaaaatacatagatttacctgcaaaaaatagcttctgccaaatcccccttgggtattctttggcatttactggtttatagaagacattctcccttcacccagacatctcaaagagcagtagctctcatgaaaagcaatcactgatctcatttgggaaatgttggaaagtatttccttatgagatgggggttatctactgataaagaaagaatttatgagaaattgttgaaagagatggctaacaatctgtgaagattttttgtttcttgtttttgttttttttttttttttactttatacagtctttatgaatttcttaatgttcaaaatgacttggttcttttcttctttttttatatcagaatgaggaataataagttaaacccacatagactctttaaaactataggctagatagaaatgtatgtttgacttgttgaagctataatcagactatttaaaatgttttgctatttttaatcttaaaagattgtgctaatttattagagcagaacctgtttggctctcctcagaagaaagaatctttccattcaaatcacatggctttccaccaatattttcaaaagataaatctgatttatgcaatggcatcatttattttaaaacagaagaattgtgaaagtttatgcccctcccttgcaaagaccataaagtccagatctggtaggggggcaacaacaaaaggaaaatgttgttgattcttggttttggattttgttttgttttcaatgctagtgtttaatcctgtagtacatatttgcttattgctattttaatattttataagaccttcctgttaggtattagaaagtgatacatagatatcttttttgtgtaatttctatttaaaaaagagagaagactgtcagaagctttaagtgcatatggtacaggataaagatatcaatttaaataaccaattcctatctggaacaatgcttttgttttttaaagaaacctctcacagataagacagaggcccaggggatttttgaagctgtctttattctgcccccatcccaacccagcccttattattttagtatctgcctcagaattttatagagggctgaccaagctgaaactctagaattaaaggaacctcactgaaaacatatatttcacgtgttccctctttttttttttcctttttgtgagatggggtctcgcactgtcccccaggctggagtgcagtggcatgatctcggctcactgcaacctccacctcctgggtttaagcgattctcctgcctcagcctcctgagtagctgggattacaggcacccaccactatgcccggctaattttttggatttttaatagagacggggttttaccatgttggccaggttggtctcaaactcctgaccttgtgatttgcccgcctcagcctcccaaattgctgggattacaggcatgagccaccacaccctgcccatgtgttccctcttaatgtatgattacatggatcttaaacatgatccttctctcctcattcttcaactatctttgatggggtctttcaaggggaaaaaaatccaagcttttttaaagtaaaaaaaaaaaaagagaggacacaaaaccaaatgttactgctcaactgaaatatgagttaagatggagacagagtttctcctaataaccggagctgaattacctttcactttcaaaaacatgaccttccacaatccttagaatctgcctttttttatattactgaggcctaaaagtaaacattactcattttattttgcccaaaatgcactgatgtaaagtaggaaaaataaaaacagagctctaaaatccctttcaagccacccattgaccccactcaccaactcatagcaaagtcacttctgttaatcccttaatctgattttgtttggatatttatcttgtacccgctgctaaacacactgcaggagggactctgaaacctcaagctgtctacttacatcttttatctgtgtctgtgtatcatgaaaatgtctattcaaaatatcaaaacctttcaaatatcacgcagcttatattcagtttacataaaggccccaaataccatgtcagatctttttggtaaaagagttaatgaactatgagaattgggattacatcatgtattttgcctcatgtatttttatcacacttataggccaagtgtgataaataaacttacagacactgaattaatttcccctgctactttgaaaccagaaaataatgactggccattcgttacatctgtcttagttgaaaagcatattttttattaaattaattctgattgtatttgaaattattattcaattcacttatggcagaggaatatcaatcctaatgacttctaaaaatgtaactaattgaatcattatcttacatttactgtttaataagcatattttgaaaatgtatggctagagtgtcataataaaatggtatatctttctttagtaattacattaaaattagtcatgtttgattaattagttc

SEQ ID NO: 557 - DNA, 9732 bp, HOMO SAPIENS
gctggaggcaggaatgtgcctgcttactaatgagcgacgtgcaccggcgcgcacggcccggccaccgctgcggctgcggcggccggcggcggcccgttgtcaggtggagcctttgaattttttaaaagaccatagtaatcagatctacttgaaaaattaagtgaattgatttggttggaatgctcttttaccgatgctttaacatacagccactagattcccagaagttgtgcatgagttcctgtgaggagagttggcatcttggaaatcaaagacggttgtgatgcagttttttgatatgaggataacaggaagcgtcaggacaatcatgcccataagaactctaaactgttcagatcattttatcttagtgaaactggcaattgaactttgctctagttgatgggcaaaatttctcctagactattcatcatcccaatttcatcctagttgaaaattttcaaatgccataagaaatctttatagatttgcacttagcttttggatggacgtttctacaatggagagaactgtgttatagccctggtccaaggacattactagctaatgcccatcgactgtggtgtgcgtgtggaaggttccaaagagaaggagcaatcagcaagtttgcagacaccctggaacatggaagcaaccaagctttaagaagcacagctttggagacactccatgagtctgcactgctttcaggggaactagcacttaagaccttgtgtaacaaaatggacactggggacacagctctaggacaaaaagctacctcaaggtctggagaaactgataaagcatcaggtagatggagacaggaacaatcagctgttattaagatgagcacttttggcagtcatgaaggacagcggcaaccacaaatagagcctgagcaaatcggaaacacagcatcagcacaactgtttggttctgggaaactggcctcccctagtgaagtggtgcagcaagtcgcagagaagcaatatccaccgcatcgtccgagtccttactcatgccaacactcactctctttccctcagcactcattgccacagggggtcatgcacagcaccaagccacatcagagcctcgaaggtcctccgtggcttttccctggccctttgccatccgttgcctctgaggacttatttccttttcctatacatggccacagtggtggttatcctagaaaaaagatttcaagtctgaaccctgcttatagccaatactcccagaaaagtattgaacaggcagaagaggctcacaagaaagagcacaaacccaaaaagcctggcaagtacatttgcccttactgcagcagagcgtgtgccaaacctagtgtactgaaaaaacacatcaggtcccatactggggagcggccatatccatgtataccttgtggtttctctttcaagacaaagagcaatttgtacaagcacaggaagtcacatgcccatgcaattaaggcaggattagtacctttcacagagtcagctgtatctaaattggacctagaggctggttttattgatgtagaagcagaaatacattcagatggtgaacagagtacagacacagatgaggagagttctttatttgccgaggcttctgacaaaatgagtcctggtccacccatcccactggacattgccagcagaggcggctatcatgggtcattggaagaatcattgggaggtccaatgaaggtgccgattttgattatccctaaaagtgggattcctctccctaatgaaagctctcagtatattggccctgatatgctaccaaatccatctttaaatactaaggctgatgattcgcacacagtcaaacagaaacttgcactaagactgtcagagaaaaaaggacaagattctgagccatcgctcaaccttctgagcccgcacagtaaaggaagcactgattctggttacttttctcgctcagaaagtgctgagcagcaaataagccctcccaacacaaatgcaaagtcttatgaagaaatcatctttggaaaatactgtcggcttagtccgagaaatgcactcagtgttacaaccacaagtcaggagcgtgccgcaatgggtaggaagggcataatggaaccattacctcacgttaacaccaggttagatgtcaagatgtttgaagatcctgtttcacagctgatcccaagcaagggagatgtcgaccccagtcaaacgagcatgctgaaatccactaagttcaacagtgagtccagacaaccccagattattccatcatctatcaggaacgaaggaaaactttatccagcaaacttccaaggcagcaacccggttctcttagaagctcctgtagactcttcaccccttattagaagcaactcagtgccaacttcttcagcaactaatctaactattcctccttctttgagaggaagtcactcatttgatgaaaggatgactggttccgacgatgtattctatccagggaccgtgggcataccccctcagcgcatgctaagaagacaagcggcatttgagctgccttcggtacaggagggccacgtggaagtcgagcaccatggcaggatgttgaagggtatcagcagttcatccctgaaggaaaagaaattgtctcctggggacagggttgggtatgactatgatgtctgtcggaaaccctataagaagtgggaggactctgaaacaccaaagcaaaactacagggacatttcctgcttgagttctttaaagcatggtggagaatatttcatggatcccgtggtgccattgcagggagtaccaagcatgtttggaactacctgtgaaaacaggaaacgccggaaagagaagagcgtaggggatgaagaggacacgcccatgatctgcagcagcattgtaagcactcctgtgggcatcatggcttccgattatgaccccaaactgcagatgcaggaaggagtcaggagtggatttgccatggctggacacgaaaacctttctcatggtcacacggaacgctttgacccatgtcggccccaactgcagcctggaagtccatctcttgtgtcagaggagtcaccttcagccattgattcagacaagatgtcagacctagggggcaggaaacctcctggaaatgtgatttctgtgattcagcacaccaactcactgagccgacccaattcatttgaaaggtctgagtcagccgaacttgtggcttgcacacaggataaagccccttccccttcagagacttgtgacagtgagatttcagaagccccagtgagtcctgagtgggctccacctggggatggtgcagaaagtggggggaaaccctctccatctcagcaggtgcagcagcagtcctatcacacacagcccaggctagttcggcaacacaacatccaggttcctgagattcgagtgaccgaggagcctgataaacctgagaaggagaaggaagcccagagcaaagagccagagaagcctgtggaagaatttcagtggccccagagaagtgagaccctttcccagctccccgcggagaagttgccacccaaaaagaagcgtctgcgacttgcagatatggagcactcctcaggggagtccagctttgaatccacaggcacaggcctctcccgcagccccagccaagaaagcaacttgtcccacagctccagtttctccatgtcttttgaaagagaagaaaccagtaagctttctgcacttcctaagcaggatgagtttgggaagcattcagagtttctgactgtccctgctggttcatactcattgtctgtcccaggccatcaccaccagaaagagatgcgacgctgctcatcagagcagatgccttgtcctcacccagcggaagtcccagaagttcggagcaaatcatttgattatgggaatctgtcccatgctcctgtgtcgggagcagcagcctccacggtatcaccgtccagggagaggaagaaatgctttctggtgcggcaagcttccttcagtggctccccagaaatctcccagggcgaggttggcatggatcagagcgtgaagcaagagcagctggagcacctgcatgctggcctccggtccgggtggcaccatggcccgcctgctgtgctgcctcctcttcagcaagaggacccagggaagcaggtggcgggtccttgtcccccgctgagctcggggccactgcacctggcccagccacagatcatgcacatggacagtcaggaatctttgagaaatcccttgatccaaccaacatcctatatgacaagcaagcacttacctgaacagccacacttatttccacatcaagagacaattccattttctccaatccagaatgccttgtttcagtttcagtatcctacagtttgtatggttcatttaccagctcagcagcctccctggtggcaggcacatttcccacatccctttgctcagcaccctcagaagagctatggcaagccctcttttcagacagaaatccattcgagctatcccttagagcatgtggcagagcacactggaaagaaacctgctgagtatgcacacacgaaagagcagacctacccatgttattcaggagcatcagggctacacccaaagaaccttcttccaaagtttccatcagaccagagcagtaagtcaactgaaacgccctctgagcaggttcttcaagaagattttgcctcggcaaatgctgggtctttgcagtccctcccaggaacagtggttcctgttcggatccagacgcacgtaccatcctatggaagtgtcatgtacacaagcatttctcagatacttgggcagaatagccctgccattgtcatatgcaaagtcgatgagaatatgacccaaaggacactggtcaccaacgcagccatgcaagggataggattcaacattgcccaggtgctggggcagcatgcgggcttggagaagtaccccatttggaaagcacctcagactttgcccctcggcttagaatcctccatccccttgtgtttaccttccacctctgacagcgtggccaccctgggaggtagcaagcgaatgctttctccagccagtagcttggagctcttcatggaaaccaagcagcagaaaagggtcaaagaagaaaagatgtacggacagattgtggaggagcttagtgctgtggagctgaccaactcagacatcaaaaaggacctctcccgcccccagaaaccccagctggttcgacaaggatgtgcttctgagccaaaagatggcttgcagtcagggtcatcttccttctcctcgctgtcgccctcctcatctcaagactatccttctgttagcccgtcttccagggagccattcctgcccagcaaggagatgctttccggttcccgggcaccacttccggggcagaagtccagtgggccttctgaaagcaaagaatcttcagatgaattagatatcgatgagacggcatcggacatgagcatgagcccacagagttcttcattaccagcaggagatggtcagctggaagaggaagggaagggccacaagcggcctgttggcatgctggtccgcatggcctctgcccccagcgggaacgtggcagactcaactcttcttctcacggacatggcagatttccagcagattcttcagttccccagtctgcggacaacaactactgtgagttggtgcttcttgaattatacaaaacccaattatgtgcaacaggccaccttcaaatcctcggtttatgcttcatggtgcattagttcctgtaatccaaacccatcaggattgaacaccaagaccacgctggctcttctgaggtccaagcaaaaaatcactgcagaaatttatactctggctgctatgcataggcctggaaccggcaagcttacatcatcaagtgcttggaagcagtttactcagatgaaacctgatgcgtcctttttatttggcagcaaactagaaaggaaactagtgggaaatatcttaaaggaaagagggaaaggagatattcatggagataaagatattggatccaaacaaactgagccaatccgaattaaaatatttgaaggagggtacaaatcgaatgaagattatgtatatgtcagaggacgtggccggggaaagtacatttgtgaagaatgtgggattcgctgtaagaagccaagcatgctcaaaaaacacatccgtacccatactgatgttcggccttatgtatgcaagttatgtaactttgccttcaaaacgaaaggaaacctaacgaagcatatgaaatctaaagcacacatgaaaaaatgcctggaattgggagtctcaatgacatcggtggatgatacagaaactgaggaagcagaaaatttggaagatttgcacaaagcagcagagaagcatagcatgtccagcatttcaactgatcatcagttctccgatgctgaggaatcagatggtgaggatggagatgataatgatgatgatgatgaagatgaagatgactttgacgaccagggagatttaacaccaaaaacaagatcaagaagcaccagtcctcagcctcctagattctcctccttgcctgtgaatgttggcgccgtaccccacggggttccttcagatagttccctgggacattcttcgttgatcagctatttggttactttgccaagtattcgagttactcagcttatgacacccagtgattcatgtgaagatacccagatgacagaataccagaggctattccagagcaaaagtacggactcagaaccagacaaagacagattggacatacctagttgtatggatgaggagtgcatgctaccttcagagccaagctcctctcccagggacttctcaccctcaagccaccattcctctccaggatatgattcttcaccctgtcgagataattcaccaaagaggtatctgatacccaaaggagatttatctcccaggagacatttatcacctaggagagatctgtcacccatgagacatctttcaccaagaaaggaagctgcattgagaagagagatgtcccaaagagatgtttcaccaagaaggcatttgtctccaaggaggccagtgtctcctgggaaagatatcacagcaagaagagacctctctcctagaagagagagaagatacatgaccacaataagagcgccatctcccagaagggctttataccataacccaccattgtccatgggacagtatttgcaagcagagccaattgtattggggcctcctaatttaagaagaggattacctcaggttccttacttcagtctctatggagaccaagaaggtgcttatgaacatccaggctccagccttttccctgagggtcctaatgactatgtcttcagtcatcttccactccactctcagcaacaagtgcgagcccctatccccatggtgcccgttggtgggatccagatggttcactccatgccgccagccctttccagtttacatccttcacccacattgcccctgccaatggagggctttgaggagaagaaaggcgcgtcaggggagtccttctccaaggacccctatgtgctttctaagcagcatgagaagcgaggtcctcacgctttgcagtcatctggtccacctagcactccctcctctcctcggctgttgatgaaacagagcacttcggaagacagcctaaacgcaacagagcgggaacaggaggaaaatatacagacttgtacaaaagccattgcctctctccggattgccacggaagaggcagctctgctcgggccagatcagccagcgcgggtgcaggagccccaccagaaccccctgggaagtgcacatgttagcattagacactttagtagacctgagccaggtcagccctgtacctcagccacccaccctgacttgcatgatggtgaaaaggacaattttggtacatcacagactccattagctcactccacgttttacagcaagagttgtgtggatgacaagcagttggactttcacagcagcaaggaattatcttcaagcacagaggaaagcaaagatccttcatcagaaaagagtcagctacattgatctatgatgcatggagactttcatttccacattttcccatttttttgtttttgtttttctagaaatggaggtaatccagtttatagcatgcctgtcctaagttacagtagtttgctattatatatacttttgttatatcaaaagaattaggtaaattaacaagtcatcatgagcctgaccaaaacaaaatttgaaattaacctattgggtctggtacttttaaaattgtacagatgtttgtgccttttctttactttgcttatattcttataagcattttttagcagtaatttgtacatattttagaatttgtgtatctgctttgtaataaatgtaatttctttccttttttggacacttggatctaaatgatgtaaagcaaaacagcatcaatatatatgtgaggttgcactaaaacatatttttatatgattaaaactgaacagcttttatgtacagctctgattctgtaatactaatatttatttactttgtttcataaattgtacattttttcttaatgttgtggattgcttttctatgtgaagcatgggatttactgttgcgtaactagaacaaaaatgtacattgtaaacaagatatttaaactagagtatcttattctgcacttatgcattagttaaaaaaagataaaggatgtatcagtcagttcttaactcttgtatatttttttgtctcttgtttgctggattgactataacttaagtgctgattgtgattttaaaatgatagtaccgtaaagcattaaagtaaacaatgtgctattgtgagttttttcaaagctttataaatcagttataaataatattaaaagtatttggtcttatgtgaacatgttgatctatatactcatctaaaaatatgggaaaacattccaccccatgtaaatatgtacaagtgcatcactggtacaattttatgtaactcagttggacactaggttgccacagacctatgctaggtgtctttaaaaaattaaggtgacaaagcacatgggactgtgtagagcttggttatcggccggcccggtggcttggcaggcagtgctgtgcgctgctcatggagaagacctgggcttagcaatctccttagttcttgctacacaggatggtgactggaactaaggctacacagagggtcgcacttggactctgagggttgggtgtggaagggggaaaaggagatggagacctgctccccagctcttcctgtcagccggtttacatgggaacagggttaacatctgtgttaggggaggtcaccttaccctttttcataggggaagagtgtcacactcctggctatctcagggggaatggggaaaagaatctttcaagggcaaagaactcgtgggaggatgtctgttgtatgtaatactcacaatggcttttggttagtgttgaaggtgggaagagcatttgtaggtccagaagagtgaaagagagggaggggtgcagcaacatgtgcacaggcacgcacatgtgtgcacgcacacatacaatctgggttatctttgtgctatatagtggattataattctgtgaaaccaagtttgtatattgaattacattaaggagtgttctttaaaaagagaaataaatatacaattacatgcttgaaaaaaaaa

SEQ ID NO: 558 - DNA, 4348 bp, HOMO SAPIENS; identical to SEQ ID NO: 189

SEQ ID NO: 559 - DNA, 2592 bp, HOMO SAPIENS
atggcggcggcggcgcctgctgctgcggcggcttcttccgaggcgccagcggcgagtgcgactgcagagcccgaggccggggaccaggacagtcgcgaggttcgagtgttgcagagcctgcggggcaagatctgtgaagcaaaaaatttattgccatatcttggaccccacaaaatgagagattgtttctgtaccataaatttggaccaggaagaagtttatcgtacccaagttgtggaaaaatctttaagcccatttttcagtgaagaattttactttgagattccaagaactttccagtatttgtctttctatgtttatgataagaatgttttacaaagagatctccgtataggaaaagtagccatcaaaaaagaagacttgtgtaatcacagtggcaaagaaacttggttttcattacagcctgttgactccaattcagaggttcagggtaaagttcaccttgaattaaaactgaatgaactgataacggagaatggaactgtatgccagcagcttgttgtacacatcaaggcatgccatgggttgcctctcataaatggccaaagctgtgacccttatgcaacagtttctctagtgggcccttctaggaatgaccaaaagaagacaaaagtaaagaagaaaacaagcaatccgcagtttaatgaaatcttttattttgaagtaaccagatccagtagttacaccagaaagtcccagttccaggtagaagaggaggacattgaaaagctagaaatcaggatcgacttgtggaacaatggaaacctagtccaagatgttttcctaggtgagattaaggttcctgtgaacgtattaagaactgattcctctcatcaagcctggtacttgctacagccaagagacaatggaaacaagtcatccaaaactgatgacctggggtctcttcgattaaatatatgttatacagaagactacgtgcttccttcagagtactatggtcctttgaaaactttgctgctaaaatcaccagatgttcaaccaatatctgcctcagctgcttacattttgagtgaaatatgtcgagataaaaatgatgctgttttgccccttgtacgactgctgctgcaccatgataaacttgttccttttgccactgctgtggctgaattagacttgaaggatacacaagatgcaaacacaatttttagaggaaattccctggctacccgatgtctggatgagatgatgaaaatagtgggagggcactacctgaaagtaacattaaaacctattcttgatgagatatgtgactcctcaaaatcctgtgaaatcgatcctattaaattgaaagagggagataatgtagaaaataataaggagaatctgcgctactatgtagacaagttattcaatacaattgtaaaatcaagtatgagctgccccactgtaatgtgtgatatcttttattctctaaggcagatggctactcagagatttcctaatgaccctcatgttcagtattctgcagtgagcagctttgtatttcttcgtttctttgctgtagccgtagtatcacctcatacttttcatttgcgacctcatcatccagatgcacagacaattagaacattaactctcatctcaaaaactatacaaactttgggaagctgggggagtctgtccaaaagcaagtcaagtttcaaagagacattcatgtgtgaatttttcaaaatgtttcaagaagaaggatatattatagcagttaaaaagttcttggatgaaatttcatctactgaaactaaagagtccagtggtacgagtgagcctgtgcacctgaaagaaggtgagatgtataaaagagctcaaggaagaactcggattggaaaaaagaattttaagaaacgatggttctgcttaacaagcagagagctcacctaccacaaacagccaggcaaagatgcaatctacacaatcccagtaaaaaacattcttgctgtggaaaaactggaagagagctctttcaacaagaaaaatatgttccaagtaatacatacggagaaaccactctatgtccaggcaaataactgtgtagaagctaatgaatggatagacgtactctgcagggtgagccgatgcaatcaaaacaggctcagtttttatcatccctctgtgtatctaaacggaaattggctctgctgtcaggagactggtgaaaacactctcggctgcaagccatgtactgcaggtgtccctgcagacatccaaatagatattgatgaagacagagaaacagaaagaatttattccctttttaccctcagtttacttaagctgcagaagatggaagaggcttgtggaactattgcagtctatcaaggaccacagaaagagcctgatgattattctaactttgtaatcgaggattctgtaacaacctttaagacaattcagcaaataaaaagcataattgagaagctggatgaacctcatgaaaaatataggaagaaaagatccagtagtgcaaaatatgggagcaaggaaaatccaattgttgggaaagcatcttagagtttaacagattggttcagaagaactggaaaatattatttt

SEQ ID NO: 560 - DNA, 2454 bp, HOMO SAPIENS
catactcctcattcatacagccatgtttagggaggctctagggagaaatgcacagtttgacatcgttcatgaagagcctctccacggctcctgcgcctgagacagctggcctgacctccaaatcatccatccacccctgctgtcatctgttttcatagtgtgagatcaacccacaggaatatccatggcttttgtgctcattttggttctcagtttctacgagctggtgtcaggacagtggcaagtcactggaccgggcaagtttgtccaggccttggtgggggaggacgccgtgttctcctgctccctctttcctgagaccagtgcagaggctatggaagtgcggttcttcaggaatcagttccatgctgtggtccacctctacagagatggggaagactgggaatctaagcagatgccacagtatcgagggagaactgagtttgtgaaggactccattgcaggggggcgtgtctctctaaggctaaaaaacatcactccctcggacatcggcctgtatgggtgctggttcagttcccagatttacgatgaggaggccacctgggagctgcgggtggcagcactgggctcacttcctctcatttccatcgtgggatatgttgacggaggtatccagttactctgcctgtcctcaggctggttcccccagcccacagccaagtggaaaggtccacaaggacaggatttgtcttcagactccagagcaaatgcagatgggtacagcctgtatgatgtggagatctccattatagtccaggaaaatgctgggagcatattgtgttccatccaccttgctgagcagagtcatgaggtggaatccaaggtattgataggagagacgtttttccagccctcaccttggcgcctggcttctattttactcgggttactctgtggtgccctgtgtggtgttgtcatggggatgataattgttttcttcaaatccaaagggaaaatccaggcggaactggactggagaagaaagcacggacaggcagaattgagagacgcccggaaacacgcagtggaggtgactctggatccagagacggctcacccgaagctctgcgtttctgatctgaaaactgtaacccatagaaaagctccccaggaggtgcctcactctgagaagagatttacaaggaagagtgtggtggcttctcagggtttccaagcagggaaacattactgggaggtggacgtgggacaaaatgtagggtggtatgtgggagtgtgtcgggatgacgtagacagggggaagaacaatgtgactttgtctcccaacaatgggtattgggtcctcagactgacaacagaacatttgtatttcacattcaatccccattttatcagcctcccccccagcacccctcctacacgagtaggggtcttcctggactatgagggtgggaccatctccttcttcaatacaaatgaccagtcccttatttataccctgctgacatgtcagtttgaaggcttgttgagaccctatatccagcatgcgatgtatgacgaggaaaaggggactcccatattcatatgtccagtgtcctggggatgagacagagaagaccctgcttaaagggccccacaccacagacccagacacagccaagggagagtgctcccgacaggtggccccagcttcctctccggagcctgcgcacagagagtcacgccccccactctcctttagggagctgaggttcttctgccctgagccctgcagcagcggcagtcacagcttccagatgaggggggattggcctgaccctgtgggagtcagaagccatggctgccctgaagtggggacggaatagactcacattaggtttagtttgtgaaaactccatccagctaagcgatcttgaacaagtcacaacctcccaggctcctcatttgctagtcacggacagtgattcctgcctcacaggtgaagattaaagagacaacgaatgtgaatcatgcttgcaggtttgagggcacagtgtttgctaatgatgtgtttttatattatacattttcccaccataaactctgtttgcttattccacattaatttacttttctctataccaaatcacccatggaatagttattgaacacctgctttgtgaggctcaaagaataaagaggaggtaggatttttcactgattctataagcccagcattacctgataccaaaaccaggcaaagaaaacagaagaagaggaaggaaaactacaggtccatatccctcattaacacagacacaaaaattctaaataaaattttaacaaattaaactaaacaatatatttaaagatgatatataactactcagtgtggtttgtcccacaaatgcagagttggtttaatatttaaatatcaaccagtgtaattcagcacattaataaagtaaaaaagaaaaccataaaaaaaaaaaaaaa

SEQ ID NO: 561 - DNA, 3038 bp, HOMO SAPIENS
actacgcgccagaacctgcgccgggaagcgtcgcacagcgactgcatcaccatggagccgagggcagtaggtgtctccaaacaggacatacgtgaacaaatttggggctacatggaatcacaaaatttagctgactttccccgacctgttcatcacaggatacccaactttaaggggtcttatctggcttgccaaaacatcaaagacctagacgtttttgccagaacacaggaagttaaagtggaccctgataaaccactggaaggcgttcggctgctggtgctgcagagcaaaaaaacattgttggttccaacaccacgactgagaacgggattgtttaataagatcacaccaccccctggggcaactaaagacatcttgagaaaatgtgccacctctcagggtgtgaggaactacagtgtccccataggcttggactccagagtcctcgtggatttagttgtggtgggatccgtcgccgtttctgaaaaaggctggagaatcgggaagggagaaggctacgccgatctggaatatgccatgatggtatccatgggcgccgtcagcaaggagacgccggtggtcaccatcgtccacgactgccaggtcgtggacatccctgaagagcttgttgaggagcacgacatcactgtggactacatcctcactccaaccagagtcatcgccacaggctgcaagcgcccaaagccaatgggaatcacctggttcaagatcagcctggagatgatggagaaaatccccatactgaggagcctccgcgcccgagagcagcaggctgggaaggatgtcaccctccagggtgagcaccagcaccttccggaaccaggctgccagcagacagtgcccctgagtgttggcaggaggcccccggacacacccggaccagaaaccaattccatggaggcagcccctggctccccaccaggggagggtgccccgcttgcagccgatgtttacgttgggaacctccccggggacgcccgtgtgagtgacctgaagagagccctgcgggaactcggctccgtgcccctgcggctcacctggcagggcccgcggcgcagagccttcctccattacccggactctgccgcagcccagcaggccgtctcctgcttgcagggcctgcgcctgggcaccgacaccctgagggtggcgctggccaggcagcagagggacaagtgacctcgtggacagccacggagctcactgcagactcgccatccccgtcccctgccgctccggttccgatggcactcgagaggcctgcgtggcaagacgtgtcggagccaccgcctgagctgctcgggtctcaattcttctcagaagtcaccgctcagtgaacgcccaggccctcctgtgagtggggaagccgccctgcggttcatctcacagcgcgcagagactgcagcctcccaatcgtgcaggctcgggccttgagtcggtttctgtttctctggagggacagagcagaggggccagggactgagtgagtggctaagcaggggagggtgatgtgaaggtgatctcgagtttgccaggggtgggctgaacaggagaagatgaacaaaggatccggctctcaaaaggccctggcagggactggatgctgggtacagaagcgcgcccttgggcttcaggctcctgagctggcagcacggcagggagagctccatccatgtcgcaggagcccaggaagctcagcccctgggtaaaaagtgctcactgcagctcagatcagtcctcaggtcacatttcggggagccagcctcccctcttcccctccccagccccgctcctccctctgtggacacactccgggccctcagccagctggctgcatgaggagcagctttgtgctgtgggagagaccggctctgggagaatgggtttcatcccagcctacgtcacatttgcccagtgccttatgttttctgggtttttttcctccagttctgtttctaaaaaccagcttgagtttggctgaactgtcctttctcaacagaagcgcttttgcaattgatcccgggcaacaagtcaaaataagcttttaagtggagattttgtttttttcaaatgtatatgctttggaaattttgattttttagccagagggttttaccaagtgttctttgaagcacattacgatgcctcgagagggcggcccgtgcacgcgctttcaagaaaatgttctcgggacactcggtcttctctttgaaaggacattttctcattggttttgccgtgaaaatcctgtggagacttcgcaaagaaaacgcagccttacatttgctcattaaagacagatttccttcccaagtcgccatgaataaaatgagagagtagaaacgtctggaagcgccacacctggccctgggccctcggccctctgtgtccttggccttgcccccgcccgcacggctggtcacgtttgtcattgggcattcagctcagcgtcagaggctgactcagtccccagttcagagtagtcacctggttacactgaactcctcaccttcttttctctctttttttaaaaaatacttctttttctgaaagattcttatttttttttttttgtttacctttttcctgtggatttgctgccgttagaatagcaactccaggagaagagcaagtgagtcagccccccttctccactccctgccccaccggcagtgggcacagccctgcagacaggagcaaggacttcggggaatagacccactggggccgggagagggagaagctggattctgaccccaccactggcactcctgtgtccagccatgcctgacgcccaccccaccctcagacggcgggattaaaccaggcagtacagggttactcggggaagccagactgctgggatttcctgtcgctttagccagaataatccaggtatatggatatacagataatctgaaagagtttctcatttttatatttgtggaacatcgtgtaagaaaaactgaagagcaagtgcctgaaataaaatcccccacatgtatcagcctgca

SEQ ID NO: 562 - DNA, 7635 bp, HOMO SAPIENS
ggggccggggggcggagccttgcgggctggagcgaaagaatgcgggggctgagcgcagaagcggctcgaggctggaagaggatcttgggcgccgccaggttctgtggacaatcacaatgggaatccaaggagggtctgtcctgttcgggctgctgctcgtcctggctgtcttctgccattcaggtcatagcctgcagtgctacaactgtcctaacccaactgctgactgcaaaacagccgtcaattgttcatctgattttgatgcgtgtctcattaccaaagctgggttacaagtgtataacaagtgttggaagtttgagcattgcaatttcaacgacgtcacaacccgcttgagggaaaatgagctaacgtactactgctgcaagaaggacctgtgtaactttaacgaacagcttgaaaatggtgggacatccttatcagagaaaacagttcttctgctggtgactccatttctggcagcagcctggagccttcatccctaagtcaacaccaggagagcttctcccaaactccccgttcctgcgtagtccgctttctcttgctgccacattctaaaggcttgatattttccaaatggatcctgttgggaaagaataaaattagcttgagcaacctggctaagatagaggggctctgggagactttgaagaccagtcctgtttgcagggaagccccacttgaaggaagaagtctaagagtgaagtaggtgtgacttgaactagattgcatgcttcctcctttgctcttgggaagaccagctttgcagtgacagcttgagtgggttctctgcagccctcagattatttttcctctggctccttggatgtagtcagttagcatcattagtacatctttggagggtggggcaggagtatatgagcatcctctctcacatggaacgctttcataaacttcagggatcccgtgttgccatggaggcatgccaaatgttccatatgtgggtgtcagtcagggacaacaagatccttaatgcagagctagaggacttctggcagggaagtggggaagtgttccagatagcagggcatgaaaacttagagaggtacaagtggctgaaaatcgagtttttcctctgtctttaaattttatatgggctttgttatcttccactggaaaagtgtaatagcatacatcaatggtgtgttaaagctatttccttgccttttttttattggaatggtaggatatcttggctttgccacacacagttacagagtgaacactctactacatgtgactggcagtattaagtgtgcttattttaaatgttactggtagaaaggcagttcaggtatgtgtgtatatagtatgaatgcagtggggacaccctttgtggttacagtttgagacttccaaaggtcatccttaataacaacagatctgcaggggtatgttttaccatctgcatccagcctcctgctaactcctagctgactcagcatagattgtataaaatacctttgtaacggctcttagcacactcacagatgtttgaggctttcagaagctcttctaaaaaatgatacacacctttcacaagggcaaactttttccttttccctgtgtattctagtgaatgaatctcaagattcagtagacctaatgacatttgtattttatgatcttggctgtatttaatggcataggctgacttttgcagatggaggaatttcttgattaatgttgaaaaaaaacccttgattatactctgttggacaaaccgagtgcaatgaatgatgcttttctgaaaatgaaatataacaagtgggtgaatgtggttatggccgaaaaggatatgcagtatgcttaatggtagcaactgaaagaagacatcctgagcagtgccagctttcttctgttgatgccgttccctgaacataggaaaatagaaacttgcttatcaaaacttagcattaccttggtgctctgtgttctctgttagctcagtgtctttccttacatcaataggtttttttttttttttttggcctgaggaagtactgaccatgcccacagccaccggctgagcaaagaagctcatttcatgtgagttctaaggaatgagaaacaattttgatgaatttaagcagaaaatgaatttctgggaacttttttgggggcgggggggtggggaattcagccacactccagaaagccaggagtcgacagttttggaagcctctctcaggattgagattctaggatgagattggcttactgctatcttgtgtcatgtacccactttttggccagactacactgggaagaaggtagtcctctaaagcaaaatctgagtgccactaaatggggagatggggctgttaagctgtccaaatcaacaagggtcatataaatggccttaaactttggggttgctttctgcaaaaagttgctgtgactcatgccatagacaaggttgagtgcctggacccaaaggcaatactgtaatgtaaagacatttatagtactaggcaaacagcaccccaggtactccaggccctcctggctggagagggctgtggcaatagaaaattagtgccaactgcagtgagtcagcctaggttaaatagagagtgtaagagtgctggacaggaacctccaccctcatgtcacatttcttcaatgtgacccttctggcccctctcctcctgacagcggaacaatgactgccccgataggtgaggctggaggaagaatcagtcctgtccttggcaagctcttcactatgacagtaaaggctctctgcctgctgccaaggcctgtgactttctaacctggcctcacgctgggtaagcttaaggtagaggtgcaggattagcaagcccacctggctaccaggccgacagctacatcctccaactgaccctgatcaacgaagagggattcatgtgtctgtctcagttggttccaaatgaaaccagggagcaggggagttaggaatcgaacaccagtcatgcctactggctctctgctcgagagccaataccctgtgccctccactcatctggatttacaggaactgtcatagtgttcagtattgggtggtgataagcccattggattgtccccttggggggatgagctaggggtgcaaggaacacctgatgagtagataagtggagctcatggtatttcctgaaagatgctaatctatttgccaaacttggtcttgaatgtactgggggcttcaaggtatgggtatatttttcttgtgtccttgcagttagcccccatgtcttatgtgtgtcctgaaaaaataagagcctgcccaagactttgggcctcttgacagaattaaccacttttatacatctgagttctcttggtaagttctttagcagtgttcaaagtctactagctcgcattagtttctgttgctgccaacagatctgaactaatgctaacagatccccctgagggattcttgatgggctgagcagctggctggagctagtactgactgacattcattgtgatgagggcagctttctggtacaggattctaagctctatgttttatatacattttcatctgtacttgcacctcactttacacaagaggaaactatgcaaagttagctggatcgctcaaggtcacttaggtaagttggcaagtccatgcttcccactcagctcctcaggtcagcaagtctacttctctgcctattttgtatactctctttaatatgtgcctagctttggaaagtctagaatgggtccctggtgcctttttactttgaagaaatcagtttctgcctctttttggaaaagaaaacaaagtgcaattgttttttactggaaagttacccaatagcatgaggtgaacaggacgtagttaggccttcctgtaaacagaaaatcatatcaaaacactatcttcccatctgtttctcaatgcctgctacttcttgtagatatttcatttcaggagagcagcagttaaacccgtggattttgtagttaggaacctgggttcaaaccctcttccactaattggctatgtctctggacaagtttttttttttttttttttttaaaccctttctgaactttcactttctatgtctacctcaaagaattgttgtgaggcttgagataatgcatttgtaaagggtctgccagataggaagatgctagttatggatttacaaggttgttaaggctgtaagagtctaaaacctacagtgaatcacaatgcatttacccccactgacttggacataagtgaaaactagccagaagtctctttttcaaattacttacaggttattcaatataaaatttttgtaatggataatcttatttatctaaactaaagcttcctgtttatacacactcctgttattctgggataagataaatgaccacagtaccttaatttctaggtgggtgcctgtgatggttcattgtaggtaaggacattttctctttttcagcagctgtgtaggtccagagcctctgggagaggaggggggtagcatgcacccagcaggggactgaactgggaaactcaaggttctttttactgtggggtagtgagctgcctttctgtgatcggtttccctagggatgttgctgttcccctccttgctattcgcagctacatacaacgtggccaaccccagtaggctgatcctatatatgatcagtgctggtgctgactctcaatagccccacccaagctggctataggtttacagatacattaattaggcaacctaaaatattgatgctggtgttggtgtgacataatgctatggccagaactgaaacttagagttataattcatgtattagggttctccagagggacagaattagtaggatatatgtatatatgaaagggaggttattagggagaactggctcccacagttagaaggcgaagtcgcacaataggccgtctgcaagctgggttagagagaagccagtagtggctcagcctgagttcaaaaacctcaaaactggggaagctgacagtgcagccagccttcagtctgtggccaaaggcccaagagcccctggcaaccaacccactggtgcaagtcctagattccaaaggctgaagaacctggagtctgatgtccaagagcaggaagagtggaagaaagccagaagactcagcaaacaaggtagacagtgtctaccaccatagtggccataccaaagaggctaccgattccttcctgctacctggatccctgaagttgccctggtctctgcaccttctaaacctagttcttaagagctttccattacatgagctgtctcaaagccctccaataaattctcagtgtaagcttctgttgcttgtggacagaaaattctgacagacctaccctataagtgttactgtcaggataacatgagaacgcacaacagtaagtggtcactaagtgttagctacggttattttgcccaaggtagcatggctagttgatgccggttgatggggcttaaacccagctccctcatcttccaggcctctgtactccctattccactaaactacctctcaggtttatttttttaaattcttactctgcaagtacataggaccacatttacctgggaaaacaagaataaaggctgctctgcattttttagaaacttttttgaaagggagatgggaatgcctgcacccccaagtccagaccaacacaatggttaattgagatgaataataaaggaaagactgttctgggcttcccagaatagcttggtccttaaattgtggcacaaacaacctcctgtcagagccagcctcctgccaggaagaggggtaggagactagaggccgtgtgtgcagccttgccctgaaggctagggtgacaatttggaggctgtccaaacaccctggcctctagagctggcctgtctatttgaaatgccggctctgatgctaatcggcgaccctcaggcaagttacttaaccttacatgcctcagttttctcatctggaaaatgagaaccctaggtttagggttgttagaaaagttaaatgagttaagacaagtgcctgggacacagtagcctcttgtgtgtgtttatcattatgtcctcagcaggtcgtagaagcagcttctcaggtgtgaggctggcgcgattatctggagtgggttgggttttctaggatggaccccctgctgcattttcctcattcatccaccagggcttaatggggaatcaaggaatccatgtgtaactgtataataactgtagccacactccaatgaccacctactagttgtccctggcactgcttatacatatgtccatcaaatcaatcctatgaagtagatactgtcttcattttatagatcagagacaattggggttcagagagctgatgtgattttcccagggtcacagagagtcccagattcaggcacaactcttgtattccaagacacaaccactacatgtccaaaggctgcccagagccaccgggcacggcaaattgtgacatatccctaaagaggctgagcacctggtcaggatctgatggctgacagtgtgtccagatgcagagctggagtgggggaggggaaggggggctccttgggacagagaaggctttctgtgctttctctgaagggagcagtctgaggaccaagggaacccggcaaacagcacctcaggtactccaggccctcctggctggagagggctgtggcaatggaaaattagtgccaactgcaatgagtcagcctcggttaaatagagagtgaagaatgctggacaggaacctccaccctcatgtcacatttcttcagtgtgacccttctggcccctctcctcctgacagcggaacaatgactgccccgataggtgaggctggaggaagaatcagtcctgtccttggcaagctcttcactatgacagtaaaggctctctgcctgctgccaaggcctgtgactttctaacctggcctcacgctgggtaagcttaaggtagaggtgcaggattagcaagcccacctggctaccaggccgacagctacatctttcaactgaccctgatcaacgaagagggacttgtgtctctcagttggttccaaatgaaaccagggagcaggggcgttaggaagctccaacaggatggtacttaatggggcatttgagtggagaggtaggtgacatagtgctttggagcccagggagggaaaggttctgctgaagttgaattcaagactgttctttcatcacaaacttgagtttcctggacatttgtttgcagaaacaaccgtagggttttgccttaacctcgtgggtttattattacctcatagggactttgcctcctgacagcagtttatgggtgttcattgtggcacttgagttttcttgcatacttgttagagaaaccaagtttgtcatcaacttcttatttaaccccctggctataacttcatggattatgttataattaagccatccagagtaaaatctgtttagattatcttggagtaagggggaaaaaatctgtaattttttctcctcaactagatatatacataaaaaatgattgtattgcttcatttaaaaaatataacgcaaaatctcttttccttctaaaaaaaaaaaaaaaaaa

SEQ ID NO: 563 - DNA, 626 bp, HOMO SAPIENS
acatttgcttctgacacaactgtgttcactagcaacctcaaacagacaccatggtgcatctgactcctgaggagaagtctgccgttactgccctgtggggcaaggtgaacgtggatgaagttggtggtgaggccctgggcaggctgctggtggtctacccttggacccagaggttctttgagtcctttggggatctgtccactcctgatgctgttatgggcaaccctaaggtgaaggctcatggcaagaaagtgctcggtgcctttagtgatggcctggctcacctggacaacctcaagggcacctttgccacactgagtgagctgcactgtgacaagctgcacgtggatcctgagaacttcaggctcctgggcaacgtgctggtctgtgtgctggcccatcactttggcaaagaattcaccccaccagtgcaggctgcctatcagaaagtggtggctggtgtggctaatgccctggcccacaagtatcactaagctcgctttcttgctgtccaatttctattaaaggttcctttgttccctaagtccaactactaaactgggggatattatgaagggccttgagcatctggattctgcctaataaaaaacatttattttcattgc

SEQ ID NO: 564 - DNA, 5491 bp, HOMO SAPIENS
attgctgacaggcggccccgggggcggtggccaaggcggcgaccggagcgcgatggcgggggcggcgggactcacggcagaagtgagctggaaggtcttggagcgaagagctcggaccaagcgctcaggctcagtttatgaacctcttaaaagcattaatcttccaagacctgataatgaaactctctgggataagttggaccattattacagaattgtcaagtcaacattgctgctgtatcaaagtccaactaccggtctctttcccactaaaacatgcggtggtgaccagaaggccaagatccaggacagcctatactgcgctgctggggcctgggctttggctcttgcatacaggcgaattgatgatgacaagggaaggacccatgagctggagcactcagctataaaatgcatgagaggaattctctactgctatatgcgtcaggccgataaggtccagcagtttaagcaggatccacgcccaacaacatgtcttcactctgttttcaatgtgcatacaggagatgagttgctttcctatgaggaatatggtcatcttcagataaatgcagtgtcactttatctcctttaccttgtggaaatgatttcctcaggactccagattatctacaacactgatgaggtctcttttattcaaaaccttgtattttgtgtggaaagagtttaccgtgtgcctgactttggtgtctgggaaagaggaagcaaatataataatggcagcacagagctacattcgagctcggttggtttagcaaaagcagctctagaagcaattaatggattcaacctttttggcaaccagggctgttcgtggtcagttatatttgtggatctcgatgctcacaatcgcaacaggcaaactttgtgctcgctgttacccagagaatcaagatcacataatacagatgctgccctgctcccctgcatcagttatcctgcatttgccctggatgatgaagttctttttagccagacacttgataaagtggttagaaaattaaaaggaaaatatggatttaaacgtttcttgagagatgggtatagaacatcattggaagatcccaacagatgctactacaagccagctgaaattaagctatttgatggcattgaatgtgaatttcccatatttttcctttatatgatgattgatggagtttttagaggcaatcctaagcaagtacaggaatatcaggatcttttgactccagtacttcatcataccacagaaggatatcctgttgtaccaaagtactattatgtgccagctgactttgtagaatatgaaaaaaataaccctggtagtcaaaaacgatttcctagcaactgtggccgtgatggaaaactgtttctttggggacaagcactttatatcatcgcaaaactcctggctgatgaacttattagtcctaaagacattgatcctgtccagcgctatgtcccactaaaggatcaacgtaacgtgagcatgaggttttccaatcagggcccactggaaaatgacttggtagttcatgtggcacttatagcagaaagccaaagacttcaagtttttctgaacacatatggtattcaaactcaaactcctcaacaagtagaacccattcagatatggcctcagcaggagcttgtgaaagcttatttgcagctgggtatcaatgaaaagttaggactctctggaaggccagacaggcccattggctgcctcgggacatcaaagatttatcgcattctaggaaagactgtggtttgttacccgattattttcgacctaagtgatttctacatgtctcaggatgttttcctgctgatagatgacataaagaatgcgctgcagttcattaaacaatattggaaaatgcatggacgtccacttttccttgttctcatccgggaagacaatataagaggtagccggttcaaccccatattagatatgctggcagcccttaaaaaaggaataattggaggagtcaaagttcatgtggatcgtctacagacactaatatctggagctgtggtagaacaacttgatttcctacgaatcagtgacacagaagagcttccagaatttaagagttttgaggaactagaacctcccaaacattcaaaagtcaaacggcaaagcagcacccctagtgctcctgaactgggacagcagccggatgtcaacattagtgaatggaaggacaaacccacccacgaaattcttcaaaaactgaatgattgcagttgtctggctagccaagccatcctgctgggtatactgctcaaaagagaaggccccaacttcatcacaaaggaaggtaccgtttctgatcacattgagagagtctatagaagagctggcagccaaaaactttggttggcggtgcgctacggggctgcatttacccagaaattttcttcctctatagccccacacattactacttttctggtacatgggaaacaggtaactctgggtgcctttgggcatgaagaagaagttatctctaatcctttgtctccaagagtgattcaaaacatcatctattataagtgtaacacccatgatgagagggaagcggtcattcagcaagaactggtcatccatattggctggatcatctccaataaccctgagttattcagtggcatgctgaaaatacgaatcgggtggatcatccatgccatggagtatgaacttcagatccgtggcggagacaagccagccttggacttgtatcagctgtcacctagtgaagttaaacagcttctgctggatattctgcagcctcaacagaatggaagatgttggctgaacaggcgtcagatcgatgggtctttgaatagaactcccaccgggttctatgaccgagtgtggcagattctggagcgcacgcccaatgggatcattgttgctgggaagcatttgcctcagcaaccaaccctgtcagatatgaccatgtatgagatgaatttctctctccttgttgaagacacgttgggaaatattgaccagccacagtacagacagatcgttgtagagttacttatggttgtatccattgtactggaaagaaaccccgagctagaatttcaagacaaagtagatctagacagactggtcaaagaagcatttaatgaatttcaaaaagatcagagtcggctaaaggaaattgaaaaacaagatgacatgacttccttttacaacactcctcccctgggaaaaagaggaacatgcagctatttgacaaaggcggtgatgaatctgctgctggaaggagaagtcaagccaaacaatgatgacccgtgtctgattagctagtggggaaggtgtaggaagctctgttgagacacatgttctgaagtgtgttgtgtttcatgttcaagcttaatcaaggcagccattaatatacgaactgagcatgctggggaggtgaatgccacatccttggcggggttatggacctcttgcatgtcatagccaatctaacggtaatggtaaatgcttttaatcaagcaggaaaaagttctcatgattatgccaactataatagtaatcctcactgagtgataaaaatagtttatgaattgaaaatttgccgctgcatgttgtatgatcaaatagttcatcaaaatgaatctttgctctttggactgaattcttaccatactgccattaaaataaatttgccaactagtaatgcatactggaaatcaaaagatactgaaagaatggtgaacttctcttagtggtattgtcatgctaaaagatgttaatatacatcataaaagcaaagtcagccagctgatattttggttctcaaaaactgcattattaataatattttagtatacagagctattctacagtttttacattgtaaacatgactgtggttttgtatttgctaaatataggggttggactaaaatataataaatctgtaccttatcaaacattttctttgagctcctgctaaaaataggacatgtctatgattgttcaaaaatatgttaaatttaggctcagcacagtagctcacacctgaaatcttagcacttcgggaggctgaggcaggtggatcacttgaggttaggagttcaagaccagcccagccaacatggtgaaaaccctgtctctactaaaaatacaaaaattagccaggcatgatggtgcatgcctttaaacccagctactgaggaggctgaggcatgagaattgcttgaaccaggagacggaggttgcagtgagctgaaatcctgccactgcacaccagcctgggtgacagagcgagactccatctcaaaaaaaaaaaaaaaaaagaaaaagaaaaaaatatgttaaatttaaggactgttaacctacgttctactagtaaaaacaacattaagggtcattaaattttatttctgaattaatgaacatatctggacattttttgttcctaggttcacaagattgagcttcaaactcccgagtgttttcatttaattgatttagaggtagaatggaagagaatctgtggtacctaccattatacacatttagttgcccagtttacttaaactttaatgaaagtagaaagtagattaaacatttaaattttatttctttcctaaatagaaaaaaaaaaggcccatgagtttgagcccttgccccaaagagagttgtttttctgatcaatcttactggagtttcacctgagaagatagatttgtcacataaaaaatgcagcttatttgtagtgttttgaaaggatgtaagaaaggatgagtggcttcagtattgagtcaatcgatatcaaatgaatggatgtgtgagcacatggaaaaatctgctgtcagtcacatttctcataacattgaggtacagtgccgagatcttgcataagaaattgtatggatattagttggcaaaattgaaatgaatgagacacagttgggccctaaagaactaaggagggggattgacaaagaatagaattaaactacttgactcaatatgttaagagagtttatgaaaagatagtcgtgaagggtgaagctaatttgtaaaactaatgcctgaaaaaaacgtaagcatgaagtccatggagagggaattgagagctgacacttcataactggagaaactggaaattaaagaaagggaaacaaaagacttaaaatttttgtttgccgaaatttttacgaaagtaaactgtgttgtagttttaagaatttttttaaaaaatctgattagctgagcaaagttaccagaaaactgctatcctagttgaaatcaaacattacttgcaaatgtgttttctgagtgttagcttcctgcttaaatgttacatatgcaaaattctgaagttttcctgtgctactcctgaaagcattcagaatctgtgacacgtattgacttcatgctttgagattcaaaatttattgttctgaaagttatatttagaatcagtaaatcttgatattcaccttta

SEQ ID NO: 565 - DNA, 1811 bp, HOMO SAPIENS
agggaggccgactagcgcaggcggacgggagagaatgggggaggggtgggatgggagcaggggcagagacgggcagagggcagagggcggagcggcgccggagcgggcgtcatggcgcggctcctctggttgctccggggcctgaccctcggaactgcgcctcggcgggcggtgcggggccaagcgggcggcggcgggcccggcaccgggccgggactgggggaggcagggtctcttgcaacgtgtgagctgcctcttgccaagagtgagtggcaaaagaaactaaccccggagcagttctacgtcacaagagaaaagggaacggaaccgcctttcagtgggatctacctgaataacaaggaagcaggaatgtatcattgcgtgtgctgcgacagtccactcttcagttctgagaaaaagtactgctctggcactgggtggccttcgttttccgaggctcatggtacgtctggctctgatgaaagccacacagggatcctgagacgtctggatacctcgttaggatcagctcgcacagaggttgtctgcaagcagtgtgaagctcatctaggtcacgtgtttcctgatggacctgggcccaatggtcagaggttttgcatcaacagtgtggctttgaagttcaaaccaaggaaacactgaccatcttcaagagtcccgttcccttgccaccccttcacgtgcaccctcaatttccacaattcacttgaatgacttgttttatttgcaataaaactgggctgaatttgctgctgtctccagcgagtcattgcttctcttaatttatttacctggaatcaacttaatcctgtgtgttaggctgttcttgtgttgctataaagaagtacctgatcaggatctgggagaatttgaaaaaaaaagaaaaactagaaaaataaacaaaattaaaaagaaaaaaaaatacctgagactgagtaacttataaagaaaagaggtttaattgactcacagttctgcagggtgtacagaaagcatggtgccagcatttgctcggattctggggagacctgagggagcttttactcatggcagaaggtgaagggggagccggcgtctcacatggcaaagcaggagcaagagagagtggtagggaggtgccacatacttttaaacagccagatctctcaagaactcactcactgtcaccaggacagcaccaagccatgagggatccaccctcatgacccagttacctcccggcagggcccacctccggcactaggaattatacttcaacataagatttggagagggaaaacatccaaaccatatcacccaactcccacttggagtagaacttcacaaaacgacagagggacagctgtttccatcaaacacttccacagcttcacctgagacgagggcatgactctgggaacatcaggaggctgatggactattaagccaaacaattcctacaaaaattccctgcaccttccactgcgtttcagtccttgacagacataagtaagggatcaagtgagaagaggaaggaaaatacaggatccaaggaatcaacaatgctagcactgaagagcaggattacggaggagctgtgctctgggagcatatatggtgatcaatcagatgcatgacttttttttcaaaattttaaatgtcttgagcatgctacttccaaccattctacccacaaataaactgcaataggacttggttagatttcaatgattatgaataaatgttcaccttcataccttctggttacaaagctaaactttaaaatgtccaaataaaatattcactaaaattta

SEQ ID NO: 566 - DNA, 3193 bp, HOMO SAPIENS
gtcagtgagggtcggaaccccagctccagggctagcgcagtgtggccccaggccctcgcctccggtgcacgggaccccggacccccccagcctctggcttcacgagaccccaaccttcagttggaacagcttggaacagcgcgagcgcccgggaagccctggccgggtcgtgcgctcggtgaggggtcctaggcgggcaggacagtcggaccgaaccgccgggctggtgccgcgagcccaggctgtcaccttcgtcccgcctcaggtgaggggttcagcgcctgccccgaagataacacaggggtccccttctgtcccggcggcctgcgagagccaaggctgcagctctcccagtgaagtgatatcactgcctctgtggacaagacacctccaggagcccagctcacagccaccggtaccttcttccaggacaagctgggggcctccatgggcgcctgagggccaggcgccagggccgtgggcacgagtatggtgagacaccagcccctgcagtactacgagccacagctgtgcctctcctgcctcacgggcatctacggctgccgttggaagcgctaccagcgctcccatgatgataccacaccgtgggagcgcctctggttcctgctcctcaccttcacctttggcctcacgctcacctggctttacttctggtgggaagtccacaatgactatgatgaattcaactggtacctctacaaccgcatgggctactggagcgactggcccgtacccatccttgtgaccacagctgctgccttcgcatacatcgctggcctcctggtcctggcactatgtcacattgccgtggggcagcagatgaacctgcactggctgcacaagatcgggctggtggtcatcctggcttccacggtggtggccatgtcggccgtggcccagctgtgggaggacgagtgggaggtgctgctgatctccctgcagggcacagcgccattcctgcatgtgggggctgtggcagcagtcaccatgctctcctggatcgtggcaggacagttcgcccgcgcagagcggacctcctcccaggtgaccattctctgtaccttcttcaccgtggtgtttgccctctacctggcccctctcaccatctcctctccctgcatcatggagaagaaagacctcggccccaagcctgctctcattggccaccgcggggcccccatgctggctccagagcacacgctcatgtccttccggaaggccctcgagcagaagctgtacgggctccaggctgacattaccatcagcctggacggcgtgcccttcctcatgcatgacaccaccctgcggcgcaccaccaacgtggaggaggagttcccggagctggcccgcaggcctgcctccatgcttaactggaccaccctgcagagactcaacgctggccagtggttcctgaagactgaccccttctggacagccagctccctgtcaccctccgaccacagagaggcccagaaccagtccatctgcagcctggcagagctcctggagctggccaagggcaatgccacactgctgctcaacctgcgtgacccgccccgggagcacccctaccgcagcagttttatcaacgtgactctggaggccgtgctgcactccggcttcccccagcaccaggtcatgtggctgcctagcaggcagaggcccctggtgcggaaggtggctcccggcttccaacagacatcaggctccaaggaggcagtcgccagcctgcggagaggccacatccagcggctgaacctgcgctacactcaggtgtcccgccaggagctcagggactacgcgtcctggaacctgagtgtgaacctctacacagtcaacgcaccgtggctcttctccctgctgtggtgtgcgggggtcccatccgtcacctctgacaactcccacgccctgtcccaggtgccttcccccctctggatcatgcccccggacgagtactgtctcatgtgggtcactgccgacctggtctccttcaccctcatcgtgggcatcttcgtgctccagaagtggcgcctgggtggcatacggagctacaaccctgagcagatcatgctgagtgctgcggtgcgccggaccagccgggacgtcagcatcatgaaggagaagcttattttctcagagatcagcgatggtgtagaggtctccgatgtgctctccgtatgttcagacaacagttatgacacatatgccaacagcaccgccacccctgtgggcccccgagggggtggcagccacaccaagaccctcatagagcggagtgggcgttagctgaagacatgtctgtcccacctgtacctgacacagaagctggggagcctaggagagctggtggaagtgtgtctgaactcggagtgctctgggagcgggctccacagcctccttgtgggctccagccccttgtcagccgcagcctctcttgagggggactccctgtctcctgaggcccagctgggccaggactccatcctttcagatgcccctgcaggcctggggctccttctgggaagtatggggcctagggcttggtccccctcttctgaggccctctcctgtatcccgacctggaagctttgatgggtcatgggccatgccataccccctgtggcaatggagtgtgtggatgctcacctgtgccatctgtcctcctgtctgtgccaggaggcacctgagttctctgctgttatcctgccccaagggcctgggccgagcctctacctgaagcaactctgctcttcctgtcagtctcaaagcacaaggaggttcagcccaggaggaagccagctgcaatgtggagacacgtcctcctccccaacccacctcatgccaccgccaaccccctgccccaggagcgggcctgagccacgtcccctaggagcagctggagatggccaaaagagtgagctcaggactactggatcccatgcccaggtgtccagcagacctcaaggcagaagggtcacctaacccaggagtccacagactgatgtgacctcaggttcccacatcagtggccacagggcagggcccacctggtagaagtgttctggatatggccagggtgggtgtgtggctaagtgggcctgaacagagggaacctagggcccttggccaatgtgattaaagctgccatcttgaaaaaaaaaaaaaaaaaaaa

SEQ ID NO: 567 - DNA, 18702 bp, HOMO SAPIENS
cagcgcgcggcaggcggcgagctcgggggccgcagaaaatgaaactgaagccgtggtcacgtgacaggacatgtagtatatagcaggctgccagcgactcctgctcttgcttctggatctgcagggcagtcccagcaggacccatggagtgtccttcgtgccagcatgtctccaaggaggaaacccccaagttctgcagccagtgcggagagaggctgcctcctgcagcccccatagcagattctgagaacaataactccacaatggcgtcggcctcggagggtgaaatggagtgtgggcaggagctgaaggaggaagggggcccgtgcttgttcccgggctcagacagttggcaagaaaaccccgaggagccctgttccaaagcctcctggaccgtccaagaaggagctacatcagaggttttggtagatgctgctgtagacctcatatccgatgaatgggaagctgctaatgccatacccagcaagagaaggaagcaggatgcagccccgcttgaggccgccagcgtgccttctgcagactgtgagcagagcaaaaagaagaaaaggaagaagaaaaagaaggggaacaagtccgcttcctcagagctggcttccttgcccctttctcctgccagcccctgtcacctgactttgctttcaaacccgtggcctcaggacacagccctgccccacagccaagcccagcagagtggccccactggccagccgagccagcccccaggcacagccaccacgccactggagggtgacggcctctccgcgcccaccgaggttggcgacagccccctgcaggcccaggctttgggagaggcaggagtggccacaggaagtgaggctcagagcagcccgcaattccaggaccacacggaaggggaggaccaggacgcttccatcccctctgggggcagaggcctgtcccaggaggggaccggtccccccacctctgctggtgaaggccattctaggactgaagatgctgcccaggagctcctgttgcctgagtcaaaaggaggcagctctgagcccgggacagaactgcagaccaccgagcaacaggcaggggcctcagcctctatggcagttgatgctgtagctgagccagccaatgcagttaaaggggccgggaaggaaatgaaagagaagacccagagaatgaaacagccaccagcaaccactcctcctttcaaaacacactgccaggaagctgagaccaagaccaaggacgagatggctgctgctgaagaaaaagtcggtaagaatgaacaaggggagcctgaagacctcaagaagccagaggggaagaacagaagtgcagctgctgtgaaaaacgagaaggagcaaaaaaaccaggaagcagatgtccaggaagtgaaggcaagcacgctgagcccgggtggaggagtcaccgtgttcttccacgccatcatctctcttcatttcccattcaatcctgacctccataaagtcttcatcagaggaggagaagaatttggggagtcaaaatgggacagcaatatctgtgagctgcactacaccagagacttgggtcatgaccgcgttcttgttgaaggcattgtctgcatttccaagaagcacctagataaatacattccttacaagtacgtcatttataatggggaatcttttgagtatgagttcatttacaagcaccagcagaagaagggcgagtacgtcaaccgctgtctgttcataaaatcttcacttctgggctcaggagactggcatcagtactatgacatagtttatatgaagcctcatgggagactccagaaagtcatgaaccacatcacagacgggccgaggaaggacctggtgaaggggaagcagattgccgctgcgctcatgctggacagcaccttcagcatcctgcagacctgggacaccatcaacctgaacagcttcttcacccagttcgagcagttttgctttgtcctgcaacagcctatgatttatgaaggacaggcacagctgtggaccgatttgcagtacagggagaaagaggtgaagagatacctgtggcaacatctgaaaaaacacgtggtaccattgccggacggaaaaagcacggactttttgcctgtggactgcccagtgaggagtaaactgaaaacaggcctgattgtcctttttgtagtggaaaaaattgagcttttattagaaggcagcctggactggttgtgtcacctcctaacctcagatgccagctcaccagatgagtttcaccgtgacctaagccacatccttgggatacctcagagctggcggctgtacctggtgaacctgtgccaaagatgcatggacacaaggacgtacacctggctgggcgccctgcctgtcctgcactgctgtatggagctggccccgcggcacaaggatgcctggagacagcctgaggacacctgggccgctctggagggactctccttctcaccgttccgggaacaaatgctagatacgagttccctacttcagtttatgagagagaagcagcatttgctgagcatagacgagcctctcttccggtcctggtttagtctgctacctctgagtcacctggttatgtatatggaaaacttcattgagcacctgggtcgttttcctgctcatatcctggactgtctttcagggatttactaccggcttccgggacttgagcaagtcttgaatacgcaggatgttcaggatgttcagaacgttcagaacattttagaaatgctgttgcgactcctggacacttaccgggacaagattcccgaggaggccttgtcaccatcctacctgactgtgtgtctgaaactgcatgaagccatctgcagcagcacaaagctacttaagttttacgagctgccagccttatctgccgagattgtctgcagaatgattagacttctatctctggtggattctgcaggacagagagatgaaactggaaataattcagtccaaacagtcttccaagggacccttgctgctacgaaaaggtggctccgagaagtttttacaaagaacatgctcacatcttcaggtgcctcattcacatacgtcaaggaaattgaggtctggaggcggctggtggaaatccaattccccgcggagcatggctggaaggagtcgttgctgggagacatggaatggaggctcacaaaggaggaacccctctcccagatcactgcctactgcaatagttgctgggacaccaaaggcttagaggacagtgtggccaagaccttcgagaaatgcatcattgaagccgtgagctcagcctgccagtctcagaccagtatccttcaggggttctcttactctgatttgcggaaatttggcatcgtcttgtctgctgtgatcactaagtcctggcctaggaccgcggacaacttcaatgacattttaaagcatctgctcacgttggcagatgtcaagcacgtcttcagattgtgtggaaccgacgagaaaatactagcaaatgtcacagaggatgccaagaggctgatagctgttgccgactctgtgttgacgaaagttgttggtgacctcctaagtggcacgattttagttggacaactggagctgattataaagcacaagaatcagtttcttgacatctggcaactgagggaaaaaagtctttcaccccaggatgaacaatgtgctgtggaggaagcactggattggagaagggaggaactgttacttctaaagaaagagaaaagatgtgttgatagtctcctgaagatgtgtgggaacgtgaaacatctgatacaagtggactttggagtgcttgcagtaagacactcacaagacctcagcagtaaaagattaaatgacaccgtgacagtgagactgtccacctcctcgaactcgcagagggcaacgcattaccacctgagctcccaggtccaagaaatggctgggaagatagacttgctcagagacagccacatcttccagctcttctggcgggaagccgcagagccgctgagtgagcctaaggaggaccaggaagccgcagagttgctgagtgagcccgaagaagaatcagaaaggcacatccttgagcttgaagaggtgtatgactatttgtatcagccttcttacagaaagttcattaagttgcaccaggatctaaagtcaggagaggtcacccttgcagagattgatgtcatcttcaaggactttgtgaataaatacacggacctggattcagaacttaagatcatgtgcaccgtggaccaccaggaccaaagagattggatcaaggaccgagtcgaacagatcaaggaataccatcacctgcaccaggctgtccacgcagccaaggtcatcttgcaggtcaaagagagcctgggactgaacggtgacttcagtgttctcaacactttactaaattttactgataacttcgacgactttcgccgtgaaacactggaccagatcaaccaggagctcatccaggccaaaaagctgctccaggacatcagcgaggcccggtgcaaggggctgcaggctctgtccctgagaaaggagttcatctgctgggtccgggaggctcttggaggcatcaatgagctgaaggtgtttgtggacctggcctccatctcagcgggggagaatgacattgatgtggaccgggtggcctgcttccatgacgctgtgcagggctacgcatccctgctatttaagctggaccccagcgtggacttcagtgcattcatgaagcatctgaaaaagctgtggaaggctctggataaggaccagtacctgcccaggaaactgtgtgactccgccaggaacttggaatggctgaagactgtgaatgagagtcatgggtctgtggaacgctcatccctgaccctggccacggccatcaaccaaagaggcatctatgtgatccaggcgcccaaaggtggccaaaagatttccccagacacggttctgcacttgatccttcctgagagccctggcagccacgaggagtcacgagagtactctttagaggaggtgaaggagcttttgaacaagttgatgctgatgtctggcaagaaggatcgtaacaacacggaagtggagaggttttcagaggtcttctgcagtgtgcagaggctcagccaggccttcatcgacctgcactctgctgggaatatgctgttcaggacgtggatcgccatggcctactgctcccccaagcagggtgtgtccctccaaatggactttggcttggacctggtgacggagcttaaagaaggtggagatgtcactgagctgctggcagccctctgcaggcagatggagcacttccttgacagctggaagagatttgtgacccagaagcgaatggagcacttttacctgaacttctacacggcagagcagctggtttacctgagcactgagctcaggaagcagcccccgagtgatgccgccctaacgatgctatccttcatcaaaagcaactgcaccctgagggatgtcttaagggcctctgtggggtgtgggagtgaggccgccaggtaccgcatgaggagagtcatggaagagctcccgctgatgctcttatcagagttcagcctggtggacaagctgaggatcatcatggagcagtccatgaggtgccttcctgccttcctgcccgactgcctcgacctagagacccttggccactgtctggctcacctggcagggatgggtgggtctcccgtggagcgttgtctcccgagaggtctgcaggtcggccagcccaacctcgtcgtctgtggccactccgaggtgttgccagccgccctggctgtctacatgcaaaccccaagccagcccctgcccacttacgatgaggtgctgctctgcaccccggcaaccacctttgaggaggtggcactgttgctgcgccgctgcctgaccctgggctccctggggcacaaggtctacagcctgctgttcgcagatcagctgagctacgaggtggcacgccaagcggaggagcttttccacaatctgtgcacgcagcagcaccgagaagactaccagctcgtcatggtctgtgatggggactgggagcactgctacctcccctctgccttcagccagcacaaggtcttcgtcaccccccaggcacccctcgaggccatccaagcctacctggcaggtcactaccgggtcccgaagcagaccctgtcggcggcagccgtgttcaatgaccggctgtgtgttgggatcgtggcctcggagcgagcaggtgttggaaagtctctgtacgtgaagaggttgcacgacaaaatgaagatgcagttaaacgtgaaaaatgtgcctctgaaaacaattcgactgatcgaccctcaggtggatgagagccgagtcctgggcgccctgctgcccttcctggatgcgcagtatcagaaggtccccgtgctctttcacctggacgtgacctcctcagtgcagactggaatttgggtgtttcttttcaagctcctcattttacaatacttaatggatataaatgggaaaatgtggcttcggaacccctgccatttgtatatcgttgaaatcctggaaaggaggacgtcagtgccgtcgaggagctcttcagcgctgcgtacacgtgtaccccagttcagttttcttgacatcttcccaaaagtcacctgcaggcctcccaaagaggtgatagacatggagctgagtgccctgaggagtgacacagagcctgggatggatctgtgggagttctgcagcgaaactttccaaagaccttaccagtatttaagacgattcaatcaaaaccaagacctagacacgtttcagtatcaagaaggctctgtcgaaggcaccccggaggaatgcctccagcatttcctgtttcactgcggggtaataaacccatcctggtcagagcttcggaactttgctcggttcctgaattatcagctcagagattgtgaggcctctctcttctgcaatccgagttttattggcgacacactgaggggcttcaagaagttcgtggtgaccttcatgatctttatggcaagagattttgccacaccatcactccacacctctgaccaaagcccggggaagcacatggtcaccatggatggggttagggaagaagatctagcgcccttctccctccggaagaggtgggagtcggagcctcacccatacgttttcttcaatgacgaccacacaaccatgacattcatcggcttccatctgcagcccaacatcaacggcagtgtcgatgccatcagtcacttgactgggaaggtcatcaagagagacgtcatgaccagggacctgtaccagggcctgctgctccagagggtgcccttcaatgtcgactttgataaactgcccagacacaagaaacttgagaggctctgcctgaccttagggatcccccaggccaccgaccccgacaaaacgtatgagctcacaaccgacaatatgcttaaaatccttgccatcgagatgcggttccggtgtgggatcccggttatcatcatgggagaaactggctgtgggaaaaccaggcttattaaattccttagcgacctgcggcgtggtggtaccaatgctgacaccataaagctggtcaaggtgcacggaggaacaactgcagacatgatctactccagagtcagggaggctgaaaatgtggccttcgccaataaggaccaacatcagttggacaccatcttgttttttgatgaagccaacacaacggaagctataagctgtatcaaagaagtcctgtgtgatcatatggtggatggccagcctctggctgaggactctggcctgcatattatagctgcctgcaatccataccggaagcactctgaggagatgatctgccgtttggagtcagctggtttgggctacagggttagtatggaggagacggccgacaggctgggctccattcctctgaggcagctggtataccgggtccatgctctgcccccgagcctgattcctctggtgtgggactttggacaactgagtgacgttgctgaaaagctctacatccagcagattgtccagagactggttgagtccatcagcctagatgaaaacgggactcgcgtgatcacagaagtcctctgcgcctctcagggtttcatgaggaaaacagaagatgagtgcagctttgtcagcctcagggacgtggagcgctgtgtgaaagttttcaggtggttccacgagcacagcgcgatgctcttagcgcagctgaatgcctttctctccaagtccagcgtcagcaaaaatcacaccgagagagatcccgtcctctggtcgttgatgctggccatcggggtgtgttaccatgcctctttagaaaagaaagactcatatcggaaagccatcgccaggttctttccgaaaccgtatgacgacagcaggctgcttctggatgaaataacacgggcacaggatctttttctggacggcgtacctctgaggaaaaccatcgccaagaacttggccttgaaggagaacgtcttcatgatggtcgtctgcatcgagctgaagattcccctcttcctggtggggaagcccggcagctccaagtctctcgccaagaccatcgtggcagacgccatgcagggcccggctgcctactcagatctcttccgcagcctgaagcaggtccacctggtgtccttccagtgcagcccgcactccaccccacagggcatcatcagcaccttccggcagtgcgcccgctttcagcaggggaaggacctgcagcagtacgtctctgtggtggtgttagatgaggtggggctggcggaagactcacccaaaatgcccctgaagactctgcacccgctgctggaagacggatgcattgaagacgatcccgccccccacaaaaaggtcggcttcgtgggcatctccaactgggcccttgaccctgccaagatgaaccggggcatttttgtgtcacgtggcagccccaacgagacagagctcatagagagcgccaagggcatctgctcctcagacatcctcgtccaggaccgagtccaagggtactttgcgtcctttgccaaagcctacgaaacggtgtgtaagcgccaggacaaggaattcttcgggcttcgtgactactacagcctcatcaaaatggtctttgctgcagcaaaggcttcaaatagaaagccttccccgcaagacattgcacaggctgtccttaggaacttcagtggcaaggatgacatccaagctttggacatctttctggccaatttgcccgaggccaagtgctcagaggaagtcagccccatgcagctgatcaaacagaacatctttgggccttctcagaaggtgccgggtggagagcaggaagatgctgagtcccgctacttactcgtgctgaccaaaaactacgtggcactgcagatcctgcagcagacattcttcgagggggaccagcagccggagattatttttggttctggtttccccaaggaccaagagtacacccagctctgcagaaacatcaatcgtgtgaagatctgcatggaaacaggcaagatggtgttgcttctcaacctgcagaacctctacgagagcctctacgacgcactcaaccagtactacgtccacctcggcggccagaagtacgtggacctcggtctggggacccaccgcgtcaaatgtcgggttcaccccaacttccgcctgattgtcattgaagagaaagacgtcgtgtacaaacactttcccatccccctcattaaccggctggagaagcactatctggatatcaacacggtgctggagaaatggcagaagagcatcgtggaggagctctgtgcgtgggtggagaagttcatcaatgtcaaagcacatcatttccagaagaggcacaaatacagcccctctgacgtcttcatcggctaccactcggacgcctgcgcgtctgtggtgctgcaggtcatagagaggcagggtccccgggccttgacggaggaacttcaccagaaggtgtctgaggaggccaaatcgatcctgctgaactgcgctacgcccgatgccgtggtccggctgagcgcctactcgctgggcgggttcgcagcggagtggctgtcgcaggagtactttcacagacagaggcacaactcctttgcagatttccttcaggcacacctgcacacggcagacctggagcgccacgccatcttcacagagatcaccactttctccaggctgctaacaagtcacgactgtgaaattttagaatcagaggtcacaggcagggctccgaaacccacactcctgtggctgcagcagtttgacaccgagtactcattcctcaaagaagtccgaaactgtttaacgaatacagccaaatgtaaaatcctcatttttcagacagattttgaagatggaatccgtagcgcccagctcattgcctcagctaagtattctgttataaatgaaatcaacaaaatacgagaaaatgaggaccgtatcttcgtctatttcatcacaaaactgtcccgggtgggaagaggaacagcctatgtgggcttccacggagggctgtggcagtctgtccacatcgatgacctccggagatccaccctcatggtttctgatgtgaccaggctgcagcatgtcaccatcagccagctgttcgcgcccggagacttgcctgagctgggcttggaacaccgggcggaagacggccatgaggaggcgatggagacggaggccagcacatcaggggaggtggcagaggtggcagaggaggccatggaaacagaaagttctgagaaggtgggaaaggaaacctctgaactcggaggcagtgatgtgtcgatcctggacaccaccaggctgctgagaagctgtgtgcagagcgccgtgggcatgctcagagaccagaacgagagctgcacgcgcaatatgcggagggtggtgctcctcctgggcctcttgaatgaggatgacgcgtgccacgcctctttcttgcgggtatccaagatgcgcctcagtgtctttttaaagaagcaagaagagagccagtttcaccctctggagtggttggcaagggaagcctgcaaccaggacgctctccaggaggcgggcacattcaggcacaccctctggaagcgggtccaaggtgctgtcacccctctgctggcgagcatgatatcattcatcgacagagacggcaacctagagttactgaccaggccagatactccgccctgggcaagagatctttggatgtttattttcagtgacacgatgcttctgaacattcctcttgtgatgaataatgaaagacataaaggtgagatggcctacatcgtggtgcagaaccacatgaacctttccgagaacgcttccaacaacgtccctttcagctggaaaatcaaggactatctggaggagctgtgggtccaggctcagtacatcacagacgcagaaggactgcccaagaagttcgtggacatctttcagcagactcctctgggcaggtttcttgcccagctccatggagagccgcagcaggaacttcttcagtgttacttgaaggatttcattctcttgaccatgcgtgtgtcaacggaggaggaattaaagtttctgcagatggctctgtggtcctgcactaggaaactgaaagcggcgtcagaagcgcccgaggaagaggtttccttaccgtgggtgcaccttgcctaccagcgtttcagaagccgtctgcagaacttttccagaatcctgaccatctaccctcaggttctccacagcctgatggaagcccgttggaaccatgagctggctggatgtgagatgaccctggacgcatttgccgcaatggcctgcacggagatgctgacaagaaacaccctgaagcccagtccccaggcgtggctacagttggtgaagaatctttccatgccgctggagctcatctgctccgatgagcacatgcaaggcagcgggagcctggcccaggctgtcatcagggaagtcagagcccagtggagtcggattttctccaccgcactcttcgtggagcacgtgctcctaggaaccgagagccgcgtccccgagttacaggggctggtgaccgagcacgtcttcttactagacaagtgtcttcgagagaactctgacgtgaagacgcacgggccttttgaggccgtgatgcgcactctctgtgaatgcaaggagacagccagcaagaccctcagcaggtttgggattcagccgtgctccatctgcctgggagatgcaaaggaccccgtctgtctgccctgcgaccacgtgcactgcctgcgctgcctcagggcctggtttgcctcagagcagatgatatgcccctactgtttaactgccttgccagacgaattctctccagctgtttcccaagcgcacagggaagccattgaaaagcatgcccgcttccggcagatgtgcaacagtttcttcgtagacctggtgtccaccatttgcttcaaggacaacgctccgcctgagaaggaagtgattgagagcctgctctctctcctcttcgtccaaaaggggcgcttaagagatgctgcccagagacactgtgaacacacaaaatctctctctccattcaatgatgttgtggataagactcctgtcatccgctcagtgatactgaaactgcttttgaagtacagctttcatgatgtaaaagattatattcaggaatatttgaccctgttaaaaaagaaagcattcataactgaagataaaactgaactgtacatgctcttcatcaactgcctggaggattcaatacttgagaagaccagtgcttactccagaaatgatgaactgaaccacctagaagaggaaggtcgtttccttaaggcatattctccagcaagccggggccgagagcctgccaacgaggcctcggttgaatacctgcaagaggtggcccggatccgcctctgcctcgacagagctgcagatttcctctcggagcctgagggaggcccagagatggccaaggagaagcagtgctacctgcagcaagtcaagcagttctgtatccgggtggagaacgactggcaccgggtgtacctggtgcggaagctcagcagccagcgggggatggagttcgtgcagggcctctccaagcccggccgcccgcaccagtgggtgtttcccaaggacgttgtcaagcagcaggggctgcggcaggaccacccaggccagatggataggtacctggtgtacggcgatgaatacaaggctctccgtgatgctgtggccaaagctgtcctcgagtgcaagccactgggcattaagactgctctgaaggcctgcaagaccccccaaagccagcagtcagcctacttcctgttaacactgtttagagaggtggctattttgtacagatcccacaatgcaagcctccaccccacgccagagcaatgtgaagctgtgagcaaattcattggcgaatgcaagatcctttcacctcctgatatcagccgttttgcaacatcgctcgtggacaattctgtgccattgttgagggcggggcctagtgacagcaaccttgatggaacggtgacagaaatggccattcatgctgcagccgtccttctgtgtggacagaatgaactcttggagcccctaaagaatctggccttctccccagccaccatggcgcatgcttttcttccaaccatgcctgaagacttgctggctcaagctcggaggtggaagggtctggagcgagtccactggtacacttgtcccaacggccatccttgctccgtgggagagtgtggcaggccgatggaacagagcatctgcattgactgccatgcgccgattggaggcattgaccacaaacctcgggacggctttcatctggtcaaagacaaggcagacagaacgcagaccggccacgtgctgggcaacccgcagcggagagacgtggtgacatgtgaccgagggctgcccccagtggtcttcctccttatccggctactcactcacttggctctgcttctgggagcgtcccagagttcccaggctctgataaacatcattaagcctccagtgagggatccaaaaggctttctgcagcagcacatcctgaaggacctggagcagttggccaagatgctgggacacagtgccgacgagaccatcggcgtggtccacctcgtcctgcgcaggcttctccaagagcagcaccagctctctagcagaaggcttttaaattttgacacagaattgtcaactaaagaaatgaggaacaactgggaaaaggaaatcgcagctgtgatttctcctgaactggagcatctagataaaacccttcccaccatgaataatctcatcagccaagataagcgtatcagctctaaccctgtggccaaaataatatatggtgacccagtgaccttcctgccccacctgccccggaaaagtgtggtccattgctctaagatttggagctgcaggaaaagaattacagttgagtacctccagcacattgtggaacagaaaaatggcaaagaaagagtgcccatcctctggcatttcctgcagaaggaagcagagctgaggctggtaaagttcctgcctgagattttggccttgcaaagggatctagtgaagcagttccagaacgtccagcaagttgaatacagctccatcagaggcttcctcagcaagcacagctcagatgggttgaggcagctgcttcacaacaggatcacagtctttctgtccacatggaacaaactgaggagatcgcttgagacgaacggtgagatcaacctacccaaagactactgcagcactgacttggatctggacactgagtttgagatcctcttgccacgccgacggggcctgggcctctgtgctaccgctctcgtcagctacttgattcgcctacacaatgaaattgtctacgccgtggaaaaactctccaaggaaaacaacagctattccgtggatgccgccgaggtcactgaactgcatgtcatcagttatgaagtggagcgggacctgactccactgattctctccaactgccagtaccaggtggaggagggcagagagaccgtgcaggagttcgatctggagaagattcagcggcagatcgtcagccgcttcctccagggcaagccccggctgagcctcaagggaatacccactctggtgtacagacacgactggaactatgaacatctctttatggacatcaagaacaaaatggcacaggactccctccccagctcggtcattagtgccatcagtggacagctgcagtcctacagcgatgcctgtgaagtgctgtctgtcgtagaagtcactctggggtttctgagcacagctggtggggatccaaacatgcagctgaatgtgtatactcaagacatcctgcaaatgggtgatcagacgattcacgtgttaaaggccttaaacagatgccagttaaaacacaccattgccctctggcagttcctgtctgctcataagtctgaacagctgctgcggctgcacaaagagccatttggggaaatcagttcaaggtacaaagcggatctgagcccggaaaatgctaagctcctcagcacattcctaaatcagactggcctagacgccttcctgctagagctgcacgaaatgataatcttgaaactaaagaacccccaaacccaaaccgaggagcgcttccgccctcagtggagcctgagagacactctcgtaagttacatgcaaactaaagaaagtgaaattcttcctgaaatggcatctcagttcccagaagagatactgctcgccagctgtgtctcagtgtggaaaacagctgctgtgctgaaatggaatcgagaaatgagatagaattatttcctcagctatctttggatgactttggagagaagactcctctctcctcgtctgcggcgtggacttgatcatggactggtgcctttgcattcagaaggagagctgtcagcgtagcaccgaattcaagaccaaggcgtgctacctgagctgacagctttttgaaagccgagctgtttctgaaccatgtacatacatgttctgaaactttctcatcattttatgagtactgttcattgagagatgacaatgaagattagatgaaattggaaataaaccaacattgtttacattccaggagacttgtagctcagccacacacgcagtaatgacctgtgcccgttcgcctctggcactgcccacccctctttttttttttcttctaattctgtactcacaaaagagaatctcattttcttctttcttccattcccttaaattctgagtactgtacatatatttctgggttcccacgatgatgtgaaaaactaccagactgttttttgtcttctcacaaagacaagaaaaatcagggcattttgtgagtgccttaagatcaaactaacaagatctgaccctctcccctcacagtgagccactgccccacttcagagggtaagagccaaaagcctcattgtgaaaggcactggacttggaccagggacaccatcagggccttggttttctcacgcataaaatggagagtggattaatcgccaaagattcttctgatctgacattttgaaattgtgagagaaactagatgactgtaaacttggtcacaggcctggttctggcagttctttgcggacttttttctagcattatgccaaataaacatgcagtctcagtgtgctctcgcatgtatgaatatctagtcctttctgtggttctcagccaagacataaaaactaggactcagagcacatacaaaaccagttatgtttcggaaagagggaaaagagtccccgagcccggatcttgtgctgcttttctcactgacgtgttgccttttttctttacaaaatctgctttgatacttaggacctctctggactaatttctcttcctagacagctcagcacagctattgatatgttagaggcagtatccttaatattcattctaaatgagttaacgacttaacttgaaattgggcctaaggagtgagaactacaaaaatacaaaatgcttgtccaggactcagccatgcacaccttgagcagcgccggcaggaggcacggaaggaactgtgctccgttctcctcactgtcatggtgccaccagtgtctgatgaagggcagagtgacccagactgcaggcagtaactgacttcacacagtccctggcatttagtcatctgtgattgttttatcactctggactgtgcagagccacctgccaccgagatctgcattccgactgcctatgaacgggtgtgggggccgggggctggcttgctgaagtcttcaacttgcactcggagctcctttgatacctcagagctggctgtcaggtggcagctcacacccagactcactggccacacctcagcagggggggagtcgagtgtcagtctctttctgtgaaggctttttttttcctttggcctgggaatttttcccatttttatgaaggggttttaaattgtttcattttgtgtgctgtgcttcaaagccttaactgtcaaatcttgcattatcttgtttgtacagaaatatactggcctagcagaggcaaaaaaaaaaaaaatgaattttattttacttgtcacacctgtcttaataaactggagttttgctgctaaagaactcttctctctgggggcagagcttctatttatggcacatagacatcagctaggcttttgggaatcgtttgtgttctttgtggaaatgtcctttagaagcacccatgaagtagtgtgttcagactgtgcacacagaaaacaggctctgccttcacatgtgagacggtggacttttcctctggacaaaatgacagcatcctggcgactccacagtggagctgagcgccactccctgtagccgatctgggactgaaacgcttacacctctgcctcagaaggagtcccccatgccctgcctgaaatgacttcactggacacagcggggctgcagctaacggggtacaggtaggagctaactaacttcacccctgagtccacttgcggggtaagagataaacagtaacccttccaggagcccactgacgttggagtgctaaaaatgccccttcagggggaaaactgcattttctcttccaaaaaggaaaggttcttccaggcgagaaacctgtggtctagaaccacagcaagaagaggaggcatgctggcctgcaccggaagactcactttgtctgccctgcgccagcctcacctcaccctgcagttcccgtttccgccatggatgcctcatcaccaaccctgaccttccccctcccaaccctttattcatcctcactcccactcatacccgcctccctggacagttccctgctgcagagttctttctgctttcagccctaccttggtggtgatttacctgaaaatcttcacaactgatcattatctccttctctttgagacctgactgaaaaaattaggtgtgcacacctgtaatcccagctacctgggaggctgaggtatgaggattgcttgagcctgggagtttgaggctgcagtgagctatgattgcaccactgcactccaacctgggtgacagagtgagaccctgtctcaaaaaaaaataaaataaggacctta

SEQ ID NO: 568 - DNA, 1184 bp, HOMO SAPIENS
atctgccacgatgttgctgctcagcctgaccctaagcctggttctcctcggctcctcctggggctgcggcattcctgccatcaaaccggcactgagcttcagccagaggattgtcaacggggagaatgcagtgttgggctcctggccctggcaggtgtccctgcaggacagcagcggcttccacttctgcggtggttctctcatcagccagtcctgggtggtcactgctgcccactgcaatgtcagccctggccgccattttgttgtcctgggcgagtatgaccgatcatcaaacgcagagcccttgcaggttctgtccgtctctcgggccattacacaccctagctggaactctaccaccatgaacaatgacgtgacgctgctgaagctcgcctcgccagcccagtacacaacacgcatctcgccagtttgcctggcatcctcaaacgaggctctgactgaaggcctcacgtgtgtcaccaccggctggggtcgcctcagtggcgtgggcaatgtgacaccagcacatctgcagcaggtggctttgcccctggtcactgtgaatcagtgccggcagtactggggctcaagtatcactgactccatgatctgtgcaggtggcgcaggtgcctcctcgtgccagggtgactccggaggccctcttgtctgccagaagggaaacacatgggtgcttattggtattgtctcctggggcaccaaaaactgcaatgtgcgcgcacctgctgtgtatactcgagttagcaagttcagcacctggatcaaccaggtcatagcctacaactgagctcaccacaggccctccccagctcaacccattaaagacccaggccctgtcccatcatgcattcatgtctgtcttcctggctcaggagaaagaagaggctgttgagggtccgactccctacttggacttctggcacagaaggggctgagtgactccttgagtagcagtggctcttcctagagtagccatgccgaggccggggcccccacccctcctccagggcaaccccttggtcctacagcaagaagccagaactgttggaatgaatggcagccctccctggagaggcagcctgtttactgaatacagaggatacgtttacaaactgaatacgcataataaataactgcacattctccatccaaaaaaaaaaaaaaaa

SEQ ID NO: 569 - DNA, 485 bp, HOMO SAPIENS
  misc_feature (136)..(136): n is a, c, g, or t
  misc_feature (186)..(187): n is a, c, g, or t
  misc_feature (191)..(191): n is a, c, g, or t
  misc_feature (196)..(196): n is a, c, g, or t
  misc_feature (204)..(204): n is a, c, g, or t
tgagtcttttgaacacaggtatgaagtacaaagtgaatctaaaccaatgttacccctaccatacaggtatgttgtgttcacaaacacacacacacacacacacacaaattaaacatggtggaaatttttgacaaanttaaccacattaaatattctgtccattaagattccccaaagatggtgganngatngcagngttagtgngagaagatatttgcagcatgcaaggcaagatgacaatgcactaataacaaaatttcataaaacaatggacttggggcttgggaaaaataattatgacatgctttctgaagtgtccccagatagtttcataaaaaatggagcaaataggctaaagaaaaacccatagacatcatgttcaaaagaactgatgacaaggcatgttcataacccataaaatacaagtggatgcagctaaataactgcaatacttttgaaagagtttggcaggtttcgaagatgtg

SEQ ID NO: 570 - DNA, 3304 bp, HOMO SAPIENS
ataaaccccagggctcattcttgagctgctcctgcatagatctcgtcctgttcaacacaccaaagattgacagctgaactgagagaccatcacccacagacacaactggccactgggtggtgcacaagtcagacagaactgaatagtcctgtgaagactctggacactgaactgactttggaaccagactgcagaatggaggggtgggaacttgtggcttgaacctaatcaggtttcattaaggttttctatagataagatcatgtcaagacaccctcagaccacagggcggcgccacgagcccggccgagtgcagctggagcgccgacgtcgccgaggatacacagtgctgaggcagaacgcaggttcgtcacagtgggcctccgtgggcggcgccgcacgctcgtcacagtgggcctccgccggctacgccgctgcttcagtggcttgcaggcactttcctcttggaagtggcgactgctgcggggctgagcggtgctcgcacgcgtctcgggagccaggttggcggcgcgatgaggcgcagcaaggccgatgtggagcggtacgtcgcctcggtgctgggtctcaccccgtcgcctcgacagaagtcaatgaaaggattctattttgcaaagctgtattatgaagctaaagaatatgatcttgctaaaaaatacatatgtacttacattaatgtgcaagagagggatcccaaagctcacagatttctgggtcttctttatgaattggaagaaaacacagagaaagccgttgaatgttacaggcgttcagtggaattaaacccaacacaaaaagatcttgtgttgaagattgcagaattgctttgtaaaaatgatgttactgatggaagagcaaaatactgggtcgaaagagcagcaaaacttttcccaggaagtcctgcaatttataaactaaaggaacagcttctagattgtgaaggtgaagatggatggaataaactttttgacttgattcagtcagaactttatgtaagacctgatgacgtccatgtgaacatccggctagtggagttgtatcgctcaactaaaagattgaaggatgctgtggcccactgccatgaggcagagaggaacatagctttgcgttcaagtttagagtggaattcgtgtgttgtacagacccttaaggaatatctggagtctttacagtgtttggagtctgataaaagtgactggcaagcaaccaatacagacttactgctggcctatgctaatcttatgcttcttacgctttccactagagatgtgcaggaaaatagagaattactggaaagttttgatagtgctcttcagtctgcgaaatcttctttgggtggaaatgatgaactgtcagctactttcttagaaatgaaaggacatttctatatgtatgctggttctctgctcttgaagatgggtcagcatggtaataatgttcaatggcgagctctttctgagctggctgcattgtgctatctcatagcatttcaggttccaagaccaaagattaaattaagagaaggtaaagctggacaaaatctgctggaaatgatggcctgtgaccgactgagccaatcagggcacatgttgctaagcttaagtcgtggcaagcaagatttcttaaaagaggttgttgaaacttttgccaacaaaattgggcagtctgcgttatatgatgctctgttttctagtcagtcacctaaggatacatcttttcttggtagcgatgatattggaaaaattgatgtacaagaaccagagcttgaagatttggctagatacgatgttggtgctattcgagcacataatggtagtcttcagcatcttacttggcttggcttacagtggaattcattgcctgctttacctggaatccgaaaatggctaaaacagcttttccatcgtttgccccatgaaacctcaaggcttgaaacaaatgcgcctgaatcaatatgtattttagatcttgaagtatttctccttggagtagtatataccagccacttacaattaaaggagaaatgtaattctcaccatagctcctatcagccgttatgcctgccctttcctgtgtgtaaacagctttgtacagaaagacaaaaatcttggtgggatgcggtttgtactctgattcacagaaaagcagtacctggaaacttggcaaaattgagacttctagttcagcatgaaataaacactctaagagcccaggaaaaacatggccttcaacctgctctgcttgtacattgggcaaaataccttcagaaaacgggcagcggtcttaattctttttatggtcaactagaatacatagggagaagtgttcattattggaagaaagttttgccattgttgaagataataaagaagaacagtattcctgaacctattgatcctctgtttaaacattttcatagtgtagacattcaggcatcagaaattgttgaatatgaagaagacgcacacataacttttgctatgttggatgcagtaaatggaaatatagaagatgctgtgactgcttttgaatctataaaaagtgttgtttcttattggaatcttgcactgatttttcacaggaaggcagaagacattgaaaatgatgccctttctcctgaagaacaagaagaatgcagaaattatctgacaaagaccagggactacctaataaagattatagatgacggtgattcaaatctttcagtggtcaagaaattgcctgtgcccctggagtctgtaaaacagatgcttaattcagtcatgcaggaactcgaagactatagtgaaggaggtcctctctataaaaatggttctttgcgaaatgcagattcagaaataaaacattctacaccgtctcctaccaaatattcactatcaccaagtaaaagttacaagtattctcccgaaacaccacctcgatggacagaagatcggaattctttactgaatatgatttgccaacaagtagaggccattaagaaagaaatgcaggagttgaaactaaatagcagtaagtcagcatcccgtcatcgttggcccacagagaattatggaccagactcggtgcctgatggatatcaggggtcacagacatttcatggggctccactaacagaagcagcacatcgtcattttacaattgagaaacatggagactccaaatggattatttacaggttcacaaaacagctttgtggcactgaaagggcgagagccaagatctcctgatttctgttcctgtgttcatagattctttttccttaataaaagtaaacatatatcaa

SEQ ID NO: 571 - DNA, 3717 bp, HOMO SAPIENS
aaaaacttccggcgggaaccggaaggtgcggtggcactcacggaatctcgggtcttctgacgtgccgggcgggaagatgtcatcattgccaagaagagcgaaagtacaggtccaggatgtggtactgaaagatgaattttcttcattctctgagttatcatctgcctctgaagaagatgacaaggaagatagtgcctgggagccccaaaagaaagttcccagaagccgtaaacagccccctcccaaggaatccaaaccaaagaggatgcctcgggtgaagaagaatgccccacagatcagtgatggctcagaagtcgttgttgttaaggaggagctgaatagctctgtggctattgctgatactgctttagaagacagaaaaaataaattggatactgtacagactctgaaaacagccaagacaaaacagaaatgtgcagcgcagccacatacagttcgaaggactaaaaagctgaaagttgaagaagaaaccagcaaagccagcaacttagagggtgagagtaatagttcagagacaccatccacaagcactgtgtggggaggtacatgcaagaaggaagagaatgacgatgactttacatttggtcagtccgctttaaagaaaatcaagactgagacatatcctcaggggcagcctgtcaagtttccagcaaatgccaatagtactaaagaggaggtggaaatgaattgggacatggtacaggttttatctgagagaactaatattgaaccttgggtttgtgccaacatcattcgtctctttaatgatgataacacaattcccttcattatacgttatagaaaagagctcattaataaccttgatgctgattccttgagagaagttcagcaaaccctagaagagctacgggctgttgcaaagaaagttcatagtacaatccagaaaattaagaaggaagggaagatgtctgagtgcttgttaaaagccatgctgaattgtaaaacttttgaagaactagaacacgtgtctgctccatataaaactggaagcaaagggactaaagcccagagagcaagacagttgggcttagaaggagcagccagggcactgcttgagaaaccaggggagctcagtctgctatcgtacattaggcctgacgttaaagggctttcaacgcttcaggatattgaaataggagtgcagcatattttagcagatatgattgctaaagacaaagacacgcttgacttcattcggaacttgtgccagaagagacatgtttgtatccagtcatctctggcaaaagtatcctcaaaaaaggtaaatgagaaagatgttgataagtttctgctctaccagcatttttcctgcaacataagaaacattcaccatcatcagattctggcaattaaccgtggagaaaatttgaaggtactgacggttaaggtcaatatttctgatggagtgaaggatgaattctgtaggtggtgcatccaaaacaggtggagaccacgtagctttgcaaggccagagttaatgaagatcttatataattcactgaatgattcctttaaacgccttatttatcctcttctctgtagagaattcagagccaaactaacatcagatgcagagaaggaatcagtaatgatgtttggacggaaccttcgtcagctccttttaacaagccctgttccagggcgcaccttaatgggagtggatcctggttataaacatggttgcaaattagctataatttctcctactagtcagatacttcatactgatgtggtttacttgcattgtggacaaggcttccgagaggcggagaaaataaagacacttttgctgaatttcaactgcagcacagtagtgattggaaatggaactgcctgcagggaaacagaagcttactttgctgacctgataatgaagaattattttgcaccactggatgttgtttactgtatcgtcagtgaagcaggagcatcaatctacagtgtcagccctgaagctaacaaagagatgccagggctggaccctaatttgagaagtgcagtttccatagcaaggcgtgtacaagatccattagctgagctagtgaaaattgagccaaagcacattggagttggaatgtatcagcatgacgtatcccagactttactcaaggcaacactggacagtgttgtagaagaatgtgtcagctttgtgggagtggatattaacatctgttcagaagttttgttaaggcatattgcaggactcaatgccaacagggccaaaaatattattgaatggcgagagaaaaatggaccctttatcaaccgagaacagctgaagaaagtgaaagggctgggcccaaaatccttccaacagtgtgctggcttcatcagaatcaaccaggattatatccgaacgttttgcagtcagcaaactgaaacttcaggccaaattcaaggagttgctgtgacatcttcagcagacgttgaggtcacaaatgagaagcagggcaaaaagaagagcaaaactgcagtgaatgttttactgaagccaaatcctttggaccaaacttgtattcatccagaatcatatgacatagcaatgaggtttttgtcatccattggagggacactgtatgaggttggaaagcctgaaatgcaacaaaaaataaattcattccttgaaaaggaaggaatggagaaaattgcagaaagattgcaaacaacagtacacaccttacaggtcatcatagatggtctcagccagcctgaaagctttgactttcgaacagattttgataaacctgatttcaagagaagcatagtatgcctggaagatctgcagattgggacagttcttacaggcaaagttgagaatgccactctctttggaatttttgtggatataggagtggggaaatctgggctgattcccatacgaaatgtaacagaagcaaaactttcaaaaacaaagaagagaagaagccttggactgggccccggagaaagagtggaagtccaagtactcaacattgacatcccccgatctaggattactctggacctcattcgggtgttatgagtatcccacgaaggccagacgctgattttattttctcatttccacagattgacaaggataagtcagttgtttgtaaactctaggtagcagatgagaaataattcacttaatatcagaaatattttccaaacactttcctttattttttcttctgaataaatagaaaaccaacagtttgatttccttttcccttaaaggaaacaactaatacacattcttatatggctttatgtagtaatagttttctgactaaaattttgttttttattttttgtaatttatctttaactccttttgcattttgtataacagattgcttaacttctacttgccaacatctgccttgctggacttgtatgggattgtcttcttgatttgaattgtaccgtctttgttgacacagtagggctgggcagtgtttaatccttccattttatagatttttttttaatcaggccttttggacttcattcataattttgcaataatctcttttcccttgtcatgcaagccaaaaatataccagtaaaacagattctgacgtgtttgtagttatcaaatgaatggctcgaaacacttctcaaaaggatatacgtattgaccccaacaataaatgtttgtggctagtgaaaaaaaaaaaaaaaaaaaaaaaa

SEQ ID NO: 572 - DNA, 485 bp, HOMO SAPIENS
ttgagcaccttctcatgtgcttattagccatttacttatttttgtgaattttatgttcaagtcttttgtccattctttaataatttttaatatttcatgatgaaaattccaaatatgcacaaccgaagagagtacgacagagccttacgtgactcttaccttgactctgtactgtagtttttcatcattccttcgtcacttgcaaattcaagtatttttcccagccattaattgagtttttgaagatgaggaattttttattttggtgaagtccagcttatgaactttttctcttacatgtagcactttctctgtccagaccgatgttatatcctgagaacctcttcacctaggaaacctaccacatatcagactcagcgtgtccataacttatcttacctcaaatccattcttcttccagtaatattacataaaggctacttgggagtgtagattctgggaaacctgaatctatgttcccgggc

SEQ ID NO: 573 - DNA, 6751 bp, HOMO SAPIENS
gaagcgctggacgagaggaggaattactctagggtacaaggcctcgcccaggagtggggggttgcttccgggtcgcgctcccggaaacaggaagttgcccatcctcctcgcccggcggcagctgtccccgaggcgggaggagcccgaggggcgcgagccccgcatggattttatattggaagacatggatcttgctgccaacgagatcagcatttatgacaaactttcagagactgttgatttggtgagacagaccggccatcagtgtggcatgtcagagaaggcaattgaaaaatttatcagacagctgctggaaaagaatgaacctcagagaccccccccgcagtatcctctccttatagttgtgtataaggttctcgcaaccttgggattaatcttgctcactgcctactttgtgattcaacctttcagcccattagcacctgagccagtgctttctggagctcacacctggcgctcactcatccatcacattaggctgatgtccttgcccattgccaagaagtacatgtcagaaaataagggagttcctctgcatgggggtgatgaagacagaccctttccagactttgacccctggtggacaaacgactgtgagcagaatgagtcagagcccattcctgccaactgcactggctgtgcccagaaacacctgaaggtgatgctcctggaagacgccccaaggaaatttgagaggctccatccactggtgatcaagacgggaaagcccctgttggaggaagagattcagcattttttgtgccagtaccctgaggcgacagaaggcttctctgaagggtttttcgccaagtggtggcgctgctttcctgagcggtggttcccatttccttatccatggaggagacctctgaacagatcacaaatgttacgtgagctttttcctgttttcactcacctgccatttccaaaagatgcctctttaaacaagtgctcctttcttcacccagaacctgttgtggggagtaagatgcataagatgcctgacctatttatcattggcagcggtgaggccatgttgcagctcatccctcccttccagtgccgaagacattgtcagtctgtggccatgccaatagagccaggggatatcggctatgtcgacaccacccactggaaggtctacgttatagccagaggggtccagcctttggtcatctgcgatggaaccgctttctcagaactgtaggaaatagaactgtgcacaggaacagcttccagagccgaaaaccaggttgaaaggggaaaaataaaaacaaaaacgatgaaactgctttctgggggttggttacttagttacctgccctttgcatgcatgtgtgaaccagctgtgagctgcaaggcagtggccagagcctcgccctcctgactcttcctgcaggtggctcaggaaggattcagcctggccacttggctaggactctgccagcacccatctgagactgacctcttccgggcctttggacactatgaccttgatgctgcccttcaggcaggaaacagggctggtgcctttcttcacctgcatggccagcttccttccctggcagtggagagggcagccaacaggttctaatgtcagagccatcctttaccaggtgggcctgcttgtccctgtcttgcctgccacatcactctactttttggaaggccatggctgattaaagaagttcttgtagtttcccaagcaaagtggaatctagaaacagtgaaaaaagttcagataactttgaattgcattcaagaagtacacttctttcccattgtccgtggctcttggagtctccgtgatgccaggctagagtctgattatataataattcaaaatggtaactcccaaggtaatgctttcttccatttcatcaggttcttttatccccactgcaccccctccccttctcccttgcctatctggatggcttctcagaagctcggccctagtcctccctgccttggcggggccagagcccactactgctgaggcagcactgctctcgtcagctgtgttgcctttaccaagtgtcttcagagggttatgagttagagtagctggcctggggagagggtgcctccctgggtttgatctttagggtctgactttctgcagagaagatgttttacagatgtgtcaaagctgatgtaatgtggttgggggaggaaatccagacccaaagtgtttgtcagctgggtgtacaactgcctatgtgatcctctgtcttaaaatgatttctgtctgtgctgcgaaacaaagacaaggtgaggtgtttttcttttttgtaataatataaagctgtgtgtttctgattggatgattcactatgtgcattgttttctcctaagtgcttttagtaggtagcaatcaaatggtgtaaataaggatgttcttttcctgttccttttatttttttctctctttattattcttttattgacaccactagatagctggccactggtcatgccattgccaagatgaagaaaaagcaaactacactttggcctctggttctgaattgcagaaatcaaaggatgcagtaggtgtctatgtcagaattatggatcagaggcagacaatgacgagtgaagatggttgtgaagccctcttcattcctggaggagcctgcatctcatctctcaggccctctttctctgtgggtctcatgaacagcagtggggaccattgagcacttgaatggcctgtttgtctatgggcttgcaaaggacaagcagagttcacagagctcaggatagaaacatcagagcctcctccacgggcttcagtgaaactccgatgaactgtacctgagggaattttttcttaatcaaccccttgtgtggatgaatacaggaacaacaaaacttgtgtacgtatgaaagtcatgttgttaagcagttatgatttaagaggttttaagtcagagggatcatctggaggccggctttgtgcaagcttttacagccttctgcagtgtccttaccctggctgtacatggggaagggctatgtgtaaacaagtgctttagaggcctctgagagtttttaaaaatcagacccattaacaaaagagagggtttcttaggaacaaagcaactattttgattactgagatctctgttttgtttctgtgagttactctgtattcctttccccatttcactcttgcccttcacatcttaaatgtccataagaaacccttgcatgtgttggtattctgaggcatcccgtgggaaagtcccctaagtcccattttgtacttcaacaaaaaatgactgtagcagaagataagtggagacttttatggatatactactcattttacttaaaatctacccagttcagacttgaatgtaaacttgtattaggggaaaattctccaaagagggttttctacatacacagaagcagttcaacttctcaagttaattttgataagcagaatctactactggccagagcgacaggagtggctaggggttgccagccagtccctttctgatgatcaaggccctgcacagcaggatgccacaggatgcccctgccatctagctggaagcatcaaaagtccctctgtatgacccggtgtgggaaagagggttgtcaggatgagaaagtggggctgcagggtgacgataagaccacctaaccaactccccacctccaccaccacaataagaacaaaactgtagggctctaaagagagggggtggtttacaagtttattgagcatttactaggaagtgacatggcgatgacctctgtacatgagttaggttcactttcatgtggcctcccactacagagatgcgtatgcccagaagtcagctctctgaggagacaggctactttggccccagtttgaagcattctgtccaaatgtcctgagctctccagcagtcaagtagtgaatggataccatacttattatggttgatgaaaaaaggcagagcttatcctcaattttttttagggaagagaaggaataaaataaaagtggttcaagctgggcatggtggctcacacctgtaattgcagcactttgggaggctgaggcaggcagatcacttgaggtcaggagttcaagaccagcctggccaacagggtgaaaccccatctctactaaaaatacaaaaattacccaggcgtgatggtgggcgcctgtaatcccagctacacaggaagctgaggcaggaaaattgcttgaaccggggaggcggagattgcagtgagccaagattgtgccacttcattccagcctgggcgacagagcgaaactctgtcaaaggaaaggaaagaaaagaaaaaaaaaaagagagagagaaaagaagaggggaggggagggaaagggaagggaggggaggggaggagaggagagcagattgggggggctcatgttctgagagaaaggaataatagcatttgtctagtacattccagtttacaaagtgcctgatatacatgatctcctttaatcttcacccaatcctgtaaagtaggtgttagatccccattttgcaagtaaataagtggaggcttagagcagttaaccgctggcaggtaggtagctggttccatagcacatcattttcctgcggcatcacggcatggtgccgaagaagacagctgtggatgtcgttgactcagatgtgcctccgttggggtgggagaacccagggatgggggtcagcaagccaggaactccgcagggtttgtttttaaaactctgctggacagaagtggaggaggaaagaatctaaccatatgacttttataaaaatcctttcacttttcccctccccatttgaaaactctttttaagagtgaatgtagctgaaacacaactgtgtccagccattttcctgtctccacattcttccagatgtgtgacagaggagggactctgctcaattccagttgtgggtccccttggagtttacatcacttgtttttcaattcttggttttctgttcccttctaccaaaacccagcataggactcagtgtacacttactttaaaacaaaaactcacatttcttagctgcaggtgatggcctcagtcattttaatacagcctggaatgagtttgcttattacccagtcactttcgtagtgaatgttcaaaccccaaagcaaatgtttgcatctccttgtccataaaggagaaagccaggttataggagaaagagagagaaaggcgcatgtctgtttgcacagagagaggcaattttgtctacctttcgagaatcagttataaacagaagggcctcttaggattttgagctctcctgacaatgaaggaaaagctctcttgagtatacaagttccacactcattacctttcagtggtgacccatcacccactacaatttgttgaaggaagggagtgtcagagatatgctttaaagttgtactttaggctgaaattctctctgtatttggacctgcagatgttgtgtacagaaccgatgcatggcagggtcaggaagctaggagagtgaaggcgcttgtggagacagctctgtagcaaatgaaacacggaagcctccgggaatgtgtttgtgtcaccagcagcaggcatttccctgtcctccccacccccagtctccacatccccagcagcctcttccagaagcatgtcagggagacggacaggtgctctccttctcgtgcaccacatccaagtccacccaccgtggacgcagtgtgactaaatgctggccttgaagagaaaccctcagccagcttgtctgttgtccaggtccctcagtgtctctggtttccctgccctgcataatttaagcattagtgccaaatacatctgtcatattcctctccctggagactgcgaaatgtccagactttttcagactagtggagggaaggaatgttacataactaagtggaggcctggaactgtcaggatttgacagggctggaccagagacccttccgcctctgcctagtgtgtctgtcaggcaggcagcagccatcaatccaagaatgagccatggcggcaagcactgtgtggagaaaggaacccagccgaggtctgagtttcagacagaaactggggagttgggacatcttctctgtgccaggcttcattgacaccatcgctccccacagcagctccttggggcagggggctcacctgtgcagccacccttactcacagtagcatcccattcttcacactgcaaccccccagcactgtggacccttccagggaggtgacaggagccagcagacacatgacattcccagaaagccccatcttatccagacaggcttccctccatacttctttccacagttttaccctcagaaaaatgttggctgcagtcttcccttccttcacctccaccctggggaagggtcagtaaccaatgccgagggtcggggaaggaggagtcacaggcaagacagggactcagcgcagtgctcccgccatcatcggggacaggtgccagggtcagctgcagctctccttccgggagcagggtgtggtggccctggatggtcccagggagcagagggaggcaggcagctgtcacagccacagcggctctgaatggcttgagcttttagtatgtgttcaagtgcaggatactacaaactggtaaagacttccaccatgtgaagaatgtatgtaaattaaagtttattgtaatgaaggtttttactttttgcaattaaaagtgttggttgataagaa

SEQ ID NO: 574 - DNA, 1196 bp, HOMO SAPIENS
ggaaaacggcggccgcggcgtctcctccgggacgctgaggggcccgaggagaccgtgaggctctggcctgcagctcgcgccgccatggacgctgccgaggtcgaattcctcgccgagaaggagctggttaccattatccccaacttcagtctggacaagatctacctcatcgggggggacctggggccttttaaccctggtttacccgtggaagtgcccctgtggctggcgattaacctgaaacaaagacagaaatgtcgcctgctccctccagagtggatggatgtagaaaagttggagaagatgagggatcatgaacgaaaggaagaaacttttaccccaatgcccagcccttactacatggaacttacgaagctcctgttaaatcatgcttcagacaacatcccgaaggcagacgaaatccggaccctggtcaaggatatgtgggacactcgtatagccaaactccgagtgtctgctgacagctttgtgagacagcaggaggcacatgccaagctggataacttgaccttgatggagatcaacaccagcgggactttcctcacacaagcgctcaaccacatgtacaaactccgcacgaacctccagcctctggagagtactcagtctcaggacttctagagaaaggcctggtgcaggcggcttgctgggggatgtgagcgctcaggacgtgatgaggtactcgtggttctggagctctagaaacacttctgatgcatgaaaaatgtgtgatggtgcaaggaatggattcaggatgttgttggagaaacaagtttgtgattagtccttaaaacttagctccctgggacattcttcaattccacatctgtttctagaaaccagccctttttccccccacttttgagaaataaaaaagccttaggtaaataagtcattctccctagcagagccacttgggtctcctgcatggaagccatcacacttgggcaggtgttcagtgactggtaggtgtagatacagcaggagtggccatgtggtccacggctttttaccccttcttgatcctgatttcttgggctgaatttagactctctcacagaggtggctcacagagaaggatggcagatggtgcagccaacaatgctgaccggtgcttatcctctaagccctgatccacaataaaaatggacccaactcaaaaaaaaaaaaaaaaa

SEQ ID NO: 575 - DNA, 3986 bp, HOMO SAPIENS
gggatatggcggggcctttgtctctcgctgtcgccggagtcccaggtctgtcttcactgctctgtgtcctctgctcctagaggcccagcctctgtggcgctgttaccagcaggtattggagatccacagctaagatgccaggaccccctagaagcctagaaatgggactgttgacatttagggatgtggccatagaattctctctggaggagtggcaacacctggacattgcacagcagaatttatatagaaatgtgatgttagagaactacagaaacctggccttcctgggtattgctgtctctaagccagacctgatcacctgtctggaacaagggaaagagccctggaatatgaagcgacatgagatggtggatgaacccccaggtatgtgtcctcattttgctcaagacctttggccagagcagggcatggaagattcttttcaaaaagcaatactgagaagatatggaaaatatggacatgagaatttacagttaagaaaaggctgtaaaagtgtggatgagtataaggtgaacaaagaaggttataatggacttaaccagtgtttcacaactgcccagagcaaagtatttcaatgtgataaatatttgaaagtcttctataaatttttaaattcaaacagacctaagataagacatactgaaaagaaatctttcaaatgtaaaaaacgtgtcaaattattttgcatgctttcacataaaacccaacacaaaagcatttatcatagagagaagtcctacaaatgtaaagaatgtggaaaaacctttaattggtcctcaacccttactaatcataggaaaatttatactgaagagaaaccttacaaatgtgaagaatataacaaatctcctaagcaactctcaacccttactacacatgaaataattcatgctggagagaaactctacaaatgtgaagaatgtggtgaagcttttaatcgatcctcaaatcttactacacataagataattcatactggagagaaaccttacaagtgtgaagaatgtggcaaagcatttatctggtcctcaacccttactgagcataagaaaattcatactagaaagaaaccctacaagtgtgaagaatgtggcaaagcatttatatggtcctcaacactaactagacataagaggatgcacactggagagaaaccctacaaatgtgaagaatgtggcaaagcttttagccagtcctcaacccttactacacataagataattcatactggagagaaacgctacaaatgcttagaatgtggcaaagcttttaagcaactctcaactcttactacacataaaataattcatgttggagagaaactctacaaatgtgaagaatgcggcaaaggttttaatcgatcttcaaatcttactacacataagataattcatactggagagaaaccttacaagtgtgaagaatgtggcaaagcatttatctggtcctcaacccttactaaacataagagaattcatactagagagaaaccctacaaatgtgaagaatgtggcaaggcatttatatggtcctcaaccctaactagacataagaggatgcacactggagagaaaccctacaaatgtgaagaatgtggcaaatcttttagccaatcctcaacccttactacacataagataattcatactggagagaaaccctacaaatgtgaagaatgtggcaaagcctttaactggtcctcaactcttactaaacataagataattcatactgaagagaaaccctacaaatgtgaaaaatgtggcaaagcctttaagcagtcttcaatccttactaaccataagagaattcatactggagagaaaccctataaatgtgaagaatgtggcaaatcttttaaccggtcttcaacttttactaaacataaggtaattcatactggagtaaaaccctacaaatgtgaagaatgtggcaaagcatttttctggtcctcaaccctaactaaacataagagaattcatactggagagcaaccctacaaatgggaaaaatttggcaaagcctttaatcggtcctcgcacctcaccacagataagataactcattggagagaaatcttacaagtatgaataatgtgccaaagcctaagaaaaccctcaattcttaatagatataagattattcctactggagagaaactacaaacctgagagaggcgctaatgcttttgacagtacctaaaactttaaagaaaatcattctgctgaaaaatcctagaaatgtgaagaatgtgaaaaagcctttaaatgattgtcacacttgattgtaggtaagataattcatactggagaaaactaccagtgtgaacaacgtggccaagcttcgacaatgctcacaccctattgcacaggaaagcatttatacttgagaagaaatgtacaaatattggcaaagtaaaaaatccattaacacctgctcacatcttactcaaaattgtagagttcatagtaaataaaagcattaaaattctaattactctcagaagatctgtcagaaagtatgtctttaaagtatagaagagcatttattttgaaaaaaacattacacatatgaagaggattgtaatatctttacttgtaccacagatcttattgtacacattttatactagagaaaaaccctcaggcagttgttaaaattttgttgaacatcagggagtttaagaaaaccctgcaagtataatgaatttggaaaaacattttttcaaaaactacaaattataaaacaccaaagtgttcatactaaaatatatttttgcagatacattaaatatgaaagatattcaatccaaaattaagtctatgtaaatatcagggaataattcacagtagaaatatctagggcattcaagctttagacattacactaaatcagagtgctgagtatagaaaataatacaaacagatttgtctaaacatttgtatataactttaaaaatagaatattttttggagggttataattacattcaaagtacttttttttgaaaatacagattttttttaaaagtgaataatgtgttcaactcttaaattcatgctgtttcatcattgctggtgtattcatatgtgaaagcatgtgactaattgttgctgcataaaagatatgagattcttttttattaggcattatttatgaccttttctatgaaaagataaggacattaaaatgtaagatgcgtgaggaaaatttaggtagagaggctctttgtggttaacttataatattgagtgatgcatgaggtaggtgttcagaataatattcctctgcattattatgaatgaaaagcattcttaattttagttaaaattaagttagtcatatgttattttattaattgtacttctatgaaataatatgcagtctatttttaaattataaattatgtgtgaacttagcttttcaattcaacatttttaacatattaaatactattgtgaattcaatgaagtgttcttatgccactaactttaacctattcccttactcaaggatgtaggtaaaagatggtaacaatacactatttggtaagataatgtactgacatctctagcaatcttttttgccagtggctttaaattgccaataagttaaagaatattgttcctatgggttaaatttttattcttattttcacatttaaatttatttttcttaatttttgtggatacataatatgtgtatatatgtatgccatatatggtatattttgatgcaggcatactctatataataatcacattagaggaaatgagatatccattacctctagcatttattctttttattacaagcaattcaattgtacacttttagttatttttaaatttacaatgttattgattacagggtcatttttatggtcataataaaaaattttatacaaacgtgtaaaatctatacatttctgagttctgaataaatatttttaaaaattttaa

SEQ ID NO: 576 - DNA, 2429 bp, HOMO SAPIENS
ctcttttctaagcttgtctcttaaaacccactggacgttggcacagtgctgggatgactatggagacccaaatgtctcagaatgtatgtcccagaaacctgtggctgcttcaaccattgacagttttgctgctgctggcttctgcagacagtcaagctgcagctcccccaaaggctgtgctgaaacttgagcccccgtggatcaacgtgctccaggaggactctgtgactctgacatgccagggggctcgcagccctgagagcgactccattcagtggttccacaatgggaatctcattcccacccacacgcagcccagctacaggttcaaggccaacaacaatgacagcggggagtacacgtgccagactggccagaccagcctcagcgaccctgtgcatctgactgtgctttccgaatggctggtgctccagacccctcacctggagttccaggagggagaaaccatcatgctgaggtgccacagctggaaggacaagcctctggtcaaggtcacattcttccagaatggaaaatcccagaaattctcccatttggatcccaccttctccatcccacaagcaaaccacagtcacagtggtgattaccactgcacaggaaacataggctacacgctgttctcatccaagcctgtgaccatcactgtccaagtgcccagcatgggcagctcttcaccaatggggatcattgtggctgtggtcattgcgactgctgtagcagccattgttgctgctgtagtggccttgatctactgcaggaaaaagcggatttcagccaattccactgatcctgtgaaggctgcccaatttgagccacctggacgtcaaatgattgccatcagaaagagacaacttgaagaaaccaacaatgactatgaaacagctgacggcggctacatgactctgaaccccagggcacctactgacgatgataaaaacatctacctgactcttcctcccaacgaccatgtcaacagtaataactaaagagtaacgttatgccatgtggtcatactctcagcttgctgagtggatgacaaaaagaggggaattgttaaaggaaaatttaaatggagactggaaaaatcctgagcaaacaaaaccacctggcccttagaaatagctttaactttgcttaaactacaaacacaagcaaaacttcacggggtcatactacatacaagcataagcaaaacttaacttggatcatttctggtaaatgcttatgttagaaataagacaaccccagccaatcacaagcagcctactaacatataattaggtgactagggactttctaagaagatacctacccccaaaaaacaattatgtaattgaaaaccaaccgattgcctttattttgcttccacattttcccaataaatacttgcctgtgacattttgccactggaacactaaacttcatgaattgcgcctcagatttttcctttaacatcttttttttttttgacagagtctcaatctgttacccaggctggagtgcagtggtgctatcttggctcactgcaaacccgcctcccaggtttaagcgattctcatgcctcagcctcccagtagctgggattagaggcatgtgccatcatacccagctaatttttgtattttttattttttttttttagtagagacagggtttcgcaatgttggccaggccgatctcgaacttctggcctctagcgatctgcccgcctcggcctcccaaagtgctgggatgaccagcatcagccccaatgtccagcctctttaacatcttctttcctatgccctctctgtggatccctactgctggtttctgccttctccatgctgagaacaaaatcacctattcactgcttatgcagtcggaagctccagaagaacaaagagcccaattaccagaaccacattaagtctccattgttttgccttgggatttgagaagagaattagagaggtgaggatctggtatttcctggactaaattccccttggggaagacgaagggatgctgcagttccaaaagagaaggactcttccagagtcatctacctgagtcccaaagctccctgtcctgaaagccacagacaatatggtcccaaatgactgactgcaccttctgtgcctcagccgttcttgacatcaagaatcttctgttccacatccacacagccaatacaattagtcaaaccactgttattaacagatgtagcaacatgagaaacgcttatgttacaggttacatgagagcaatcatgtaagtctatatgacttcagaaatgttaaaatagactaacctctaacaacaaattaaaagtgattgtttcaaggtgatgcaattattgatgacctattttatttttctataatgatcatatattacctttgtaataaaacattataaccaaaaca

SEQ ID NO: 577 - DNA, 4118 bp, HOMO SAPIENS; identical to SEQ ID NO: 428

SEQ ID NO: 578 - DNA, 733 bp, HOMO SAPIENS
agacagacgctgggacccacgacgacagaaggcgccgatggccgcgcctgctgagccctgcgcggggcagggggtctggaaccagacagagcctgaacctgccgccaccagcctgctgagcctgtgcttcctgagaacagcaggggtctgggtaccccccatgtacctctgggtccttggtcccatctacctcctcttcatccaccaccatggccggggctacctccggatgtccccactcttcaaagccaagatggtagctgccatccctgggagcctggaaccaggcaatgttcgggggaggcaggggacaggctggaacctggtgaagtcttaaagtagactcctcctatcggggtgtagaagggaatctgttaatcaaacagagcaatattagaaaggctacagaggtcaactcagtggaacacggttctcccaaacagattttgtaattccgaaaatccacgcatgcgcaaacatacgcatacactcccatgttcctggacagtttatagctaccataacctggcattttccaaaacataccatgtagactcttggatacacaaggtaattttagagccacattaggatgaaccttttaaaaagttatgcatttatttttatgttcccccactggctgtattataggacaatttttatatgtgatatgtatttaccttagtgtgttaaataaacactggcattccaagtgtgaaaaaaaaaaaaaaaa

SEQ ID NO: 579 - DNA, 9260 bp, HOMO SAPIENS
attttctgaatggtcttgcttctttgtctatcttgtctgattttctcctgtctgaccttttcctggttaaaaatctgggggaaaatgacggactccaagccgatcaccaagagtaaatcagaagcaaacctcatcccgagccaggagccctttccagcctctgataactcaggggagacaccgcagagaaatggggagggccacactctgcccaagacacccagccaggccgagccagcctcccacaaaggccccaaagatgccggtcggcggagaaactccctaccaccctcccaccagaagcccccaagaaaccccctttcttccagtgacgcagcaccctccccagagcttcaagccaacgggactgggacacaaggtctggaggccacagataccaatggcctgtcctcctcagccaggccccagggccagcaagctggctccccctccaaagaagacaagaagcaggcaaacatcaagaggcagctgatgaccaacttcatcctgggctcttttgatgactactcctccgacgaggactctgttgctggctcatctcgtgagtctacccggaagggcagccgggccagcttgggggccctgtccctggaggcttatctgaccacaggtgaagctgagacccgcgtccccactatgaggccgagcatgtcgggactccacctggtgaagaggggacgggaacacaagaagctggacctgcacagagactttaccgtggcttctcccgctgagtttgtcacacgctttgggggggatcgggtcatcgagaaggtgcttattgccaacaacgggattgccgccgtgaagtgcatgcgctccatccgcaggtgggcctatgagatgttccgcaacgagcgggccatccggtttgttgtgatggtgacccccgaggaccttaaggccaacgcagagtacatcaagatggcggatcattacgtccccgtcccaggagggcccaataacaacaactatgccaacgtggagctgattgtggacattgccaagagaatccccgtgcaggcggtgtgggctggctggggccatgcttcagaaaaccctaaacttccggagctgctgtgcaagaatggagttgctttcttaggccctcccagtgaggccatgtgggccttaggagataagatcgcctccaccgttgtcgcccagacgctacaggtcccaaccctgccctggagtggaagcggcctgacagtggagtggacagaagatgatctgcagcagggaaaaagaatcagtgtcccagaagatgtttatgacaagggttgcgtgaaagacgtagatgagggcttggaggcagcagaaagaattggttttccattgatgatcaaagcttctgaaggtggcggagggaagggaatccggaaggctgagagtgcggaggacttcccgatccttttcagacaagtacagagtgagatcccaggctcgcccatctttctcatgaagctggcccagcacgcccgtcacctggaagttcagatcctcgctgaccagtatgggaatgctgtgtctctgtttggtcgcgactgctccatccagcggcggcatcagaagatcgttgaggaagcaccggccaccatcgccccgctggccatattcgagttcatggagcagtgtgccatccgcctggccaagaccgtgggctatgtgagtgcagggacagtggaatacctctatagtcaggatggcagcttccacttcttggagctgaatcctcgcttgcaggtggaacatccctgcacagaaatgattgctgatgttaatctgccggccgcccagctacagatcgccatgggcgtgccactgcaccggctgaaggatatccggcttctgtatggagagtcaccatggggagtgactcccatttcttttgaaaccccctcaaaccctcccctcgcccgaggccacgtcattgccgccagaatcaccagcgaaaacccagacgagggttttaagccgagctccgggactgtccaggaactgaatttccggagcagcaagaacgtgtggggttacttcagcgtggccgctactggaggcctgcacgagtttgcggattcccaatttgggcactgcttctcctggggagagaaccgggaagaggccatttcgaacatggtggtggctttgaaggaactgtccatccgaggcgactttaggactaccgtggaatacctcattaacctcctggagaccgagagcttccagaacaacgacatcgacaccgggtggttggactacctcattgctgagaaagtgcaggcggagaaaccggatatcatgcttggggtggtatgcggggccttgaacgtggccgatgcgatgttcagaacgtgcatgacagatttcttacactccctggaaaggggccaggtcctcccagcggattcactactgaacctcgtagatgtggaattaatttacggaggtgttaagtacattctcaaggtggcccggcagtctctgaccatgttcgttctcatcatgaatggctgccacatcgagattgatgcccaccggctgaatgatggggggctcctgctctcctacaatgggaacagctacaccacctacatgaaggaagaggttgacagttaccgaattaccatcggcaataagacgtgtgtgtttgagaaggagaacgatcctacagtcctgagatccccctcggctgggaagctgacacagtacacagtggaggatgggggccacgttgaggctgggagcagctacgctgagatggaggtgatgaagatgatcatgaccctgaacgttcaggaaagaggccgggtgaagtacatcaagcgtccaggtgccgtgctggaagcaggctgcgtggtggccaggctggagctcgatgacccttctaaagtccacccggctgaaccgttcacaggagaactccctgcccagcagacactgcccatcctcggagagaaactgcaccaggtcttccacagcgtcctggaaaacctcaccaacgtcatgagtggcttttgtctgccagagcccgtttttagcataaagctgaaggagtgggtgcagaagctcatgatgaccctccggcacccgtcactgccgctgctggagctgcaggagatcatgaccagcgtggcaggccgcatccccgcccctgtggagaagtctgtccgcagggtgatggcccagtatgccagcaacatcacctcggtgctgtgccagttccccagccagcagatagccaccatcctggactgccatgcagccaccctgcagcggaaggctgatcgagaggtcttcttcatcaacacccagagcatcgtgcagttggtccagagataccgcagcgggatccgcggctatatgaaaacagtggtgttggatctcctgagaagatacttgcgtgttgagcaccattttcagcaagcccactacgacaagtgtgtgataaacctcagggagcagttcaagccagacatgtcccaggtgctggactgcatcttctcccacgcacaggtggccaagaagaaccagctggtgatcatgttgatcgatgagctgtgtggcccagacccttccctgtcggacgagctgatctccatcctcaacgagctcactcagctgagcaaaagcgagcactgcaaagtggccctcagagcccggcagatcctgattgcctcccacctcccctcctacgagctgcggcataaccaggtggagtccattttcctgtctgccattgacatgtacggccaccagttctgccccgagaacctcaagaaattaatactttcggaaacaaccatcttcgacgtcctgcctactttcttctatcacgcaaacaaagtcgtgtgcatggcgtccttggaggtttacgtgcggaggggctacatcgcctatgagttaaacagcctgcagcaccggcagctcccggacggcacctgcgtggtagaattccagttcatgctgccgtcctcccacccaaaccggatgaccgtgcccatcagcatcaccaaccctgacctgctgaggcacagcacagagctcttcatggacagcggcttctccccactgtgccagcgcatgggagccatggtagccttcaggagattcgaggacttcaccagaaattttgatgaagtcatctcttgcttcgccaacgtgcccaaagacacccccctcttcagcgaggcccgcacctccctatactccgaggatgactgcaagagcctcagagaagagcccatccacattctgaatgtgtccatccagtgtgcagaccacctggaggatgaggcactggtgccgattttacggacattcgtacagtccaagaaaaatatccttgtggattatggactccgacgaatcacattcttgattgcccaagagaaagaatttcccaagtttttcacattcagagcaagagatgagtttgcagaagatcgcatttaccgtcacttggaacctgccctggccttccagctggaacttaaccggatgcgtaacttcgatctgaccgccgtgccctgtgccaaccacaagatgcacctttacctgggtgctgccaaggtgaaggaaggtgtggaagtgacggaccataggttcttcatccgcgccatcatcaggcactctgacctgatcacaaaggaagcctccttcgaatacctgcagaacgagggtgagcggctgctcctggaggccatggacgagctggaggtggcgttcaataacaccagcgtgcgcaccgactgcaaccacatcttcctcaacttcgtgcccactgtcatcatggaccccttcaagatcgaggagtccgtgcgctacatggttatgcgctacggcagccggctgtggaaactccgtgtgctacaggctgaggtcaagatcaacatccgccagaccaccaccggcagtgccgttcccatccgcctgttcatcaccaatgagtcgggctactacctggacatcagcctctacaaagaagtgactgactccagatctggaaatatcatgtttcactccttcggcaacaagcaagggccccagcacgggatgctgatcaatactccctacgtcaccaaggatctgctccaggccaagcgattccaggcccagaccctgggaaccacctacatctatgacttcccggaaatgttcaggcaggctctctttaaactgtggggctccccagacaagtatcccaaagacatcctgacatacactgaattagtgttggactctcagggccagctggtggagatgaaccgacttcctggtggaaatgaggtgggcatggtggccttcaaaatgaggtttaagacccaggagtacccggaaggacgggatgtgatcgtcatcggcaatgacatcacctttcgcattggatcctttggccctggagaggaccttctgtacctgcgggcatccgagatggcccgggcagagggcattcccaaaatttacgtggcagccaacagtggcgcccgtattggcatggcagaggagatcaaacacatgttccacgtggcttgggtggacccagaagacccccacaaaggatttaaatacctgtacctgactccccaagactacaccagaatcagctccctgaactccgtccactgtaaacacatcgaggaaggaggagagtccagatacatgatcacggatatcatcgggaaggatgatggcttgggcgtggagaatctgaggggctcaggcatgattgctggggagtcctctctggcttacgaagagatcgtcaccattagcttggtgacctgccgagccattgggattggggcctacttggtgaggctgggccagcgagtgatccaggtggagaattcccacatcatcctcacaggagcaagtgctctcaacaaggtcctgggaagagaggtctacacatccaacaaccagctgggtggcgttcagatcatgcattacaatggtgtctcccacatcaccgtgccagatgactttgagggggtttataccatcctggagtggctgtcctatatgccaaaggataatcacagccctgtccctatcatcacacccactgaccccattgacagagaaattgaattcctcccatccagagctccctacgacccccggtggatgcttgcaggaaggcctcacccaactctgaagggaacgtggcagagcggattctttgaccacggcagtttcaaggaaatcatggcaccctgggcgcagaccgtggtgacaggacgagcaaggcttggggggattcccgtgggagtgattgctgtggagacacggactgtggaggtggcagtccctgcagaccctgccaacctggattctgaggccaagataattcagcaggcaggacaggtgtggttcccagactcagcctacaaaaccgcccaggccgtcaaggacttcaaccgggagaagttgcccctgatgatctttgccaactggagggggttctccggtggcatgaaagacatgtatgaccaggtgctgaagtttggagcctacatcgtggacggccttagacaatacaaacagcccatcctgatctatatcccgccctatgcggagctccggggaggctcctgggtggtcatagatgccaccatcaacccgctgtgcatagaaatgtatgcagacaaagagagcaggggtggtgttctggaaccagaggggacagtggagattaagttccgaaagaaagatctgataaagtccatgagaaggatcgatccagcttacaagaagctcatggaacagctaggggaacctgatctctccgacaaggaccgaaaggacctggagggccggctaaaggctcgcgaggacctgctgctccccatctaccaccaggtggcggtgcagttcgccgacttccatgacacacccggccggatgctggagaagggcgtcatatctgacatcctggagtggaagaccgcacgcaccttcctgtattggcgtctgcgccgcctcctcctggaggaccaggtcaagcaggagatcctgcaggccagcggggagctgagtcacgtgcatatccagtccatgctgcgtcgctggttcgtggagacggagggggctgtcaaggcctacttgtgggacaacaaccaggtggttgtgcagtggctggaacagcactggcaggcaggggatggcccgcgctccaccatccgtgagaacatcacgtacctgaagcacgactctgtcctcaagaccatccgaggcctggttgaagaaaaccccgaggtggccgtggactgtgtgatatacctgagccagcacatcagcccagctgagcgggcgcaggtcgttcacctgctgtctaccatggacagcccggcctccacctgaccgtggcccgcccagccactcccgggaccacggcaaaaggaaccacccagacccaccacccgtacaccctcagcagaccctgaagacttgcttttaaacaaagaaaatcctgggcacttctgcagggctgctggttccgagctgacacccgtcttaacaaaaggcccaggagtgcctcttccaaacaaaaacagcctcctctccatagctgggaagtttattttgttttgtctctgaagacagcagttttattgcatcactaaatctaatcaagctaaaacatccctgtttccttttgcaaaacagtgcctggcatgtgggatccaggcgttctttaggatccttggataccacatcgtgaaatcttttatttttttactctgagaccagcaccagatgtaagtaagcatctcatatatttcagccaaataaatgggccaagggaaaaaaatatatatatatagacaggactagagaaaacctatttttgtaatgatgtttctttggatactgtctagtcacccagaaaaatgtatggatgaatttttttttttttttttgagacaaagtctcactgtgtcatgcaggctggagtgcagtggcatgatctcactgcaacctccatctcctgtctcagcctcctagataactgggattacaggtgcccaccaccatgcccggctaatttttgtatttttggtagagacagagtttcaccaggttggtcaggctggtctcaaactcttgacttcaggtaatccacccaccttggcctcccaaagtgctgggattacaggcatgagccaccatcttcagccagatgatttttttattgagagagtgaaatgctattttgttccccaaatggcgctagtgaatcactaggagggtcccactgataggccatgtttagcactggttgccagggattctctttttgagagagggaaagcaaaatgaatggaagtacccagctggaggtttcagggcttctggaggatgctctcgcatagctcgaggtcctctgcccacctcttctctccaaggaaaatgaggactgccccttccccctgcaggattggcccccagcctgcgcatgcaccctcctcttgcccaagtggggagcacagaggcggagaggaatcccttaccacacccacggcccagcttgctcacgagtgtcacctctgtgacggtcaccactgctcccttggagggccacttgagttactgttgcttcctcgcctgctggcttgatgagcaccgatggtgggatctgaccccgaggggcagagctgtcggtgactgaggactggactgtggtgaccatgccgatttgctcagggagaacgttgcaatgcacccagcagctcctggctctgcaggcggcacagcctggggccctgtgatcctctggtttcttccattggggcggagtcggggatggagggagctggccacaacccactgctctgatgggtggtttgtccaaggatgctgaatgtaatgcctggtcaatgtggaagcccatgaggttgcccagggaagcctccaaaagctgggatgcttgagggtatccaagttgaaaaagacaaaatctgaccatcagccagtgacagtcctggcaaatgaaggtggggcggggcagtgaggggtgggagaaggtgaatgattcattattccaccccgaggtttgctggggtgaggggaagaatcgatgctgctttgggaactgaaggtttttctgttgggaaggccctcttggttttggagagaaagacaagttatgagtagctgctaccctggaacggtgggcagagagcctactaggaaatgtgcagaataaactattttttgaaggaaaaaaaaaaaaa

SEQ ID NO: 580 - DNA, 3417 bp, HOMO SAPIENS; identical to SEQ ID NO: 470

SEQ ID NO: 581 - DNA, 739 bp, HOMO SAPIENS
cgtggcgcagcgactcggaggttcgcctccagcttgcgcatcatctgcggccgggtcccgatgagcctcctgttgcctccgctggcgctgctgctgcttctcgcggcgcttgtggccccagccacagccgccactgcctaccggccggactggaaccgtctgagcggcctaacccgcgcccgggtagagacctgcgggggatgacagctgaaccgcctaaaggaggtgaaggctttcgtcacgcaggacattccattctatcacaacctggtgatgaaacacctccctggggccgaccctgagctcgtgctgctgggccgccgctacgaggaactagagcgcatcccactcagtgaaatgacccgcgaagagatcaatgcgctagtgcaggagctcggcttctaccgcaaggcggcgcccgacgcgcaggtgccccccgagtacgtgtgggcgcccgcgaagcccccagaggaaacttcggaccacgctgacctgtaggtccgggggcgcggcggagctgggacctacctgcctgagtcctggagacagaatgaagcgctcagcatcccgggaatacttctcttgctgagagccgatgcccgtccccgggccagcagggatggggttggggaggttctcccaaccccactttcttccttccccagctccactaaattccctcctgccttaaaaaaaaaaaaaaaaaaaaaaaaaaaaaaaaaaaaaaaaaaaaaaaaaa

SEQ ID NO: 582 - DNA, 434 bp, HOMO SAPIENS
gtgatgagcacacccagagtttgtcttcatatgagccataggttaaaatcaagcctacattttagatgaatgattattgtatgtatgctgatggaaaataagaatttatcattttaaaatatttaatcttttcatataattaggtgataattattgtagaggcagtgtagtagacatttgattaatttattaatttatgctaatgcagaatttttgccagttatgtaagtacaccaccatttgacctgtattcccccttgtgtccctgctccactcttgtgttcctaaccctgatcctgaccctaggtcaaccagattctctttctcaggaatgttaaatctgtatagcgagacttagcagggtaaatggtgacaggagctgtatagtccaacagtactacccttgaaaaactgtctgtgaattactacttctg

SEQ ID NO: 583 - DNA, 1220 bp, HOMO SAPIENS
gttacattggagaactggagtggtctggagttccacggtgtagtggaccagaggccacctctcctgggcttctcagtgtctcgccggcggggttcggcctgagctggattgacatagcccttggcggatttaaacaacctaaacattaagcagtacagctgcctcaaacctttgggattttcagaatgactgacactgccgaagctgttccaaagtttgaagagatgtttgctagtagattcacagaaaatgacaaggagtatcaggaatacctgaaacgccctcctgagtctcctccaattgttgaggaatggaatagcagagctggtgggaaccaaagaaacagaggcaatcggttgcaagacaacagacagttcagaggcagggacaacagatgggggtggccaagtgacaatcgatccaatcagtggcatggacgatcctggggtaacaactacccgcaacacagacaagaaccttactatccccagcaatatggacattatggttacaaccagcggcctccttacggttactactgatagaaatgttggcagcttttagtaaaagcatttactctgttaccatgagaaaagtttgggtgtcttctgttggtcatagttttacatctgattttacagaatggattattgattttttggaagttgagactttaaaaaaaatagatcttacttgcgaaatgcgatggttgctgggaatacctgaaactgtggattatattgcttgacttctacctcagaatcttctttgtttcatgacttaatagtgctttaagtttggtatattatttgacctctaggaattctttgttttacacagaaataaaaattttaaaatagaaaatgcttttactttgtaaggtaagagagtatccatatgcttagatgtgctcgtttctaaaattctagaggttgatataatcagctcatgaatgcacagctatgctttttgtgatagattgtacataacatcagcagttgaaaggtaaaacaattgcttttttttttttttgcatttgttaagtgactatggtactttgtgattccttaatctatagatgagtcagctccacacttgagtctctttttagagggaaatcagtaataaagctgtaaaataaggaagaaaaaaaaaaaaaaaaaaaaaaaaaaaaaaaaaaaaaaaaaaaaaaaaaaaaaaaaaaaaaaaaaaaaaaaaaa

SEQ ID NO: 584 - DNA, 457 bp, HOMO SAPIENS
  misc_feature (117)..(117): n is a, c, g, or t
  misc_feature (156)..(156): n is a, c, g, or t
acagctgactgtatacagggttactgttggggttattgtggggcagtgtaaggtgatgaagatctcactgacttagtgttgatggcttgagtttgagtcctggtattaccactcgtntgttgataatcttaggtaaataaactggcattgctaagnccccagaaaaatgtatttagtggaacagatgaaatatgattcagtggttaggaagttaacttctgaagacagacaaacctaagtttgaatcatggttcaccccttagtggctttgtggccttgggcaagtttctttaattttcttatctatactgtgaacagtacttacatcataggtttggtctgaagattctgtgagataatgcatatcaagtggttagcactttgccaggcacattgttaagtgcccaataaatgtgggccaaatgtgatagctcacccctgtaatgccagagctttg

SEQ ID NO: 585 - DNA, 290 bp, HOMO SAPIENS
gtttactgattggtgcttctaaggactggtttgcttgtacctgagacacgttgcctactatcagtttggtcctgcctgcactctggagaagccacaagaatcttgacttttgctcatacacgacactgttgcaatgctgctcctctttggaagctctttggacaattataaatactcttttttttgcaactgccctgtatacaaatatatttacaaatacatataatcccacgtgctacttcaaagttcttacctggcactataggaccaactgctattgaatcttcaag

SEQ ID NO: 586 - DNA, 5458 bp, HOMO SAPIENS
aagcgtcggacgcggcccggcgccgagccatggagcctgagccagtggaggactgtgtgcagagcactctcgccgccctgtatccaccctttgaggcaacagcccccaccctgttgggccaggtgttccaggtggtggagaggacttatcgggaggacgcactgaggtacacgctggacttcctggtaccagccaagcacctgcttgccaaggtccagcaggaagcctgtgcccaatacagtggattcctcttcttccatgaggggtggccgctctgcctgcatgaacaggtggtggtgcagctagcagccctaccctggcaactgctgcgcccaggagacttctatctgcaggtggtgccctcagctgcccaagcaccccgactagcactcaagtgtctggcccctgggggtgggcgggtgcaggaggttcctgtgcccaatgaggcttgtgcctacctattcacacctgagtggctacaaggcatcaacaaggaccggccaacaggtcgcctcagtacctgcctactgtctgcgccctctgggattcagcggctgccctgggctgagctcatctgtccacgatttgtgcacaaagagggcctcatggttggacatcagccaagtacactgcccccagaactgccctctggacctccagggcttcccagccctccacttcctgaggaggcgctgggtacccggagtcctggggatgggcacaatgcccctgtggaaggacctgagggcgagtatgtggagctgttagaggtgacgctgcccgtgagggggagcccaacagatgctgaaggctccccaggcctctccagagtccggacggtacccacccgcaagggcgctggagggaagggccgccaccggagacaccgggcgtggatgcaccagaagggcctggggcctcggggccaggatggagcacgcccacccggcgaggggagcagcaccggagcctcccctgagtctcccccaggagctgaggctgtcccagaggcagcagtcttggaggtgtctgagcccccagcagaggctgtgggagaagcctccggatcttgccccctgaggccaggggagcttagaggaggaggaggaggaggccagggggctgaaggaccacctggtacccctcggagaacaggcaaaggaaacagaagaaagaagcgagctgcaggtcgaggggctcttagccgaggaggggacagtgccccactgagccctggggacaaggaagatgccagccaccaagaagcccttggcaatctgccctcaccaagtgagcacaagcttccagaatgccacctggttaaggaggaatatgaaggctcagggaagccagaatctgagccaaaagagctcaaaacagcaggcgagaaagagcctcagctctctgaagcctgtgggcctacagaagagggggccggagagagagagctggaggggccaggcctgctgtgtatggcaggacacacaggcccagaaggccccctgtctgacactccaacacctccgctggagactgtgcaggaaggaaaaggggacaacattccagaagaggcccttgcagtctccgtctctgatcaccctgatgtagcttgggacttgatggcatctggattcctcatcctgacgggaggggtggaccagagtgggcgagctctgctgaccattaccccaccgtgccctcctgaggagcccccaccctcccgagacacgctgaacacaactcttcattacctccactcactgctcaggcctgatctacagacactggggctgtccgtcctgctggaccttcgtcaggcacctccactgcctccagcactcattcctgccttgagccaacttcaggactcaggagatcctccccttgttcagcggctgctgattctcattcatgatgaccttccaactgaactctgtggatttcagggtgctgaggtgctgtcagagaatgatctgaaaagagtggccaagccagaggagctgcagtgggagttaggaggtcacagggacccctctcccagtcactgggtagagatacaccaggaagtggtaaggctatgtcgcctgtgccaaggtgtgctgggctcggtacggcaggccattgaggagctggagggagcagcagagccagaggaagaggaggcagtgggaatgcccaagccactgcagaaggtgctggcagatccccggctgacggcactgcagagggatgggggggccatcctgatgaggctgcgctccactcccagcagcaagctggagggccaaggcccagctacactgtatcaggaagtggacgaggccattcaccagcttgtgcgcctctccaacctgcacgtgcagcagcaagagcagcggcagtgcctgcggcgactccagcaggtgttgcagtggctctcgggcccaggggaggagcagctggcaagctttgctatgcctggggacaccttgtctgccctgcaggagacagagctgcgattccgtgctttcagcgctgaggtccaggagcgcctggcccaggcacgggaggccctggctctggaggagaatgccacctcccagaaggtgctggatatctttgaacagcggctggagcaggttgagagtggcctccatcgggccctgcggctacagcgcttcttccagcaggcacatgaatgggtggatgagggctttgctcggctggcaggagctgggccgggtcgggaggctgtgctggctgcactggccctgcggcgggccccagagcccagtgccggcaccttccaggagatgcgggccctggccctggacctgggcagcccagcagccctgcgagaatggggccgctgccaggcccgctgccaagagctagagaggaggatccagcaacacgtgggagaggaggcgagcccacggggctaccgacgacggcgggcagacggtgccagcagtggaggggcccagtgggggccccgcagcccctcgcccagcctcagctccttgctgctccccagcagccctgggccacggccagccccatcccattgctccctggccccatgtggagaggactatgaggaagagggccctgagctggctccagaagcagagggcaggcccccaagagctgtgctgatccgaggcctggaggtcaccagcactgaggtggtagacaggacgtgctcaccacgggaacacgtgctgctgggccgggctagggggccagacggaccctggggagtaggcaccccccggatggagcgcaagcgaagcatcagtgcccagcagcggctggtgtctgagctgattgcctgtgaacaagattacgtggccaccttgagtgagccagtgccaccccctgggcctgagctgacgcctgaacttcggggcacctgggctgctgccctgagtgcccgggaaaggcttcgcagcttccaccggacacactttctgcgggagcttcagggctgcgccacccaccccctacgcattggggcctgcttccttcgccacggggaccagttcagcctttatgcacagtacgtgaagcaccgacacaaactggagaatggtctggctgcgctcagtcccttaagcaagggctccatggaggctggcccttacctgccccgagccctgcagcagcctctggaacagctgactcggtatgggcggctcctggaggagctcctgagggaagctgggcctgagctcagttctgagtgccgggcccttggggctgctgtacagctgctccgggaacaagaggcccgtggcagagacctgctggccgtggaggcggtgcgtggctgtgagatagatctgaaggagcagggacagctcttgcatcgagaccccttcactgtcatctgtggccgaaagaagtgccttcgccatgtctttctcttcgagcatctcctcctgttcagcaagctcaagggccctgaaggggggtcagagatgtttgtttacaagcaggcctttaagactgctgatatggggctgacagaaaacatcggggacagcggactctgctttgagttgtggtttcggcggcggcgtgcacgagaggcatacactctgcaggcaacctcaccagagatcaaactcaagtggacaagttctattgcccagctgctgtggagacaggcagcccacaacaaggagctccgagtgcagcagatggtgtccatgggcattgggaataaacccttcctggacatcaaagcccttggggagcggacgctgagtgccctgctcactggaagagccgcccgcacccgggcctccgtggccgtgtcatcctttgagcatgccggcccctcccttcccggcctttcgccgggagcctgctccctgcctgcccgcgtcgaggaggaggcctgggatctggacgtcaagcaaatttccctggccccagaaacacttgactcttctggagatgtgtccccaggaccaagaaacagccccagcctgcaacccccccaccctgggagcagcactcccaccctggccagtcgagggatcttagggctatcccgacagagtcatgctcgagccctgagtgaccccaccacgcctctgtgacctggagaagatccagaacttgcgtgcagcttctcctctcagcacactttgggctgggatggcagtggggcataatggagccctgggcgatcgctgaatttcttccctctgcttcctggacacagaggaggtctaacgaccagagtattgccctgccaccactatctctagtctccctagcttggtgccttctcctgcaggagtcagagcagccacattgcttgccttcataccctggaggtggggaagttatccctcttccggtgctttcccatcctgggccactgtatccaggacatcactcccatgccagccctccctggcagcccatgttctcctcttttctcaccccctgactttccctgagaagaatcatctctgccaggtcaactggagtccctggtgactccattctgaggtgtcacaagcaatgaagctatgcaaacaataggagggtgtgacaggggaaccgtagactttatatatgtaattactgttattataatactattgttatattaaatgtatttactcacactttgcctctaaggagctagagtagtcctctggattaaggtgataaataacttgagcactttccctcaaccagcccttaactagaacacagaaaataaaaccaagactggaaggtcccctctacccctcccaggcccagagctagctgactgtgtatgagcctgggagaatgtgtctcctccacagtggctcccagaggttccacacactctctgaagctccttctcccacactgcacctactccttgaggctgaactggtcacagacaaactgggatccagcacagtccagcagttctcaaaatgaggtcctcaggccacagtgcgtgaga

SEQ ID NO: 587 - DNA, 8929 bp, HOMO SAPIENS
atctgctcccgagtccccagccccgtgctgataggtgcagcccctggagtcgtggctgtgggcataggtgccagggaggggaggcccgggtcgaaggcataggcagaattggagccctgggttgccaaagcgtcgcagctaagaagccggagcccaggctagtaccggcggggcggggcggggcggggccgggagcgagcatctccatcctcagtttcctccacttgcggcaacgccacagctcggtacagttcggacctccacgccgcagcgaaagacttctgtcctccaggcaccttcactaacccggtgcggagcacttggcgacgcctccctgcccatctcatatctctcggctcatcgctgctctgggcaccagctgcctcttggctggcgctgctgtcacacggtggactgttctggccttactgagctgccgtttggggacatcagattcagcaagaagaattgtatagaaatgtaaaaaacatttatgtgtgcttcacatgtggcatgaaaaaaatgaggacctctggtcaaaattgcctgagttcagaatttcatgctggaaggaaagttagacgtaacttctaatttctagttccagtaagcatctcttcttggaaaatttccaaaaaagagtcctgctctgttgcccaggctggagtacattggtgtgatgatcatggttcactgcagcctcgacctcccaggctcaagcaattctcctacctcagcctcctgagtaactgggactataggatttctttgaagaaaaatgtgcttcttgaatcaactgcagtctctcctctgcataagagctcttaagggtactagcaggatagaagcaaatgaaactgaaagctcatctgcagctcagaaaagcaaagacatggaattttaaagagtgaaggtagcatggtgtcggccatgggtgaacaagacacagccagacaatgtggaccaatttcttcaaactacggcttttctgctgtctgcttgcagtgttgatggtggtggtgctggtcatcaatgttactcaggtagagtacttggaccatgagactgtttcagccactttcatcgacagcagtggacagtttgtttcctcccaggtgacaggaattagccgaaatccctactgtggctatgatcagcagaccctgtccagccaggagcgcatggaggaggactccttgctggctgccttgcaccggcaggttcctgatgtgggcccagtcccctttgtgaagagcactgacccttcttccagctactttgtcatcttgaactctgctgccttctttaaggtgggaagccagcttgaggtgctggttcatgtgcaggattttcaaagaaagcccaagaagtatggtggagactacctgcaggccagaattcactccctcaagctgcaggctggggctgtgggcagggtggtggattaccagaatgggttttacaaggttttctttactttgctatggccaggcaaagttaaagtatccgtatctctggtccaccccagtgaagggatcagagttcttcagcgcttacaggaagataaaccagacagggtctatttcaagagtctcttccgttcaggaagaatttctgaaactactgagtgcaacgtgtgtcttcctgggaatctgcccctgtgtaactttacagacctctacactggggagccctggttctgcttcaaaccaaagaagctcccttgcagcagcagaattacccatttcaaaggtggatacctgaaaggtctcctaaccgctgcagagagtgctttcttccagagtggtgtcaatatcaaaatgccagtcaactccagtggacctgattgggtaactgtgattcccaggagaataaaagaaactaacagtctagaactatctcaaggctcaggaacttttccttctgggtattattataaagaccagtggaggcccagaaagtttaagatgcgtcagtttaatgaccctgacaacattacagagtgcttacaaagaaaagtggtgcatttatttggtgactcaacaatcaggcaatggtttgaataccttactacatttgttccagatttagtggagtttaacttgggtagtcccaagaatgtgggtcccttccttgcagtggaccagaagcacaacatcctgctcaaataccgctgccatggtccacccatccgcttcacgactgtctttagcaatgagctccattatgtggcgaatgagctgaatggcattgtgggagggaagaacacagtggttgccatagctgtatggtctcacttcagcaccttccctttggaagtgtacatccggcggctcaggaacatccgtcgagcagtggttcggctcctcgatcgaagcccaaagaccgtggtggtcatccggacggccaacgcccaagagctgggacctgaggtgagccttttcaacagcgactggtacaactttcagctggacaccatccttcggaggatgttctcaggggttggagtatatctcgtcgatgcctgggagatgaccctggcccattatctaccgcacaagctgcatccagatgaagttattgtgaagaaccagctggacatgttcttgtcctttgtgtgccccttggaaacctagcctgtcttggaagggactggaggaatcatattcaatgaccttctcaattgacctgagttacagaaagtggccccagtgagagatgactgcccttaataagtataaaatttcaaaaagatctggacttaatatgatgacttataaggagcttagaaaatgcaggttacatttatatctacctataggattttatccaatgttgacttagccatggtagaactcttaactgcatctacacactatattgctcttgtaaccaaagatgctaatgagtgtatttgaattagcttctcctaggaggggtgactactttgctaaagagtatgaaaaatgttttgatggaagggacaagtttggttggtagtagagtgtttgtagcttatctggtaaaggaaattgagtgcatctgcatgcatagcacaagtaatccatcttctggcggttaactagagaaagcttatagtcagaggctcttgtgaatgcactgaagactgctgtgtctcaggagtttctcttgatgatctaccttttctgaattacttgaaaaggccaatgtgcttggttcgagttttttagtgaatatttacaatttcctgcttttatctagaaaagaagcaaaagggaaatatgaaagcagtatatataaaatctgtgctttggaattgatatttgcatttggtgattgttttttatttgattcagctaaattttatgtgttgaatacttactctagaataactacttttggaactggaagggggaaatctgtaaatggaaatttatttttatgttctgaaatttgagggtttaggaattgacttttgtgtaaagaatgctacggtattataaagctgtggaagttttttccactagtttcaggtgtttttttttttgttgttgttgttgttattttgaactacttaccaaaattagaagttaaaatctaattagaaattaataagatactaaaattcatgacagttttttgtttgtttgtttgtttgttttttggtatttcttgatttgggcataaaaggcacacccattctctcatgcttggaagaagctgctattcctactggctatctaagaagaatggaattattaattttatttgacttattaattttaaacgagtttaatttgggatcatttagtaagtactcttttctttttgagctgtgatagattatagtctagtttaagttgctcctaagtagacagatgaagaaactagggaggctttagagaggaagacagatgcttgaagtatgaacaatatatacccttagaagaatgggtcaaataatttgggtttttaatttaaaataggagggccccagatcttactttcctgtccttgaggaacaccttcaagtttttaaagtattttagggggaaagaagatttttaattgtttctgagcctaatgaggtaataaaatatattaaaatagtttaattttaatggtccttacgctttacagtacctaaggatcacttgtagtatctgacaaaaatgcagaattaaagagtcatggcagggtgtggtagctcaagcctgtaatcccagcactttgggaggccaggcaggaggattgcttgaggccaggagtttgagaccagcctgggcaacatagtaagacctcatctctacaaaaaataaaaaattatccaggtgtgggccgacagtcccagctactagggaggctaaggcagggtgattgattgagcccagtagtttgaggctgcagtgagttatgattgcgccactacactcccacttgggcaacagacaagagatcttatctctaaaaaatttttgttaaataataaaagaattaaggccagggatgttggctcacatctgtaatcccagcagggattatagtctcgggaggctgaggtgggcggattgcttgagcccggaaggtcaagaccagcctgggtgccatggtgaaaccccatctctacaaaaaaatacaaaaactagctgggtgtggtggcaccacctgtagtccccgctacttaggaggctgaggtgggaggattgcttgagcccaggaggcagaaggttgcagaggttgcagtgagccttgattgtgccactgtactccagtctgggcaacagggcaagaccctgtctctaaaaaaaaaaaaaaaaaaaaaagagggaccatgatgcctctgggatttatgaaaccaacctttgtggcgagtgctcagtgattctgatgcaatggtggtattccacactgtgagaaacactaagagaagaggtaagatagaatgagggaataaacatggcttgtttattattttgggggatttaccaataactggtttaattctgttcatgatccaatagtattggtgatattagctccattttatagatgaggaactcatgtttagatctgaaataaggtatgtgagagtccatatctcttttcagctaaacttgtgagactttcgtaaagaagcgtttgtatttatttatttgtttttgagacagggtcttgctcttttgcccaggctggagtgcagtggcatgatatggctcactgcagccttgacttcctgggctcaagggatccttctgcctcagcctcctgagtagctgggactacaggtatgtaccaccatgcccagctaatttttgtatctttttgtagagactacattttgccatgttgtccaggctggtcttaaactcctgagctcaagcatctgcccacctcagcttcccaaagtgctgggattacaggtgtgagccactgtgcccagctgagagtttttcttgtcgtgaaagaacttgacatttcctcaaggatttataaaggaggctgaggagtaattttcccaggagaattttaaaaagaaagcgggcattgctcctccagtggtttggaatgatgccacttgattgtgcaaatgatttcttatgatcttgtctggttttctgttattttttgatttggtgacatagctctcaaagatttggtgacacagcttcttgagtcactttcatctctcttaaaaaaattttttttttaacaacttttaagttcaggggtacatgtgccagtttgtttcataggtaaacttacgtcatgggggtttgttgtatagatgatttcatcacccaggtgttaagcctagtacccattagtaatttttcctgatcctctccctcctcctaccctccaccctccaatagaccccagtgtgtgttgttgccctttatgtgtccatgtgttctcatcatttagctctcacttatcagtgagaacaactttcatcccacatctaatttgtctttcttcactctggtgtggaaattttgatagagattccaatatcacttaaacgtttcccagaatatttagatagaataatttagtttcttctgaaaagtttattttaggctagtgccacatggttgtgaatattagcatggtagccaaataatagtttgtttaaatgtatatttcccaatataaatataaggggcatcataatttttaaaaactataaaatctagaagaaaaatctatggataaaatccataattctatcatctgaatgcaatgaacattagcatttaggtatattttcttgcaggttttttaaccatatacttatagagaatatgtaatttgggtctgtgttttttacatataaatatttttctatgttaaatagtcttcataagttaattataaagatctgcttaatagttctgctactgcagttttcattattagataagttggtcattatagttggacatttaggtttacaatattaaagcagtggtttatatcaatttcagtggtttaaaatatgaatttctattttggaatgaaagtattaatttaatgtagtgaatctcatattccagaactgagatgattgatttgatgctatttgtgacagacagaacccataataaagcctttctatgcaagttacattttatagaattatcctactaaaagtaacctttcttcagcgaatgcaaaacagacctttggtgttccagtatgattcattttgccattctgaacaactatcattttaattaagaccatttaactgacacttcctggattcagttattaagtttcagattgaaacttgatccagtttaataactgaatccagtttcacatttatcaatctgaaaacttagtttgcagattggtaaatcagggtacttgacaagaataaatatggtacgcctttatatattcatgtgttacatgccagaaatgagtctgtttctggaccctgttcaaggaaatagtgatgactgagagaggtacagggaaataaacacccaagggaaacaacagaaataagcctccccaactttctaaaaaactgctcagcattatctctgtggattctgggtaaattcagctttttaacatcagctagtcactaatgccagaaattccacttcaagtgtatttattttcttgtgttaagcattattctacctggtttatgtctacaatgtagtattagtgtacttaggattcttgacacctcagtgtgcaataaataaaattttgaagttgttgtttttcatttgaaggtgagaccacagcccctgagtgctaaggggacctgggaatcctaggggaatggaggtggtggacgataagaggatggttgagggcaggagtttaaaggacacagaagctaggagagcagaaaatgtactccaccaccttctgtctaacttgtctcttaaaagtgcttttacattttaactttttaaaaaaatgtgggccgggcatagtggctcatgcctgtaatcccagcactttgggaggccgaggtgggcggatcacctgaggtcaagagttcaagaccagcctgaccaatatgatgaaaccccatctctactaaaaatacaaaaatagccaggtgtggtggcacatgcctgtcatcccagctactcaggaggctgaggtgggagaatcgcttgaacccgggaggtggaggttgcagtgagccgagatcatgccattgcactctagcctgggcaacgagagtgaaactctgtctcaataaataaataaataaataaaaaataaaaaagtgtgaacttaaatatatttatatgtgtgtacatatattttcttttttaatattctggttaaatgagaggccatcgggcctctttttaagagtctaatgatgtgtatatctaatgcccattccagctggattgtaacactgcttggggaagataacttaaaaaaaagtagtaccgagattacagcagctagtgtcctaaatggaaaagaagtgaaactaaatgtcataggagaaatcctttcagttttgtgcagtggttcatttgctgttaaatctaccccattaccattccccttactccttgaaaataaagtgatcttcatgttacaggaccattgctttatttatgtcacagatttcttgtcctttaattagtcagtgaaggcacatgattgcgatactactttttgattgccgtattgtaaaagctatatggtaaaaggtaactccctccacccgcccactgcaccctcacgtttaggggccacacagaaaaagcgaaataagatgaggtgaatctaatgagaaggcaactctaatgcccatcaggagattcactaggacattttaaaaggacgtctttaaggaaaaagttttgtttgtagatgttgcctctgattcctccctgcggctccagtccaggtcttggagccggccctcgaggggaatgtccgggactcgggtcggtacctttttggtctgggaatttccagtgtgcagaaaaaaaatccacaaatctaggcctcgctgccccctccctgcctcctctggccctcctcagtgcccacgcaacccggttcgaaagagaggatgaccgtattctgcattttagaaaacaggctcttagcttcccccgcccccgtcctcactagagtggagaactgaaagcgaacgctataaagggcgccagtgagaggggctggcctcctcttgccacgaggtcagacggcgagttcttagagaaaaaggctgcttagctgctgcttatcatgtaacctcaaaaggaaactgatcgtctttctcatgctgtcacgtacttgggttattatcgctgattacagctggaaacaattgatttgctcttacgtatttgtgtgacttgactcttcaaacacaaaggtatatttttattatctgatattttattaaaatatcttaaatggtaaaaaaaaaaaaaaaaaa

SEQ ID NO: 588 - DNA, 519 bp, HOMO SAPIENS
  misc_feature (201)..(201): n is a, c, g, or t
  misc_feature (204)..(204): n is a, c, g, or t
  misc_feature (249)..(249): n is a, c, g, or t
ccacccaatgcacagtcaagccttttgttcttctaagcactttcccaccaatgtgtggtaagcagttgtgtcagttggttcccattaagcccttgggttgggaagggccaagcatggggagtcaaggttgaaaccaaaagcctggttgtgattagatggattgcagcatgcttgatttttttcattgaactggtcattccngcnagaggggtgttagaactgacctggcttcttggcaagtgttcagcngagactacttattggccctgagcacagcccaaacacctgcttagtcctgaaaccctgacctgagttgtggagatggaggagacctggaggaaatactcattccattggagaggccttgtctcttctgccttggaagctgccccagttagatgaggagacagaattacgtactcaagagagtaatttgcaagaagcacagctgtgatttcattttccaggcatccttagcctatgtctctagacagtggtcccctcaagggcagtactgag

SEQ ID NO: 589 - DNA, 266 bp, HOMO SAPIENS
gaccatggagaattcaaagaccagcaacaggcttcaaaagccttctatgaatagggcatgtaaggatttgctgggggcaagggtgggtttgagagctggagatggagatgaaattagtgaacaccatgcctctctcttgtactaaagaggccgcagggaagacaaagctcagttgtattcaacaaaggccactcaggtagcaccataaaggaagagctgtaacacggacacgggagtagtggaatcagtcaagagggaatttcaaa

SEQ ID NO: 590 - DNA, 3985 bp, HOMO SAPIENS
cgcgtcctggcaggaccgggcggcggcggcggcggggccggcggcggccagggacccgggcttaggctcggccaggccggctgaggggcgcgggcggccagcgggcggcggacgccgtcatgaacgcggcggtggtgaggcggacgcaggaggcgctggggaaagtgattcggaggccgccgctgaccgagaagctgctgagcaagcccccgttccgctacctgcacgacatcatcacggaggtgattagaatgactggtttcatgaagggcctctacacagacgccgagatgaagtctgataatgtgaaggataaagatgcaaaaattagcttcctacaaaaggccatagacgtggttgtaatggtgtcgggagagccactgttggccaaaccagcccgaatcgtggcggggcatgagcctgaaagaacaaacgagctgctccagataattggaaaatgctgtctcaacaagctctctagtgacgatgcggtgcggagggttttagctggagagaagggagaagtgaaaggccgggcctcactgacctcaagatctcaggaattggataataagaatgtgcgagaagaagagtccagagttcacaaaaatacagaggatagaggagacgctgaaataaaagagagaagtacaagcagagatcgaaaacagaaggaagaattgaaagaagaccgcaagccaagagaaaaggacaaggacaaggagaaggccaaggagaatggcggaaacagacacagagaaggggagagagagagagccaaagcccgggccaggccagacaacgagcgacagaaagacagaggcaacagggagcgggacagagactccgagcgcaagaaggagacagagagaaagagtgagggggggaaagagaaggagagactgagagacagggaccgagagcgcgaccgggacaaagggaaggacagggacagacggagagtgaaaaacggggagcactcctgggacctggacagggagaagaacagagagcatgacaaacctgagaaaaagtcagcaagctcaggggagatgtctaaaaagttatcagatggaacttttaaagactccaaggctgaaacagagactgagatttccactagagcttccaagtcattgacaacaaaaacatcaaaacggcgatccaaaaattcagtggaaggtgactccaccagtgatgcagaaggagatgctggacctgctggccaagataagtctgaggtgccagagactccagaaattcctaatgagctttcatccaacatcagaagaattcctcggcctgggagtgcaagaccagcccctccccgggtcaaacggcaagacagcatggaggcgctacaaatggataggtcagggagtggtaaaaccgtttcaaatgtgattacagagtcacacaattctgacaatgaagaggatgatcaatttgtggtggaagctgcccctcagctctctgaaatgtcagaaattgaaatggtaacagcagtggaactagaagaagaggagaagcatggtggacttgtgaaaaaaattttggagacgaagaaagattatgagaaattgcagcagtcacccaaacctggggagaaggagcgatctctctttgagtcggcatggaagaaggagaaggacatcgtttccaaggagatagagaagctccgcacgtccatccagaccctgtgcaagagcgcacttcccctggggaagatcatggactacatccaggaagacgtggatgccatgcagaatgagctgcagatgtggcacagcgagaacaggcagcacgccgaggccctgcagcaggagcagaggatcacagactgtgccgtggagcccttaaaggctgagctcgcggagctggagcagctgatcaaagaccagcaagacaagatctgtgctgtgaaggccaacatcctcaagaatgaagaaaaaatccagaaaatggtatatagtatcaatttgacttcgagaaggtgaacactcaaaagtttcagagatgaaaagtcacctcagtttaaaagcaaaaaggaagatagaaaatcattactcttttaagttccagtttgctaagaaaatgaacagtttacaatgttattatccagctaattttcagagctttaaaactgtaagcatgttaagtgtattaaaaaaaccatgttttcttacctccttccagatggaatactggctagttataaatagcgcttccaaacacctctgtgaaaagtttttttgaaagcctgttctttgtgtttctgctgtaacctgtttagttctgtaccagaactctctagcaggtaagtggtgtgggcataccaagggaacagtagtcctttattttggtttagtggaaagactttcagaggtcagtgccgaatgaaggatgactgtgtactttttgataggcacttgataagtagaatgaggcctgaaaatgaatacattatatttttagttaatttccaatggaaagggctaacctcagcctgtctccatatcaggtacctatcaactggattgttttcatttttgttttttgacctctttgtaattgcatgtacttctctatgtaattttcctcttgatctctactatcgtttgcttgtgtttctagtccttaaagttcataaatttaaaaaggagatttcaggatggcctttatggacgttgtctggacatacatcctcactttcttccgcagtttaccctggttttcctcagacagaggctagcgcagccccccggagtccttgttctccttaagagggtctcgctctgcaaagcattggcgccatggcttttcctttgcatgggtgtgcataccgagagacaggcagcttaggaaaaacaacataaggaagacttaaaaggatgcactgatttacgacgttttttgatgttagccatttttttggaaattgttttttaaagcaaaagttttttaaaaacatggtttatagtttttcacttacatatactattgtaaatacttagcagagtcttaagttactgtataaaacatttcattgtgtttgaagacatacttatgggtcttgaggtctgggtcctaatacttttaaatagtgtatttattatgtaaactgaggagtgccatttaaagtgtgaggattgcctgaaaaggttttgtttctttcttttttttttttttttgagatggagtcttactctgtcgcccaggctggagtgcagtggcgcaatctcggctcactgcaaccaccgcctcccgagttcaagtgattctcctgcctcagcctcctgagtaactgggactacaggcgcacgccaccatgcccagctaatttttgtattttcagtagagatggggtttcaccgtgttgaccaggatggtctccacctcctgacctcgtgatccgcctgcctcggcctcccaaagtgctgggattacaggcatgagccactgcacccggccaggttttgtttctttaaggattagcacaaatggcaccgttgggtttttcttcatacaatttccaaaataaattctgtactcaggttgttatatgattttctgagctgaataagttcaggagcagattattaagatctgccattctgaaacgctggtctttttctccttcctatagtgcaccataaaattctgtttgatcagattatattacatacattttgggggagtggagggacatgagttaagtagcccttcatgtatttataatctcttttctactgaatcaaatgacttagccatgaccctgaatggaccttgttttacttcaagttgagatgtctgccttttatgaatttgtatatgtgaatagagtttgggggttgccaaaaattgcatacattgtatgtaagtaaaattttttatgaagtagtctgtcaaattgtatcataaagtttatttttcttttatacgtaaatcattaaaaataatcacatattttttccataaaaaaaaa

SEQ ID NO: 591 - DNA, 2410 bp, HOMO SAPIENS
agagcggccacccagggatcggcgctatctgcacagcggttacagtctcggaaaggcctggcttcttcgtggctttgtggagatcccttacagcggccatttgattagcacccgaagagattcaaaggaagcagttgttccgtccccaacatatttccgtttcaaaccacccacttccggtttttcagccggttccggtcccgcccttcacttccggtcgctttcggtctctcagcggccggtttctgcgtccgctgccgcaggttccaccgcgctccaggtatttttttttctgaaggaaagctgcttcctcatatgtttcaagaatggctctccctatcattgtaaaatggggtggacaggagtattcagtgaccacactttcagaagatgatactgtgctcgatctcaaacagtttctcaagacccttacaggagttcttccagaacgccaaaagttacttggactcaaagttaaaggcaaacctgcagaaaatgatgttaagcttggagctctcaaactgaaaccaaatactaaaatcatgatgatgggaactcgtgaggagagcttggaagatgtcttaggtccaccccctgacaatgatgatgttgttaatgactttgatattgaagatgaagtagttgaagtagaaaatagggaagaaaacctactgaaaatttctcgcagagtgaaagagtacaaagtggaaattttgaatcctcccagggaagggaaaaagcttttggtgctagatgttgattatacattatttgaccacaggtcttgtgcagagactggggtagaattaatgcggccatatcttcatgaatttctaacatctgcctatgaagattatgacattgttatttggtctgcaacaaatatgaagtggattgaagctaaaatgaaagagctgggagtgagcacaaatgcaaattataagattactttcatgttggatagtgctgctatgataacagtacatactccaaggagaggattaatagacgtaaagcctcttggtgttatatggggaaagttttcggagttttacagcaagaaaaacaccattatgtttgatgacatagggagaaattttctaatgaacccacagaatggactaaagataaggccttttatgaaagcgcacctaaatcgtgataaagacaaagaacttttaaaattaactcagtacctcaaggagatagcaaaattagatgactttttggatctaaatcacaaatattgggaaagatatctctcaaagaagcaaggacagtagttacaagttatactggcagttattgaagatacttaagatccaagaacttcttgcttttatgctagaaatcattatgatagtgctggacactgaagcaaataccatactgcttatacttggtcttccagttttttgtaaatttaattttatattttttgaagatgatagcaatatgctaaaaaatgcttgtcccctatatgaatattctgttacgcttgaaaaatattttctccagcgttggttactgaccaccccaccctcccaccacacacacacacacacacacacacacacacacacacacacacacacaaagtggagaaaaatgtatactcaacaatgtcattttgtgactttggaaacaagttatgttttgtgtttttgtctcattgtgttattgtctgactaaatctaaaaccaaacccatgttgaaactagtacttttccctttaaaaacaaaccaaaaaaaaaaacaaaaaaaaactttttaattaaagaacctagtttgctatgcttaaaattaccaagaattttttatttctttgtcatagacacaatttctcttctgtatgccactagttacatttctaaattctgagcggtctcagttaggcctgtatgtgtgtacatgtccaagtaaagctggaaaatgtcagtcttgacacagctgtgtcttagtatgagaaacagaagactgaagaataaaaactaaggaacaagaatgagtctctttttggtggctaagtagaatcttcctaaaaccattgtcataaaagcagttaaaggcaataaatttttaaaagggacatatcactgattcattcctaaaaagcatgaacaaaaagtttttgttctgttccagctatatcttgtctaagtgctaacactgtttcagtgaaaatatctagccataagattaaaaaaatatattatttgcaatgcttaagcctgcagatacgtaatgtgaccactgttttgtgttgacaatattgctttatacagttcttgtatttgaaaggaattgatccttttaaagaaacatggtgtatattgttcttacaggactaatttcagtggtgtaaataataaatatcttttcttaaaacattaaaaaaaaaaaaaaaaaa

SEQ ID NO: 592 - DNA, 1679 bp, HOMO SAPIENS
cggccgccatcttggcccaactgctcccctcactccagttgctcagcccgccgctgagcacagccaatccgcggccgtccactcactgtttcggccaatcaccgagcagacggcccggaagctcgagaggctcgtgccaggtcggggggcgaaggcgaggccagcccaccaagcaggggcgtcaccaagggaaagccaatcaccattatttctgaagcccaagggggcgggacgagaagtcaacataatggtggtgctgctggaaatctagcacctggggagagcctgagacttgtgtatctaattgcctattggacacctccatctgggtaaacccaggcatccagaactttccctcaagacttacctccctcagtgcaggtcgggctggcctcacgcatttcgcttggatgcctaaatctgtctccacgtggggccggtcgataaaacaacacttcccagaatacgctgcgatccattcgcggtctgcacccggaaagtacacctcccaggggtctgtgcgcgcctccagggaacgggtcttgtggctttgtctcccgcgaagaggagatggcggagtcgttgaggtctccgcgccgctccctgtacaaactggtgggctcgccgccttggaaagaggctttccggcagagatgcctggagagaatgagaaacagccgggacaggctcctaaacaggtaccgccaggctggaagcagtgggccagggaattctcagaacagctttctagttcaagaggtgatggaagaagagtggaatgctttgcagtcagtggagaattgtccagaagacttggctcagctggaggagctgatagacatggctgtgctggaggaaattcaacaggagctgatcaaccaagagcagtccatcatcagcgagtatgagaagagcttgcagtttgatgaaaagtgtctcagcatcatgctggctgagtgggaggcaaacccactcatctgtcctgtatgtacaaagtacaacctgagaatcacaagcggtgtggtggtgtgtcagtgtggcctgtccatcccatctcattcttctgagttgacagagcagaagcttcgtgcctgtttagagggtagtataaatgagcacagtgcacattgtccccacacacctgaattttcagtcactggaggaacagaagaaaagtccagtcttctcatgagctgtctggcctgtgatacttgggctgtgatcctctagagccagcttggactcacatcattctatggggttgaagacaactcattccctctgaggagccttgtacatacaagccttttatttataacttattttgtattgaaacttttaaacaatactgaagaaaaaaaaacttttccgacatctgttcttggtcttttgtgacgcaggttgaagggggaggaatagaaaaagacaaactgccttggaggagataaaccaattttatgtctatcatgttatacaaaaatctagaaataatagatttgtacagaaaaaaatgataataaatgagaacacaaaacatataatttaaatttggtattttttcccccatgatattaggatgataatcatttcaaagcacatgtctagcttcagagtaggatttgttcactggccaaagcctgccatgaaactatggctttcagcatctgtctgctctactg

SEQ ID NO: 593 - DNA, 11389 bp, HOMO SAPIENS
atggcgccgccgccgccgcccgtgctgcccgtgctgctgctcctggccgccgccgccgccctgccggcgatggggctgcgagcggccgcctgggagccgcgcgtacccggcgggacccgcgccttcgccctccggcccggctgtacctacgcggtgggcgccgcttgcacgccccgggcgccgcgggagctgctggacgtgggccgcgatgggcggctggcaggacgtcggcgcgtctcgggcgcggggcgcccgctgccgctgcaagtccgcttggtggcccgcagtgccccgacggcgctgagccgccgcctgcgggcgcgcacgcaccttcccggctgcggagcccgtgcccggctctgcggaaccggtgcccggctctgcggggcgctctgcttccccgtccccggcggctgcgcggccgcgcagcattcggcgctcgcagctccgaccaccttacccgcctgccgctgcccgccgcgccccaggccccgctgtcccggccgtcccatctgcctgccgccgggcggctcggtccgcctgcgtctgctgtgcgccctgcggcgcgcggctggcgccgtccgggtgggactggcgctggaggccgccaccgcggggacgccctccgcgtcgccatccccatcgccgcccctgccgccgaacttgcccgaagcccgggcggggccggcgcgacgggcccggcggggcacgagcggcagagggagcctgaagtttccgatgcccaactaccaggtggcgttgtttgagaacgaaccggcgggcaccctcatcctccagctgcacgcgcactacaccatcgagggcgaggaggagcgcgtgagctattacatggaggggctgttcgacgagcgctcccggggctacttccgaatcgactctgccacgggcgccgtgagcacggacagcgtactggaccgcgagaccaaggagacgcacgtcctcagggtgaaagccgtggactacagtacgccgccgcgctcggccaccacctacatcactgtcttggtcaaagacaccaacgaccacagcccggtcttcgagcagtcggagtaccgcgagcgcgtgcgggagaacctggaggtgggctacgaggtgctgaccatccgcgccagcgaccgcgactcgcccatcaacgccaacttgcgttaccgcgtgttggggggcgcgtgggacgtcttccagctcaacgagagctctggcgtggtgagcacacgggcggtgctggaccgggaggaggcggccgagtaccagctcctggtggaggccaacgaccaggggcgcaatccgggcccgctcagtgccacggccaccgtgtacatcgaggtggaggacgagaacgacaactacccccagttcagcgagcagaactacgtggtccaggtgcccgaggacgtggggctcaacacggctgtgctgcgagtgcaggccacggaccgggaccagggccagaacgcggccattcactacagcatcctcagcgggaacgtggccggccagttctacctgcactcgctgagcgggatcctggatgtgatcaaccccttggatttcgaggatgtccagaaatactcgctgagcattaaggcccaggatgggggccggcccccgctcatcaattcttcaggggtggtgtctgtgcaggtgctggatgtcaacgacaacgagcctatctttgtgagcagccccttccaggccacggtgctggagaatgtgcccctgggctaccccgtggtgcacattcaggcggtggacgcggactctggagagaacgcccggctgcactatcgcctggtggacacggcctccacctttctggggggcggcagcgctgggcctaagaatcctgcccccacccctgacttccccttccagatccacaacagctccggttggatcacagtgtgtgccgagctggaccgcgaggaggtggagcactacagcttcggggtggaggcggtggaccacggctcgccccccatgagctcctccaccagcgtgtccatcacggtgctggacgtgaatgacaacgacccggtgttcacgcagcccacctacgagcttcgtctgaatgaggatgcggccgtggggagcagcgtgctgaccctgcaggcccgcgaccgtgacgccaacagtgtgattacctaccagctcacaggcggcaacacccggaaccgctttgcactcagcagccagagagggggcggcctcatcaccctggcgctacctctggactacaagcaggagcagcagtacgtgctggcggtgacagcatccgacggcacacggtcgcacactgcgcatgtcctaatcaacgtcactgatgccaacacccacaggcctgtctttcagagctcccattacacagtgagtgtcagtgaggacaggcctgtgggcacctccattgctaccctcagtgccaacgatgaggacacaggagagaatgcccgcatcacctacgtgattcaggaccccgtgccgcagttccgcattgaccccgacagtggcaccatgtacaccatgatggagctggactatgagaaccaggtcgcctacacgctgaccatcatggcccaggacaacggcatcccgcagaaatcagacaccaccaccctagagatcctcatcctcgatgccaatgacaatgcaccccagttcctgtgggatttctaccagggttccatctttgaggatgctccaccctcgaccagcatcctccaggtctctgccacggaccgggactcaggtcccaatgggcgtctgctgtacaccttccagggtggggacgacggcgatggggacttctacatcgagcccacgtccggtgtgattcgcacccagcgccggctggaccgggagaatgtggccgtgtacaacctttgggctctggctgtggatcggggcagtcccactccccttagcgcctcggtagaaatccaggtgaccatcttggacattaatgacaatgcccccatgtttgagaaggacgaactggagctgtttgttgaggagaacaacccagtggggtcggtggtggcaaagattcgtgctaacgaccctgatgaaggccctaatgcccagatcatgtatcagattgtggaaggggacatgcggcatttcttccagctggacctgctcaacggggacctgcgtgccatggtggagctggactttgaggtccggcgggagtatgtgctggtggtgcaggccacgtcggctccgctggtgagccgagccacggtgcacatccttctcgtggaccagaatgacaacccgcctgtgctgcccgacttccagatcctcttcaacaactatgtcaccaacaagtccaacagtttccccaccggcgtgatcggctgcatcccggcccatgaccccgacgtgtcagacagcctcaactacaccttcgtgcagggcaacgagctgcgcctgttgctgctggaccccgccacgggcgaactgcagctcagccgcgacctggacaacaaccggccgctggaggcgctcatggaggtgtctgtgtctgatggcatccacagcgtcacggccttctgcaccctgcgtgtcaccatcatcacggacgacatgctgaccaacagcatcactgtccgcctggagaacatgtcccaggagaagttcctgtccccgctgctggccctcttcgtggagggggtggccgccgtgctgtccaccaccaaggacgacgtcttcgtcttcaacgtccagaacgacaccgacgtcagctccaacatcctgaacgtgaccttctcggcgctgctgcctggcggcgtccgcggccagttcttcccgtcggaggacctgcaggagcagatctacctgaatcggacgctgctgaccaccatctccacgcagcgcgtgctgcccttcgacgacaacatctgcctgcgcgagccctgcgagaactacatgaagtgcgtgtccgttctgcgattcgacagctccgcgcccttcctcagctccaccaccgtgctcttccggcccatccaccccatcaacggcctgcgctgccgctgcccgcccggcttcaccggcgactactgcgagacggagatcgacctctgctactccgacccgtgcggcgccaacggccgctgccgcagccgcgagggcggctacacctgcgagtgcttcgaggacttcactggagagcactgtgaggtggatgcccgctcaggccgctgtgccaacggggtgtgcaagaacgggggcacctgcgtgaacctgctcatcggcggcttccactgcgtgtgtcctcctggcgagtatgagaggccctactgtgaggtgaccaccaggagcttcccgccccagtccttcgtcaccttccggggcctgagacagcgcttccacttcaccatctccctcacgtttgccactcaggaaaggaacggcttgcttctctacaacggccgcttcaatgagaagcacgacttcatcgccctggagatcgtggacgagcaggtgcagctcaccttctctgcaggcgagacaacaacgaccgtggcaccgaaggttcccagtggtgtgagtgacgggcggtggcactctgtgcaggtgcagtactacaacaagcccaatattggccacctgggcctgccccatgggccgtccggggaaaagatggccgtggtgacagtggatgattgtgacacaaccatggctgtgcgctttggaaaggacatcgggaactacagctgcgctgcccagggcactcagaccggctccaagaagtccctggatctgaccggccctctactcctggggggtgtccccaacctgccagaagacttcccagtgcacaaccggcagttcgtgggctgcatgcggaacctgtcagtcgacggcaaaaatgtggacatggccggattcatcgccaacaatggcacccgggaaggctgcgctgctcggaggaacttctgcgatgggaggcggtgtcagaatggaggcacctgtgtcaacaggtggaatatgtatctgtgtgagtgtccactccgattcggcgggaagaactgtgagcaagccatgcctcacccccagctcttcagcggtgagagcgtcgtgtcctggagtgacctgaacatcatcatctctgtgccctggtacctggggctcatgttccggacccggaaggaggacagcgttctgatggaggccaccagtggtgggcccaccagctttcgcctccagatcctgaacaactacctccagtttgaggtgtcccacggcccctccgatgtggagtccgtgatgctgtccgggttgcgggtgaccgacggggagtggcaccacctgctgatcgagctgaagaatgttaaggaggacagtgagatgaagcacctggtcaccatgaccttggactatgggatggaccagaacaaggcagatatcgggggcatgcttcccgggctgacggtaaggagcgtggtggtcggaggcgcctctgaagacaaggtctccgtgcgccgtggattccgaggctgcatgcagggagtgaggatgggggggacgcccaccaacgtcgccaccctgaacatgaacaacgcactcaaggtcagggtgaaggacggctgtgatgtggacgacccctgtacctcgagcccctgtccccccaatagccgctgccacgacgcctgggaggactacagctgcgtctgtgacaaagggtaccttggaataaactgtgtggatgcctgtcacctgaacccctgcgagaacatgggggcctgcgtgcgctcccccggctccccgcagggctacgtgtgcgagtgtgggcccagtcactacgggccgtactgtgagaacaaactcgaccttccgtgccccagaggctggtgggggaaccccgtctgtggaccctgccactgtgccgtcagcaaaggctttgatcccgactgtaataagaccaacggccagtgccaatgcaaggagaattactacaagctcctagcccaggacacctgtctgccctgcgactgcttcccccatggctcccacagccgcacttgcgacatggccaccgggcagtgtgcctgcaagcccggcgtcatcggccgccagtgcaaccgctgcgacaacccgtttgccgaggtcaccacgctcggctgtgaagtgatctacaatggctgtcccaaagcatttgaggccggcatctggtggccacagaccaagttcgggcagccggctgcggtgccatgccctaagggatccgttggaaatgcggtccgacactgcagcggggagaagggctggctgcccccagagctctttaactgtaccaccatctccttcgtggacctcagggccatgaatgagaagctgagccgcaatgagacgcaggtggacggcgccagggccctgcagctggtgagggcgctgcgcagtgctacacagcacacgggcacgctctttggcaatgacgtgcgcacggcctaccagctgctgggccacgtccttcagcacgagagctggcagcagggcttcgacctggcagccacgcaggacgccgactttcacgaggacgtcatccactcgggcagcgccctcctggccccagccaccagggcggcgtgggagcagatccagcggagcgagggcggcacggcacagctgctccggcgcctcgagggctacttcagcaacgtggcacgcaacgtgcggcggacgtacctgcggcccttcgtcatcgtcaccgccaacatgattcttgctgtcgacatctttgacaagttcaactttacgggagccagggtcccgcgattcgacaccatccatgaagagttccccagggagctggagtcctccgtctccttcccagccgacttcttcagaccacctgaagaaaaagaaggccccctgctgaggccggctggccggaggaccaccccgcagaccacgcgcccggggcctggcaccgagagggaggccccgatcagcaggcggaggcgacaccctgatgacgctggccagttcgccgtcgctctggtcatcatttaccgcaccctggggcagctcctgcccgagcgctacgaccccgaccgtcgcagcctccggttgcctcaccggcccatcattaataccccgatggtgagcacgctggtgtacagcgagggggctccgctcccgagacccctggagaggcccgtcctggtggagttcgccctgctggaggtggaggagcgaaccaagcctgtctgcgtgttctggaaccactccctggccgttggtgggacgggagggtggtctgcccggggctgcgagctcctgtccaggaaccggacacatgtcgcctgccagtgcagccacacagccagctttgcggtgctcatggatatctccaggcgtgagaacggggaggtcctgcctctgaagattgtcacctatgccgctgtgtccttgtcactggcagccctgctggtggccttcgtcctcctgagcctggtccgcatgctgcgctccaacctgcacagcattcacaagcacctcgccgtggcgctcttcctctctcagctggtgttcgtgattgggatcaaccagacggaaaacccgtttctgtgcacagtggttgccatcctcctccactacatctacatgagcacctttgcctggaccctcgtggagagcctgcatgtctaccgcatgctgaccgaggtgcgcaacatcgacacggggcccatgcggttctactacgtcgtgggctggggcatcccggccattgtcacaggactggcggtcggcctggacccccagggctacgggaaccccgacttctgctggctgtcgcttcaagacaccctgatttggagctttgcggggcccatcggagctgttataatcatcaacacagtcacttctgtcctatctgcaaaggtttcctgccaaagaaagcaccattattatgggaaaaaagggatcgtctccctgctgaggaccgcattcctcctgctgctgctcatcagcgccacctggctgctggggctgctggctgtgaaccgcgatgcactgagctttcactacctcttcgccatcttcagcggcttacagggccccttcgtcctccttttccactgcgtgctcaaccaggaggtccggaagcacctgaagggcgtgctcggcgggaggaagctgcacctggaggactccgccaccaccagggccaccctgctgacgcgctccctcaactgcaacaccaccttcggtgacgggcctgacatgctgcgcacagacttgggcgagtccaccgcctcgctggacagcatcgtcagggatgaagggatccagaagctcggcgtgtcctctgggctggtgaggggcagccacggagagccagacgcgtccctcatgcccaggagctgcaaggatccccctggccacgattccgactcagatagcgagctgtccctggatgagcagagcagctcttacgcctcctcacactcgtcagacagcgaggacgatggggtgggagctgaggaaaaatgggacccggccaggggcgccgtccacagcacccccaaaggggacgctgtggccaaccacgttccggccggctggcccgaccagagcctggctgagagtgacagtgaggaccccagcggcaagccccgcctgaaggtggagaccaaggtcagcgtggagctgcaccgcgaggagcagggcagtcaccgtggagagtaccccccggaccaggagagcgggggcgcagccaggcttgctagcagccagcccccagagcagaggaaaggcatcttgaaaaataaagtcacctacccgccgccgctgacgctgacggagcagacgctgaagggccggctccgggagaagctggccgactgtgagcagagccccacatcctcgcgcacgtcttccctgggctctggcggccccgactgcgccatcacagtcaagagccctgggagggagccggggcgtgaccacctcaacggggtggccatgaatgtgcgcactgggagcgcccaggccgatggctccgactctgagaaaccgtgaggcaagcccgtcaccccacacaggctgcggcatcaccctcagaccttggagcccaaggggccactgcccttgaagtggagtgggcccagagtgtggcggtccccatggtggcagccccccgactgatcatccagacacaaaggtcttggttctcccaggagctcagggcctgtcagacctggtgacaagtgccaaaggccacaggcatgagggaggcgtggaccactgggccagcaccgctgagtcctaagactgcagtcaaagccagaactgagaggggaccccagactgggcccagaggctggccagagttcaggaacgccgggcacagaccaaagaccgcggtccagccccgcccaggcgggcatctcatggcagtgcggacccgtggctggcagcccgggcagtcctttgcaaaggcaccccttgtcttaaaatcacttcgctatgtgggaaaggtggagatacttttatatatttgtatgggactctgaggaggtgcaacctgtatatatattgcattcgtgctgactttgttatcccgagagatccatgcaatgatctcttgctgtcttctctgtcaagattgcacagttgtacttgaatctggcatgtgttgacgaaactggtgccccagcagatcaaaggtgggaaatacgtcagcagtggggctaaaaccaagcggctagaagccctacagctgccttcggccaggaagtgaggatggtgtgggccctccccgccggccccctgggtccccagtgttcgctgtgtgtgcgtttgtcctctgctgccatctgccccggctgtgtgaattcaagacagggcagtgcagcactaggcaggtgtgaggagccctgctgaggtcactgtggggcacggttgccacacggctgtcatttttcacctggtcattctgtgaccaccaccccctcccctcaccgcctcccaggtggcccgggagctgcaggtggggatggctttgtcctttgctcctgctccccgtgggacctgggaccttaaagcgttgcaggttcctgatttggacagaggtgtggggccttccaggccgttacatacctcctgccaattctctaactctctgagactgcgaggatctccaggcagggttctcccctctggagtctgaccaattacttcattttgcttcaaatggccaattgtgcagagggacaaagccacagccacactcttcaacggttaccaaactgtttttggaaattcacaccaaggtcgggcccactgcaggcagctggcacagcgtggcccgaggggctgtggaacgggtcccggaactgtcagacatgtttgattttagcgtttcctttgttcttcaaatcaggtgcccaaataagtgatcagcacagctgcttccaaataggagaaaccataaaataggatgaaaatcaagtaaaatgcaaagatgtccacactgttttaaacttgaccctgatgaaaatgtgagcactgttagcagatgcctatgggagaggaaaagcgtatctgaaaatggtccaggacaggaggatgaaatgagatcccagagtcctcacacctgaatgaattatacatgtgccttaccaggtgagtggtctttcgaagataaaaaactctagtccctttaaacgtttgcccctggcgtttcctaagtacgaaaaggtttttaagtcttcgaacagtctcctttcatgactttaacaggattctgccccctgaggtgtaatttttttgttctatttttttccacgtactccacagccaacatcacgaggtgtaatttttaatttgatcagaactgttaccaaaaaacaactgtcagttttattgagatgggaaaaatgtaaacctatttttattacttaagactttatgggagagattagacactggaggtttttaacagaacgtgtatttattaatgttcaaaacactggaattacaaatgagaagagtctacaataaattaagatttttgaatttgtacttctgcggtgctggtttttctccacaaacacccccgcccctccccatgcccagggtggccgtggaagggacggtttacggacgtgcagctgagctgtccgtgtcccatgctccctcagccagtggaacgtgccggaactttttgtccattccctagtaggcctgccacagcctagatgggcagtttttgtctttcaccaaatttgaggactttttttttttgccattatttcttcagttttcttttcttgcactgatctttctcctctccttctgtgactccagtgactcagacgttagacctcttgatgttttcccactggtccctgaggctctgttc

SEQ ID NO: 594 - DNA, 2757 bp, HOMO SAPIENS
ggaaagtaggttagtggtgcgacatttagggaaggcagaaagtaggtcagggacggaggtgcctgtttacccgcgccggactcaccgccgccgccgccgcgggatccgagtgcgggcgcgggcgcgggcgctcccggcgagccacggtggtgctggctagagtgtatacgtttggacccaagcttaacttttccaatgtggaatcctgggccttcattggtttttggaagaagctgaccgcctgaaaagaaattataaaacatgaaaatcgctttgaggtgaccaagtccagaggcccctaactcctcccaagctggatctggggtgtaagaactgtgacttcagatcatccaatggcagaccagagaatggacatttcttcaaccatcagtgatttcatgtccccgggccccaccgacctgctttccagctctcttggtaccagtggtgtggattgcaaccgcaaacggaaaggcagctccactgactaccaagaaagcatggacacagacaaagatgaccctcatggaaggttagaatatacagaacaccaaggaaggataaaaaatgcaagggaagctcacagtcagattgaaaagcggcgtcgggataaaatgaacagttttatagatgaattggcttctttggtaccaacatgcaacgcaatgtccaggaaattagataaacttactgtgctaaggatggctgttcagcacatgaaaacattaagaggtgccaccaatccatacacagaagcaaactacaaaccaacttttctatcagacgatgaattgaaacacctcattctcagggcagcagatggatttttgtttgtcgtaggatgtgaccgagggaagatactctttgtctcagagtctgtcttcaagatcctcaactacagccagaatgatctgattggtcagagtttgtttgactacctgcatcctaaagatattgccaaagtcaaggagcagctctcctcctctgacaccgcaccccgggagcggctcatagatgcaaaaactggacttccagttaaaacagatataacccctgggccatctcgattatgttctggagcacgacgttctttcttctgtaggatgaagtgtaacaggccttcagtaaaggttgaagacaaggacttcccctctacctgctcaaagaaaaaagatcgaaaaagcttctgcacaatccacagcacaggctatttgaaaagctggccacccacaaagatggggctggatgaagacaacgaaccagacaatgaggggtgtaacctcagctgcctcgtcgcaattggacgactgcattctcatgtagttccacaaccagtgaacggggaaatcagggtgaaatctatggaatatgtttctcggcacgcgatagatggaaagtttgtttttgtagaccagagggcaacagctattttggcatatttaccacaagaacttctaggcacatcgtgttatgaatattttcaccaagatgacataggacatcttgcagaatgtcataggcaagttttacagacgagagaaaaaattacaactaattgctataaatttaaaatcaaagatggttcttttatcacactacggagtcgatggttcagtttcatgaacccttggaccaaggaagtagaatatattgtctcaactaacactgttgttttagccaacgtcctggaaggcggggacccaaccttcccacagctcacagcatccccccacagcatggacagcatgctgccctctggagaaggtggcccaaagaggacccaccccactgttccagggattccagggggaacccgggctggggcaggaaaaataggccgaatgattgctgaggaaatcatggaaatccacaggataagagggtcatcgccttctagctgtggctccagcccattgaacatcacgagtacgcctccccctgatgcctcttctccaggaggcaagaagattttaaatggagggactccagacattccttccagtggcctactatcaggccaggctcaggagaacccaggttatccatattctgatagttcttctattcttggtgagaacccccacataggtatagacatgattgacaacgaccaaggatcaagtagtcccagtaatgatgaggcagcaatggctgtcatcatgagcctcttggaagcagatgctggactgggtggccctgttgactttagtgacttgccatggccgctgtaaacactacatgttgctttggcaacagctatagtatcaaagtgcattactggtggagttttacagtctgtgaagcttactggataaggagagaatagcttttatgtactgacttcataaaagccatctcagagccattgatacaagtcaatcttactatatgtaacttcagacaaagtggaactaagcctgctccagtgtttcctcatcattgattattgggctagctgtggatagcttgcattaattgtatattttggattctgtttgtgttgaattttttaatcattgtgcacagaagcatcattggtagcttttatatgcaaatggtcatttcagatgtatggtgtttttacactacaaagaagtcccccatgtggatatttcttatactaattgtatcataaagccgtttattcttccttgtaagaatcctttactataaatatgggttaaagtataatgtactagacagttaaatatttttaataaatgtttcccttgttctataaaaaaaaaaaaaaaaaaa

SEQ ID NO: 595 - DNA, 2482 bp, HOMO SAPIENS
tgcgctgcccggggcggccagagccctgcagaacaaaccgccgcacggaattaggggccgccgtccgcgcctgccaggcttggaagcggactcgcccccagggccaccgccctaggaaacctcccgtcggaagcctcccaagcaagccgctcacccgcggctcccgcgcgaggcggcgtgggcgtgggcgcggccctggcgcggcggcgcgcgcggggtgaagggagcccggcgcgctggctgcggcgacggcggccgttgctgcgccgggtactggggtcgctgcctgaggcgcaggcgccgtggactccacccgccccggggcctgggctcgctgtggactcgtcatggcgaccgagcagaggcctttccacctggtggtgttcggcgcgtctggcttcaccggccagttcgtgaccgaggaggtggcccgggagcaggtggacccggagcggagctcccgcctgccctgggccgtggcgggccgctcccgggagaagctgcagcgggtgctggagaaggcggccctgaagctgggaagaccaacactgtcatctgaagttggaatcatcatctgtgatattgctaatccagcctcgcttgatgaaatggctaaacaggcaacagttgtcctcaattgcgtaggaccatatcggttttatggagaacctgtaataaaagcatgtattgaaaatggagccagttgtatcgacatcagtggagaacctcagtttctggaactaatgcaactgaagtatcatgagaaagctgcagacaaaggggtttatatcattggaagcagcggctttgactccattccagcagatctgggagtaatatataccagaaataaaatgaatggtactttgactgctgtggaaagtttcctgactatacattcaggacctgaggggttgagcattcatgatggtacctggaagtcagcaatttatggttttggagatcagagtaatttgagaaaactaagaaatgtatcaaatctgaaacctgtcccgctcattggtccaaaattgaagagaaggtggccaatttcttattgtcgggaactcaaaggttattccattccttttatgggatctgatgtgtctgttgtaaggaggactcaacgttacttgtatgaaaatttagaggaatcaccagttcagtatgctgcgtatgtaactgtgggaggcatcacctctgttattaagctgatgtttgcaggacttttctttttgttctttgtgaggtttggaattggaaggcaacttctcataaaattcccatggttcttctcctttggctatttttcaaaacaaggcccaacacaaaaacagattgatgctgcctcattcacgctgacattctttggtcaaggatacagccaaggcactggtacagataagaacaaaccaaatatcaaaatttgtactcaggtgaaaggaccagaggctggctatgtggctacccccatagctatggttcaggcagccatgactcttctaagtgatgcttctcatctgcctaaggcgggcggggtcttcacacctggagcagctttttccaaaacaaagttgattgacagactcaacaaacacggtattgagtttagtgttattagcagctctgaagtctaaacactggaagaattaactgaagtcataacgtgcgtgaattaacagcttctctatttgatatttgaaattcttctgtaagcctgtctgagtgtatgtggaaacgattgtcaaatctaaaatatctatatattaaaaagtaggaaattgtcctagcttaccctaaatttcaaatctgagttgattttgtgattttattgcttataacagagaactcatatttgacatatttttttcattgatgtgttcctggtagattttcacgaatgagctggcaggtctaatgggggaggcggcgtcccagtctgtgttgcagcagcattctcatcgggggtgcgcacaccatcgttactgtcgggcagtaactgccgcttgccttgccgcagtaggagggaaatctcaccttccttccacatactgtcttgagcctttgctaaattaaactgcactttttgctatttttgcctagtttttcgccaatctacactgattttggactgttacctaagttgaaaaataaaaggttgtcaatcgaatggtggtttaatgtttggacctgccgatgtatttgtatagtggtagaaacatgctgcttaagtggcctaacctgtttcttgccaataagtaggcttatcattttatctttacgtaattctatatctgtgactaggtttttaaggatacagcttataagttgctatcaattttcactacctaagcagaatttttctctaatttactttttgtattttaactaggttttacatggaagccctaaaataaggcaaaagactttttcttttgtaataagcatataataaacacgtatatacatagcaaaaaaaaaa

SEQ ID NO: 596 - DNA, 3298 bp, HOMO SAPIENS
gctagagagggcggggcttggaggggccgcagcgtcacatgaccgcgggaggctacgcgcggggcgggtgctgcttgctgcaggctctggggagtcgccatgcctacaacacagcagtcccctcaggatgagcaggaaaagctcttggatgaagccatacaggctgtgaaggtccagtcattccaaatgaagagatgcctggacaaaaacaagcttatggatgctctaaaacatgcttctaatatgcttggtgaactccggacttctatgttatcaccaaagagttactatgaactttatatggccatttctgatgaactgcactacttggaggtctacctgacagatgagtttgctaaaggaaggaaagtggcagatctctacgaacttgtacagtatgctggaaacattatcccaaggctttaccttttgatcacagttggagttgtatatgtcaagtcatttcctcagtccaggaaggatattttgaaagatttggtagaaatgtgccgtggtgtgcaacatcccttgaggggtctgtttcttcgaaattaccttcttcagtgtaccagaaatatcttacctgatgaaggagagccaacagatgaagaaacaactggtgacatcagtgattccatggattttgtactgctcaactttgcagaaatgaacaagctctgggtgcgaatgcagcatcagggacatagccgagatagagaaaaaagagaacgagaaagacaagaactgagaattttagtgggaacaaatttggtgcgcctcagtcagttggaaggtgtaaatgtggaacgttacaaacagattgttttgactggcatattggagcaagttgtaaactgtagggatgctttggctcaagaatatctcatggagtgtattattcaggttttccctgatgaatttcacctccagactttgaatccttttcttcgggcctgtgctgagttacaccagaatgtaaatgtgaagaacataatcattgctttaattgatagattagctttatttgctcaccgtgaagatggacctggaatcccagcggatattaaactttttgatatattttcacagcaggtggctacagtgatacagtctagacaagacatgccttcagaggatgttgtatctttacaagtctctctgattaatcttgccatgaaatgttaccctgatcgtgtggactatgttgataaagttctagaaacaacagtggagatattcaataagctcaaccttgaacatattgctaccagtagtgcagtttcaaaggaactcaccagacttttgaaaataccagttgacacttacaacaatattttaacagtcttgaaattaaaacattttcacccactctttgagtactttgactacgagtccagaaagagcatgagttgttatgtgcttagtaatgttctggattataacacagaaattgtctctcaagaccaggtggattccataatgaatttggtatccacgttgattcaagatcagccagatcaacctgtagaagaccctgatccagaagattttgctgatgagcagagccttgtgggccgcttcattcatctgctgcgctctgaggaccctgaccagcagtacttgattttgaacacagcacgaaaacattttggagctggtggaaatcagcggattcgcttcacactgccacctttggtatttgcagcttaccagctggcttttcgatataaagagaattctaaagtggatgacaaatgggaaaagaaatgccagaagattttttcatttgcccaccagactatcagtgctttgatcaaagcagagctggcagaattgcccttaagactttttcttcaaggagcactagctgctggggaaattggttttgaaaatcatgagacagtcgcatatgaattcatgtcccaggcattttctctgtatgaagatgaaatcagcgattccaaagcacagctagctgccatcaccttgatcattggcacttttgaaaggatgaagtgcttcagtgaagagaatcatgaacctctgaggactcagtgtgcccttgctgcatccaaacttctaaagaaacctgatcagggccgagctgtgagcacctgtgcacatctcttctggtctggcagaaacacggacaaaaatggggaggagcttcacggaggcaagagggtaatggagtgcctaaaaaaagctctaaaaatagcaaatcagtgcatggacccctctctacaagtgcagctttttatagaaattctgaacagatatatctatttttatgaaaaggaaaatgatgcggtaacaattcaggttttaaaccagcttatccaaaagattcgagaagacctcccgaatcttgaatccagtgaagaaacagagcagattaacaaacattttcataacacactggagcatttgcgcttgcggcgggaatcaccagaatccgaggggccaatttatgaaggtctcatcctttaaaaaggaaatagctcaccatactcctttccatgtacatccagtgagggttttattacgctaggtttcccttccatagattgtgcctttcagaaatgctgaggtaggtttcccatttcttacctgtgatgtgttttacccagcacctccggacactcaccttcaggaccttaataaaattattcacttggtaagtgttcaagtctttctgatcaccccaagtagcatgactgatctgcaatttaaaattcctgtgatctgtaaaaaaaaaaaaaaaaaaaaaaacaaaacccacaagcacttatcttggctactaatgaagctctccttttttttgtttgtttgtttgcttcattgttgattgtgtattttcttcattcctggggagtactaacccaaaagcgtctgtctcttgttttctagtccagtttgagattaatttagaagaaaggaatactgtatgtgaaattcatcttgggctttcccctaaattgcaagataaggccatgtgtaagattttccctaaaactagaatatattaatgcatgtttgagaattttaaagcaccatggtcaaaaccagaagctatattttgcatatttggactcagccatccattaagaacccatgttgtcctctggacatatttatcaatataattgggttttaaatagtataaaagaaaacttgtgatctatataatttatgtatcaccttcattgtaaatttagcaggaaatgcatcacaattatgatttttttttttgcaccagtgaaacaataaagatgctattaacaaaaaaaaaaaaaaa

SEQ ID NO: 597 - DNA, 1355 bp, HOMO SAPIENS
cagtggctggtaggcagtggctgggaggcagcggcccaattagtgtcgtgcggcccgtggcgaggcgaggtccggggagcgagcgagcaagcaaggcgggaggggtggccggagctgcggcggctggcacaggaggaggagcccgggcgggcgaggggcggccggagagcgccagggcctgagctgccggagcggcgcctgtgagtgagtgcagaaagcaggcgcccgcgcgctagccgtggcaggagcagcccgcacgccgcgctctctccctgggcgacctgcagtttgcaatatgactttggaggaattctcggctggagagcagaagaccgaaaggatggataaggtgggggatgccctggaggaagtgctcagcaaagccctgagtcagcgcacgatcactgtcggggtgtacgaagcggccaagctgctcaacgtcgaccccgataacgtggtgttgtgcctgctggcggcggacgaggacgacgacagagatgtggctctgcagatccacttcaccctgatccaggcgttttgctgcgagaacgacatcaacatcctgcgcgtcagcaacccgggccggctggcggagctcctgctcttggagaccgacgctggccccgcggcgagcgagggcgccgagcagcccccggacctgcactgcgtgctggtgacgaatccacattcatctcaatggaaggatcctgccttaagtcaacttatttgtttttgccgggaaagtcgctacatggatcaatgggttccagtgattaatctccctgaacggtgatggcatctgaatgaaaataactgaaccaaattgcactgaagtttttgaaatacctttgtagttactcaagcagttactccctacactgatgcaaggattacagaaactgatgccaaggggctgagtgagttcaactacatgttctgggggcccggagatagatgactttgcagatggaaagaggtgaaaatgaagaaggaagctgtgttgaaacagaaaaataagtcaaaaggaacaaaaattacaaagaaccatgcaggaaggaaaactatgtattaatttagaatggttgagttacattaaaataaaccaaatatgttaaagtttaagtgtgcagccatagtttgggtatttttggtttatatgccctcaagtaaaagaaaagccgaaagggttaatcatatttgaaaaccatattttattgtattttgatgagatattaaattctcaaagttttattataaattctactaagttattttatgacatgaaaagttatttatgctataaattttttgaaacacaatacctacaataaactggtatgaataattgcatcatt

SEQ ID NO: 598 - DNA, 8466 bp, HOMO SAPIENS
atggcaaactcgacggggaaggcgcctccggacgagcggagaaagggactcgctttcctggacgagctgcggcagttccaccacagcagagggtcgccttttaaaaaaatccctgcggtgggtgggaaggagctggatcttcacggtctctacaccagagtcactactttaggcggattcgcgaaggtttctgagaagaatcagtggggagaaattgttgaagagttcaactttcccagaagttgttctaacgctgcctttgctttaaaacagtattacttgcgttacctagaaaagtacgagaaagttcatcattttggggaggatgatgatgaggtaccaccaggcaatccaaagccacagcttcctattggtgcaattccatcttcctacaattaccagcaacacagtgtgtcggattatctgcgtcaaagttatgggctgtccatggactttaattcgccaaatgattataataaattggtgctttcactgttatctggactcccaaatgaagtggactttgctattaacgtatgcactctcctatcaaatgaaagcaagcacgtcatgcaacttgaaaaagatcctaaaatcatcactttactacttgctaatgccggggtgtttgacgacactttaggatccttttccactgtatttggagaagaatggaaagagaagactgatagagacttcgttaagttttggaaagacatcgttgatgataatgaagttcgtgacctcatttctgacagaaacaagtctcatgaaggtacatcaggagaatggatttgggagtctttatttcatccacctcgaaagctgggcattaacgatattgaaggacagcgggtacttcagattgcagtgattttgagaaatctttcctttgaggagggcaatgttaagctcttggcagctaatcgtacctgtcttcgtttcctattactttctgcacatagtcattttatttctttaaggcaattaggccttgacacattaggaaatattgcagctgagcttttactggaccctgttgatttcaaaactactcatctgatgtttcatactgttacaaaatgtctaatgtcaagggatagatttttaaagatgagaggcatggaaattttgggaaatctttgcaaagcagaagataatggtgttttaatttgtgaatatgtggatcaggattcctacagagagatcatttgtcatctcactttacctgatgtgctgcttgtaatctcaacactcgaggtgctatacatgctcacggaaatgggagatgttgcttgcacaaaaattgcaaaagtagaaaagagcatagacatgttagtgtgtctggtttctatggatattcagatgtttggccctgatgcactagctgcggtaaaactcattgaacacccaagttccagtcatcaaatgttatctgaaattaggccacaagctatagagcaagtccaaacccagactcatgtagcatctgccccagcttccagagcagttgtagcgcagcatgttgctccacctccaggaatagtggaaatagatagtgagaagtttgcttgtcagtggctaaatgctcattttgaagtaaatccagattgttctgtttctcgagcagaaatgtattctgaatacctctcgacttgcagtaaattagctcgtggtggaatcctaacatcaactggattttataaatgtcttagaacggtctttccaaatcatacagtgaagagagtggaggattccagtagcaatgggcaggcacatattcatgtggtaggagtaaaacggagggctataccacttcccattcagatgtactatcagcagcaaccagtttctacttctgttgttcgtgttgattctgttcctgatgtatctcctgctccttcacctgcaggaatccctcatggatcacaaaccataggaaaccattttcagaggactcctgttgccaaccaatcttcaaatctgactgcaacacaaatgtcttttcctgtacaaggtgttcatactgtggcacaaactgtttcaagaattccacaaaatccttcacctcatacccaccagcaacaaaatgctccagtgactgtcattcaaagtaaagctccaattccttgtgaagttgttaaggctacagttatccagaattccataccccagacaggagttcctgttagtattgctgttggaggaggacctccacagagttctgttgttcagaatcatagtacagggccacaacctgttacagttgtgaattctcagacattgcttcaccatccatctgtaattccacagcagtctccattacacacagtggtaccaggacagatcccttcaggcactcctgttacagtaattcaacaagctgtcccacagagtcatatgtttggcagagtacagaacataccagcatgtacttctacagtttcacagggtcaacagttaatcaccacatcaccccaacctgtgcaaacttcatctcaacagacatcagctggtagccagtcacaagatactgttatcatagcacccccacagtatgtaacaacttctgcatccaatattgtctcagcaacttcagtacagaattttcaggtagctacaggacaaatggttactattgctggtgtcccaagtccacaagcctcaagggtagggtttcagaacattgcaccaaaacctctcccttctcagcaagtttcatctacagtggtacagcagcctattcaacaaccacagcagccaacccaacaaagcgtagtgattgtaagccagccagctcaacaaggtcaaacttatgcaccagccattcaccaaattgttcttgctaatccagcagctcttccagctggtcagacagttcagctaactggacaacctaacataactccatcttcttcaccatcacctgtcccagctactaataaccaagtccctactgccatgtcgtcgtcctctacccctcaatcacagggaccacctcctactgtcagtcaaatgttatctgtgaaaaggcagcaacagcagcaacattcaccagcacccccaccacagcaggtacaagtacaagttcagcagccccaacaagtacagatgcaagttcaacctcaacagtcgaatgcaggagttggtcagcctgcctctggtgagtcgagtctgattaaacagcttctgcttccgaaacgtggtccttcaacaccaggtggtaagcttattctcccagctccacagattcctccccctaataatgcaagagctcctagccctcaggtggtctatcaggtggccagtaaccaagccgcaggttttggagtgcaggggcaaactccagctcagcagctattggttgggcagcaaaatgttcagttggtcccaagtgcaatgccaccctcagggggagtacaaactgtgcccatttcgaacttacaaatattgccaggtccactgatctcaaatagcccagcaaccattttccaagggacttctggcaaccaggtaaccataacagttgtgccaaatacgagttttgcacctgcaactgtgagtcagggaaatgcaactcagctcattgctccagcaggaattaccatgagcggaacgcagacaggagttggacttccagtacaaacgcttccagccactcaagcatctcctgctggacaatcatcatgtactactgctactcccccattcaaaggtgataaaataatttgccaaaaggaggaggaagcaaaggaagcaacaggtttacatgttcatgaacgtaaaattgaagtcatggagaacccgtcctgccgacgaggagccacaaacaccagcaatggggatacaaaggaaaatgaaatgcatgtgggaagtcttttaaatgggagaaagtacagtgactcaagtctacctccttcaaactcagggaaaattcaaagtgagactaatcagtgctcactaatcagtaatgggccatcattggaattaggtgagaatggagcatctgggaaacagaactcagaacaaatagacatgcaagatatcaaaagtgatttgagaaaaccgctagttaatggaatctgtgattttgataaaggagatggttctcatttaagcaaaaacattccaaatcataaaacttccaatcatgtaggaaatggtgagatatctccaatggaaccacaagggactttagatatcactcagcaagatactgccaaaggtgatcaactagaaagaatttctaatggacctgtattaactttgggtggttcatctgtgagcagtatacaggaggcttcaaatgcggcaacacagcaatttagtggtactgatttgcttaatggacctctagcttcaagtttgaattcagatgtgcctcagcaacgcccaagtgtagttgtctcaccacattctacaacctctgttatacagggacatcaaatcatagcagttcccgactcaggatcaaaagtatcccattctcctgccctatcatctgacgttcggtctacaaatggcacagcagaatgcaaaactgtaaagaggccagcagaggatactgatagggaaacagtcgcaggaattccaaataaagtaggagttagaattgttacaatcagtgaccccaacaatgctggctgcagcgcaacaatggttgctgtgccagcaggagcagatccaagcactgtagctaaagtagcaatagaaagtgctgttcagcaaaagcaacagcatccaccaacatatgtacagaatgtggtcccgcagaacactcctatgccaccttcaccagctgtacaagtgcagggccagcctaacagttctcagccttctccattcagtggatccagtcagcctggagatccaatgagaaaacctggacagaacttcatgtgtctgtggcagtcttgtaaaaagtggtttcagacaccctcacaggttttctaccatgcagcaactgaacatggaggaaaagatgtatatccagggcagtgtctttgggaaggttgtgagccttttcagcgacagcggttttcttttattacccacttgcaggataagcactgttcaaaggatgccctacttgcaggattaaaacaagatgaaccaggacaagcaggaagtcagaagtcttctaccaagcagccaactgtagggggcacaagctcaactcctagagcacaaaaggccattgtgaatcatcccagtgctgcacttatggctctgaggagaggatcaagaaaccttgtctttcgagattttacagatgaaaaagagggaccaataactaaacacatccgactaacagctgccttaatattaaaaaatattggtaaatattcagaatgtggtcgcagattgttaaagagacatgaaaataacttatcagtgctagccattagtaacatggaagcttcctccacccttgccaaatgcctttatgaacttaattttacagttcagagtaaggaacaagaaaaagactcagaaatgctgcagtgaaaaataattccacttacacagtgggggactcaaagtcagccacatttcacatactgttactgaagaaagcaccaagtcttaatggaacaaagaccatagaatgaattattttatctcctcccatgatgctgagaggaagcttcgtattctgatctctgagtgaatccctttgttctctgtttaaaaaaatctaaaaagaaaaaggaaaaaaaaaaaagaactgctgtgggattgtcaaccagcttatctgcaggatgtttcagatctgataaatcctgatggaaactggtatgatcagaattcagtaccatccacattggaatatacatggaatattgtaaaacctacatgagcagatgaaatagaagcattaaatatttttatctatatccaaaaaggagcacatttttatatttacaaaaccgtttaagctggtttgaataatttaaaaaagtttcagcacacctatacccccgatctcagagggggccaccaatatctagctatggatcgtgtgttttgtttagaaatcagtagcttggttttcttacttgagccaatatattttcacttatttattatcataaaaatttaccagtctgaatagatcttgtaaatatttgtgaatagaatgaatacctttcatgccactgcagccactggaaatacattctgtggtgtcctagaagcattattggtaggttctaaagttttctagactttcctgtcaattgtaagtaattgtgatatattctatgcagtggatgaatgttctttaaatttgtgtaaatacttctgcaaaggtactgatgctgtaaagtcaaaacagttttgtggaactgtgatttttttttcttttttctttttttttttctttttttttttgtattatacaccttgtagaactcattttgctggctgaaagagtatggaataatatatctcatgtcattttttagaagaaaaactatttgaaggtattttttggttttccttaacatgtatccactgtaaacgtttgtcgtgtacaagctcagagcttggacagaattttttgtatttgtaaattggtttaaatacatggaattttatacaggttttctcctgtgttatatatgcattatgtgcaggtatgatattttcttcactactttttctatcttaatatagtgtggaattttattgtattattcttccattcttaatactgtaccacattcctgctcagaaactgctcacttccttaaattgtcttttttcccccagcgtgaaatgtatccatttataactgcctattgcctgttctattagcatccaaaaatgtggaaggcctcccaaccaccatttctgctgtgtccttaggatgtgcagtaaaaaatatagacctaacagtttatgttatagaatggctttatttactttggtgactgtttatagtttttaaataaaagactgaacattttcttgagtccttcatttctgagtatgcttaagacatcttaaaaatatagagagaattctaaattcagctgaaggcaaggtataacggtcacctacctatttgattatatgttgattgataacatattaaatagagaacaaataagagaggtcctttacatgacaaatttgcatgaaataagcagattaaccaagtatttatttttcatcttgttataatgcagagcaaatgtagagaacagcaaatgattgatgcagttaaagctcaatatgcctttttttactggatactgtacatttggctaaaagcttttattgtttgatgttgtgtttcttgactgtttattcagaatcacagtgtatccaaatcttcagcttgaatttggaggcagattcttagagtgaaaaagcctcagtttccatattaaaaatgttttaaatattttgattgaattagtaccaatgtaaaatctagtttcttcctgaaggaggatccctggcgctgtcctgccatgtctcaaaggaatgtttgagaaacttcatctaatattagttataaggttgtggaatttatgcttggcccaccttccaagactggcactgcccaacagacaccgctgaaatcatgtgggtatccctaggatggccttcagagccctcaaacttacaagcacctggtagttgacatcatatggggaattttctattcaccgtacttatccaaaaatctcttttaaaaagtaaatttgtgcaacaacgtttatttgaaagataatgtcttctcaaaatcagaaactgcagtggtaattaaattaatagaaaagagaacaaactgcaggtttagaaaaatggttttcatattcaccattcttccacctcattgaattgcatgctgtagttctagcttttctgctataatatgtaaatatgactgtagccttttaagcttcagtctcagcagagaatttcctaaatgcgtttgacctaatgaaactgatcatggcttcccacttaggtttttcttcttatagctttatagaactatataataatatggacttgctgtgtaatggaattaaagtgcttttgcacaataagttctgcaaaaccctctcattcatgaaaaggtgctccttgctagacagaaacttgctgatttacagtattgttatttttgtctaaagttctgtaaatacatgctttaatgttatctttgagaaatctatgtaaataatatagtctacaacatagagactgtataattctgtgttatatatgtgcctagtgctctgttggcactcaataaattttaagtaacaaaattgataatcatatagcgaaggcatatttttcttccaagctcaagtcaggattgtgactatatattaatgagactcagtaatccaacccacacctgagaactcgtctcattactttatagtcatgtcatgtatgtttttttaaccatgaaatgacaataaaatgatttttaaaatg

SEQ ID NO: 599 - DNA, 1865 bp, HOMO SAPIENS
ggctcccgtctccgcccagtcgtaggcgctggccgctgacatgttgaggactacgcgcggcccaggcctgggccccccgctgctccaggccgcgctgggccttgggcgggctgggtggcactggcctgcgggccgggcggcgagcggggggcgcgggcgggcctggctgcagcccacgggccgggagacgggtgtgcaggtgtacaacagcctcaccgggaggaaggaacccctaatcgtggcgcacgccgaagccgcctcctggtatagctgtggaccaactgtatatgatcatgcgcaccttggccatgcttgctcatatgttagatttgatatcattcgaaggatcctaaccaaggtttttggatgcagcatagtcatggtgatgggtattacagatgtagatgataaaatcatcaaaagagccaatgagatgaatatttcccccgcttccctcgccagtctttatgaggaagacttcaagcaggacatggcagccctgaaggttctcccacccacggtgtacctgagggtaaccgaaaatattcctcagataatttctttcattgaaggaatcattgctcgtgggaacgcttattcaacggcaaaaggcaatgtctacttcgatctgaagtctagaggagacaagtatggcaaattggtcggcgtggtccctggtccagtcggagagccagcggactctgacaagcgtcatgccagtgacttcgccctgtggaaggcggccaaaccccaggaggtgttctgggcctctccctggggacccgggaggccgggctggcacatcgagtgctctgccatcgctagtatggtatttggaagtcaactggatatccattcaggtgggatagatttagcttttccacatcatgaaaacgaaattgcacagtgcgaagtctttcatcagtgcgagcagtggggaaattattttctgcattctgggcatttgcacgccaaaggcaaagaagaaaaaatgtccaaatcattaaagaactacattactattaaggactttctgaagaccttttcccccgatgtcttccggttcttctgcctgcggagcagctaccgctcagccatcgactacagtgacagcgccatgctccaagctcagcagctgctcctggggctgggctctttcctggaggacgcacgtgcctacatgaaggggcagctggcctgcggctccgtcagggaagcgatgctgtgggagaggctctccagcaccaagagggccgtgaaggcggccttggcagatgattttgacacacccagggtggttgatgccatcctgggccttgcacaccacgggaatggacagctcagggcgtccctgaaggaacctgaagggccgagaagtcctgctgtgtttggtgccatcatctcttactttgaacagttttttgaaactgttggaatttctctggcaaatcaacagtacgtttcaggagacggcagcgaggctaccttgcatggtgtggtggacgagctggtgcggttccggcagaaggtccggcagtttgcgctggccatgcccgaggccacgggggacgcccggcggcagcagctcctagaaaggcagcccctgctggaagcatgcgacaccctgcgccggggcctgactgcccacggcatcaacatcaaggacagaagcagtacaacatccacgtgggaactgctggatcaaaggacaaaagaccaaaaatcagcgggctgaggatggagcacagccatgaacctgctcacgacaagacgcacccatgcttctcagggtcaaggctttatgttaaagcttcctgtcggggctgctaggtcagcattaaagtaaggcaaccaacagtgtcaaa

SEQ ID NO: 600 - DNA, 2007 bp, HOMO SAPIENS
aggcccgggtgtccggcggagggggcggtgccctcggcgtctccgtgactgcgcctctgcgcccgcgtcttgccgcggctcccgggatgcgcggaggcggtggcgatggcgatgatgcctctagtcctgcatcatccagagcggcaggcggagctggggtccggactgcgagatggaggaggggcggcgctgcggccacccggcagactggtcaaacaaatggattttacagaggcttacgcggacacgtgctctacagttggacttgctgccagggaaggcaatgttaaagtcttaaggaaactgctcaaaaagggccgaagtgtcgatgttgctgataacaggggatggatgccaattcatgaagcagcttatcacaactctgtagaatgtttgcaaatgttaattaatgcagattcatctgaaaactacattaagatgaagacctttgaaggtttctgtgctttgcatctcgctgcaagtcaaggacattggaaaatcgtacagattcttttagaagctggggcagatcctaatgcaactactttagaagaaacgacaccattgtttttagctgttgaaaatggacagatagatgtgttaaggctgttgcttcaacacggagcaaatgttaatggatcccattctatgtgtggatggaactccttgcaccaggcttcttttcaggaaaatgctgagatcataaaattgcttcttagaaaaggagcaaacaaggaatgccaggatgactttggaatcacacctttatttgtggctgctcagtatggcaagctagaaagcttgagcatacttatttcatcgggtgcaaatgtcaattgtcaagccttggacaaagctacacccttgttcattgctgctcaagagggacacacaaaatgtgtggagcttttgctctccagtggggcagatcctgatctttactgtaatgaggacagttggcagttacctattcatgcagctgcacaaatgggccatacaaaaatcttggacttgttaataccacttactaaccgggcctgtgacactgggctaaacaaagtaagccctgtttactcagcagtgtttgggggacatgaagattgcctagaaatattactccggaatggctacagcccagacgcccaggcgtgccttgtttttggattcagttctcctgtgtgcatggctttccaaaaggactgtgagttctttggaattgtgaacattcttttgaaatatggagcccagataaatgaacttcatttggcatactgcctgaagtacgagaagttttcgatatttcgctactttttgaggaaaggttgctcattgggaccatggaaccatatatatgaatttgtaaatcatgcaattaaagcacaagcaaaatataaggagtggttgccacatcttctggttgctggatttgacccactgattctactgtgcaattcttggattgactcagtcagcattgacacccttatcttcactttggagtttactaattggaagacacttgcaccagctgttgaaaggatgctctctgctcgtgcctcaaacgcttggattctacagcaacatattgccactgttccatccctgacccatctttgtcgtttggaaattcggtccagtctaaaatcagaacgtctacggtctgacagttatattagtcagctgccacttcccagaagcctacataattatttgctctatgaagacgttctgaggatgtatgaagttccagaactggcagctattcaagatggataaatcagtgaaactacttaacacagctaatttttttctctgaaaaatcatcgagacaaaagagccacagagtacaagtttttatgattttatagtcaaaagatgattattgattgtgagataggttaggttttggggggccagtagttcagtgagaatgtttatgtttacaactagccttcccagtaaaaaaaaaaaaaaaaaaaaaaaaaaaaaaaaaaaaaaaaaaaaaaa

SEQ ID NO: 601 - DNA, 422 bp, HOMO SAPIENS
  misc_feature (309)..(309): n is a, c, g, or t
  misc_feature (318)..(318): n is a, c, g, or t
  misc_feature (322)..(322): n is a, c, g, or t
  misc_feature (379)..(379): n is a, c, g, or t
gccctctcaagttgctcttgaatgttgattcaactcattaggacatacttggatgatgaattagaaggagcatctttgccctctacttacagatcctaggaacaatttgtggaattatcagtaagcaatatctgtaacagataaaatgtctgctttccctttgcccctcttagcctatgacatgccacatccaatttgtcttcgttccaactgtgagaggtcttaatttcatcattctggccttttgcagttaaatattctccaaggatatgatctatggggagaggactgatagtggaactaatcttncaaggttcntgcnttaagcaattgtagataacataggagaagaaactctggaaacaattatgattatccntagttctgcccctgtggaaattcaatccgaaacccttcatgtt

SEQ ID NO: 602 - DNA, 3105 bp, HOMO SAPIENS
ggggaggaggccgcgcggggtggggtctggcggtacgcgctggctgcgtcgacgtgctgacgccatgacgccccggctggtgtgtgtcggtgtgtatgtgtgtgtgtgagtgtgcgcgctccgagtgtgtgtgtatttgtgtatcggcggtcccgcaggtcccggatgttgcggacagtatgaggcaagcgcagggggacggggaccagcagctgtcgccgccgctctcagatcgagtcttgctctgtcacccaggctggagtgcagtggcgcgatctcagctcactgccacctttgcctcctgggttcaagcgattcttctgcctcagcctcccgagtagctgggattacaggctctgggaaccacccttctactttctgtctctaggaatttcactactctagggtgaagagggaacagaaatctttgccccctgactttggaaatctcgtttaaccttcaaactggcgatgtcaagggttccaagtcctccacctccggcagaaatgtcgagtggccccgtagctgagagttggtgctacacacagatcaaggtagtgaaattctcctacatgtggaccatcaataactttagcttttgccgggaggaaatgggtgaagtcattaaaagttctacattttcatcaggagcaaatgataaactgaaatggtgtttgcgagtaaaccccaaagggttagatgaagaaagcaaagattacctgtcactttacctgttactggtcagctgtccaaagagtgaagttcgggcaaaattcaaattctccatcctgaatgccaagggagaagaaaccaaagctatggagagtcaacgggcatataggtttgtgcaaggcaaagactggggattcaagaaattcatccgtagagattttcttttggatgaggccaacgggcttctccctgatgacaagcttaccctcttctgcgaggtgagtgttgtgcaagattctgtcaacatttctggccagaataccatgaacatggtaaaggttcctgagtgccggctggcagatgagttaggaggactgtgggagaattcccggttcacagactgctgcttgtgtgttgccggccaggaattccaggctcacaaggctatcttagcagctcgttctccggtttttagtgccatgtttgaacatgaaatggaggagagcaaaaagaatcgagttgaaatcaatgatgtggagcctgaagtttttaaggaaatgatgtgcttcatttacacggggaaggctccaaacctcgacaaaatggctgatgatttgctggcagctgctgacaagtatgccctggagcgcttaaaggtcatgtgtgaggatgccctctgcagtaacctgtccgtggagaacgctgcagaaattctcatcctggccgacctccacagtgcagatcagttgaaaactcaggcagtggatttcatcaactatcatgcttcggatgtcttggagacctctgggtggaagtcaatggtggtgtcacatccccacttggtggctgaggcataccgctctctggcttcagcacagtgcccttttctgggacccccacgcaaacgcctgaagcaatcctaagatcctgcttgttgtaagactccgtttaatttccagaagcagcagccactgttgctgccactgaccaccaggtagacagcgcaatctgtggagcttttactctgttgtgaggggaagagactgcattgtggccccagacttttaaaacagcactaaataacttgggggaaacggggggagggaaaatgaaatgaaaaccctgttgctgcgtcactgtgttccctttggcctggctgagtttgatactgtggggattcagtttaggcgctggcccgaggatatcccagcggtggtacttcggagacacctgtctgcatctgactgagcagaacaaatcgtcaggtgcctggagcaaaaaggaaaaaaaaaaaagaaaggacattgagttttaacagaagggaaaaggaaagaagaaaagatttttgcagaatttctcaaaaatcagtttgtggattccagtagtatttatattgagagaaacaaattttagtccttctaactgtgctaaaacttggatatttgtgaaaactccttaccaccatacaagcatcagaagagctctcttgttgttagcacttattgtttgcaagaacagaatacatccttttatccttttatgaaaaatgacaagtgaaggcaaaaggggaaggttatttgatctggaagatgagtgttctgatgtggtggcttttgcaaaaatctttattggtgttgaaaactggaaaaaataactcatccagaattcatattgtcttgacaagaactatggttctctgtttttagatattgtggaaaatgtttttgggcatttttctctgattttatttcttctcccccacccctttttctaaaaaacaaacaaaaaaaaaaacacacaaaacaaaaacagaacaaaagaagagagaaggaaattttatcaattaaaaatgctgtgtgataaaatcccagcccagattgctcagctgtttgtacctgacttgccgcctgcataggagccagttctgttccttctgactagcccctcttcctccaggggagaacttccaaatgttaatttttttttttttgaaaatataaataattactattttgtactgtgtggtatctctggtcttttgtttcactcacctgccttgtctcttgggtctgagtcccttgcttaagggattttgaagtcctagttttcagcttgcagagattatgtctgaaatgcctaatgagtcgcagggatttgttgagactccgtaatctcaagttctctttgtgagctatcagcatctgccagtctcttgtcctccctgagtatctcacagtccatatcctgatgagggatcaggcccctacctctgccaaggcaagtaatggtagtgggcttttaaactgccccccgtatgttttaagacctaatccccacctcccttcttctaactaaatataaaaagatccaggggacataaatgtggagattaaataaagggaaattattgtctctaaaaaaaaaaaaaaaaa

SEQ ID NO: 603 - DNA, 335 bp, HOMO SAPIENS
ctttacttattcactaacagctatagtttttcatctctaagccctcaaagactcgttttgttcctctgcttcatcctccatccacatttgcatcctccatccactgcgtaatccgtctttgggaatagcttgtaaatgccctgggtattgtgaacctctgaagttgaaatctcacaatgcatctctaggtgctaagtgcatttctagggtaaaattgcacaatgcaagatgcactgtgataaatgtaagacagtgacattcaatttgaactgcatgaaataaatcatttggcaaagtcctgaaaggcataatatgtcatttctgttggttgatgt

SEQ ID NO: 604 - DNA, 1226 bp, HOMO SAPIENS
ccgggacgtggagacccggggtcccggcagccgggcggcccgcgggcccagggtggggatgcaccgccgcggggtgggagctggcgccatcgccaagaagaaacttgcagaggccaagtataaggagcgagggacggtcttggctgaggaccagctagcccagatgtcaaagcagttggacatgttcaagaccaacctggaggaatttgccagcaaacacaagcaggagatccggaagaatcctgagttccgtgtgcagttccaggacatgtgtgcaaccattggcgtggatccgctggcctctggaaaaggattttggtctgagatgctgggcgtgggggacttctattacgaactaggtgtccaaattatcgaagtgtgcctggcgctgaagcatcggaatggaggtctgataactttggaggaactacatcaacaggtgttgaagggaaggggcaagttcgcccaggatgtcagtcaagatgacctgatcagagccatcaagaaactaaaggcacttggcactggcttcggcatcatccctgtgggcggcacttacctcattcagtctgttccagctgagctcaatatggatcacaccgtggtgctgcagctggcagagaagaatggctacgtgactgtcagtgagatcaaagccagtcttaaatgggagaccgagcgagcgcggcaagtgctggaacacctgctgaaggaagggttggcgtggctggacttacaggccccaggggaggcccactactggctgccagctctcttcactgacctctactcccaggagattacagctgaggaggccagagaagccctcccctgactgcatgtggaagggcacacagcagcaggcagggaggaggcggaggtggcaaataaacctgggcaattttgtttatacaaaaaatagaaaaaaagttccaagtttttctttcttccctcattcttttatttttgaaaagtgccttcacgttgcatttttattggaggaaaacctcgctcgttcagtaagcataatctgattaacacagagaacggcaagcacatataaaatgatttttgtaggtcatctgcaagttcatggaagagctgggcctagaatgtgggttgtttcctggcctgtctagtctttgtagctgtgagacatagattacagcctatgctaattcaaaccttttaaataaaatgttccttatctcaaaaaaaaaaaaaaa

SEQ ID NO: 605 - DNA, 3520 bp, HOMO SAPIENS
cgcgtcctgtcccggcgccttccgcgcaccggccaccgccagtctccgagccccgtgacctgcaggtcctccggccgcgactccgggccggccctgcgtggtggctgtcggggggcgcgcggggaagcagcggaacttgcggtgtgaggggccggcggggcccggagcggtccccggcccgggaaacttggaccgagaccaggccggcgaccaccaggggcctgaggatgaagccaagtctgctgtgccggcccctgtcctgcttccttatgctgctgccctggcctctcgccaccctgacatcaacaaccctttggcagtgcccacctggggaggagcccgacctggacccagggcagggcacattatgcaggccctgccccccaggcaccttctcagctgcatggggctccagcccatgccagccccatgcccgttgcagcctttggaggaggctggaggcccaggtgggcatggcaactcgagatacactctgtggagactgctggcctgggtggtttgggccttggggggttccccgcgttccatgtcaaccatgttcctgggcacctctgggtactcatggctgtgatgagtgggggcggcgggcccgacgtggcgtggaggtggcagcaggggccagcagcggtggtgagacacggcagcctgggaacggcacccgggcaggtggcccagaggagacagccgcccagtacgcggtcatcgccatcgtccctgtcttctgcctcatggggctgttgggcatcctggtgtgcaacctcctcaagcggaagggctaccactgcacggcgcacaaggaggtcgggcccggccctggaggtggaggcagtggaatcaaccctgcctaccggactgaggatgccaatgaggacaccattggggtcctggtgcgcttgatcacagagaagaaagagaatgctgcggccctggaggagctgctgaaagagtaccacagcaaacagctggtgcagacgagccacaggcctgtgtccaagctgccgccagcgcccccgaacgtgccacacatctgcccgcaccgccaccatctccacaccgtgcagggcctggcctcgctctctggcccctgctgctcccgctgtagccagaagaagtggcccgaggtgctgctgtcccctgaggctgtagccgccactactcctgttcccagccttctgcctaacccgaccagggttcccaaggccggggccaaggcagggcgtcagggcgagatcaccatcttgtctgtgggcaggttccgcgtggctcgaattcctgagcagcggacaagttcaatggtgtctgaggtgaagaccatcacggaggctgggccctcgtggggtgatctccctgactccccacagcctggcctcccccctgagcagcaggccctgctaggaagtggcggaagccgtacaaagtggctgaagcccccagcagagaacaaggccgaggagaaccgctatgtggtccggctaagtgagagcaacctggtcatctgaggggcggtctagtctaaggacactgcggccctgccctgggaggttccgaaggcttcctggaggaggtggagctgcagctgggactgtgaggaccgagaagcaatggcccagcagacgagacagcaaagaccaaggcctggaggtgggagcgtctgccccagtgaggaggcaggtggccggcgggcactgtgtacaggagcaggctgagccccgcccctggccctgctgccatgttgctcccctgaaggatgccccgacccccgtgcctgccctggctggatcctaggagcccacgggattctctgtatcatcagaggctgggcttggcagaggggaggggcctgtgcccgtcacccctggccccattccttggtaattagccacacccttgcctctgtacagggccctagagcagatgtgcgtccccctcctcttccagcaggtctataaagggaaggggtagcagaaagtcctgggctaggagagtgagtccctgggttctaatcttgggcacatctgtggccatcgctgggtccatttttctgactgtgaagtaaggagagacgtctcagtacccagggcctcttcagctctttgtaggttctgggctgggttgtgggggactggggagctgggctctaccatccctcccattagtagctttatccagccccgtttttgctgcttccagggcctctgccttcaaggcccccatggggctgtccatccatggctctgcctacggaaggggcttaatgcatgtgcctgcccctcccccagctgtttttaatgaaactgaaaaaatagacttgatcccggcaggactgtgatacagagccctagcctgcccagccagccccaagatctcaggagctttagggagaagacttggtggggctggagcacaccttgggcctcagtggtttctgtgtccctgtggtgccagtgcttctgggcagtgcaggcggctgccaggcccagccctgacttccactctggctcagcaacctggttatttatgtggggccgtgcaggcatgggcccactgcctgtccatcctgtttctcttatttattgaaactcaccattgccctatccttgtgtctccacccccttccatgtgttgaataataaaaggtgggaaagtgctgtcacgaggagctccttttctctgtgcccttcccagcttatccgcctgttccacttgtacctgtccagccctgccctgtgttgggcaccgtgacaggctgccctcccctcacagttcctgcacctcagcagccagggaagcagggcccagaggagacccatcaactcatctggttctcaccaaagcccctagctagaggcagggctgtcccacagaaatagtgtgagccacatatgtgactttaaattttctgacagtcacatttcaaaaagtaaaaagaagcaggtgaacttaatttttttttaacccagtctatccaaaatattttcatttcaatataaaatcagtataaaaagtgtgaatgagctgtttttgcttttgctttgaaatctggagtgtatcttacacatcttgattggaactcaaatatttcaagggctccatagccacgtggccagcagctaccacactggtcagcgcagcacctgaggaaatgcactgtgtggagcccgggaggtaattgggggtgaggaagatgtgcgggccagggaatgtgttccacagagagggacagcatgtgcaaaggctgagcaccaacacatagtggtcacctgggccttatgcccagggagcctccaaagcattcagctcctgcttggccagtgtggagaggaaaggagccacaggagcgggtgctacacccggcaagacagagcgtctccatctaaaattcctagggcaagcttccaacccggcccaagggccgcatgtggcccaggatatggctttgaatggggcctaacacaaattcataaactttcttaaaacattgaaaaaaaaaaaaaaaaaa

SEQ ID NO: 606 - DNA, 7933 bp, HOMO SAPIENS
ccgaccaacaccaacacccagctccgacgcagctcctctgcgcccttgccgccctccgagccacagctttcctcccgctcctgcccccggcccgtcgccgtctccgcgctcgcagcggcctcgggagggcccaggtagcgagcagcgacctcgcgagccttccgcactcccgcccggttccccggccgtccgcctatccttggccccctccgctttctccgcgccggcccgcctcgcttatgcctcggcgctgagccgctctcccgattgcccgccgacatgagctgcaacggaggctcccacccgcggatcaacactctgggccgcatgatccgcgccgagtctggcccggacctgcgctacgaggtgaccagcggcggcgggggcaccagcaggatgtactattctcggcgcggcgtgatcaccgaccagaactcggacggctactgtcaaaccggcacgatgtccaggcaccagaaccagaacaccatccaggagctgctgcagaactgctccgactgcttgatgcgagcagagctcatcgtgcagcctgaattgaagtatggagatggaatacaactgactcggagtcgagaattggatgagtgttttgcccaggccaatgaccaaatggaaatcctcgacagcttgatcagagagatgcggcagatgggccagccctgtgatgcttaccagaaaaggcttcttcagctccaagagcaaatgcgagccctttataaagccatcagtgtccctcgagtccgcagggccagctccaagggtggtggaggctacacttgtcagagtggctctggctgggatgagttcaccaaacatgtcaccagtgaatgtttggggtggatgaggcagcaaagggcggagatggacatggtggcctggggtgtggacctggcctcagtggagcagcacattaacagccaccggggcatccacaactccatcggcgactatcgctggcagctggacaaaatcaaagccgacctgcgcgagaaatctgcgatctaccagttggaggaggagtatgaaaacctgctgaaagcgtcctttgagaggatggatcacctgcgacagctgcagaacatcattcaggccacgtccagggagatcatgtggatcaatgactgcgaggaggaggagctgctgtacgactggagcgacaagaacaccaacatcgctcagaaacaggaggccttctccatacgcatgagtcaactggaagttaaagaaaaagagctcaataagctgaaacaagaaagtgaccaacttgtcctcaatcagcatccagcttcagacaaaattgaggcctatatggacactctgcagacgcagtggagttggattcttcagatcaccaagtgcattgatgttcatctgaaagaaaatgctgcctactttcagttttttgaagaggcgcagtctactgaagcatacctgaaggggctccaggactccatcaggaagaagtacccctgcgacaagaacatgcccctgcagcacctgctggaacagatcaaggagctggagaaagaacgagagaaaatccttgaatacaagcgtcaggtgcagaacttggtaaacaagtctaagaagattgtacagctgaagcctcgtaacccagactacagaagcaataaacccattattctcagagctctctgtgactacaaacaagatcagaaaatcgtgcataagggggatgagtgtatcctgaaggacaacaacgagcgcagcaagtggtacgtgacgggcccgggaggcgttgacatgcttgttccctctgtggggctgatcatccctcctccgaacccactggccgtggacctctcttgcaagattgagcagtactacgaagccatcttggctctgtggaaccagctctacatcaacatgaagagcctggtgtcctggcactactgcatgattgacatagagaagatcagggccatgacaatcgccaagctgaaaacaatgcggcaggaagattacatgaagacgatagccgaccttgagttacattaccaagagttcatcagaaatagccaaggctcagagatgtttggagatgatgacaagcggaaaatacagtctcagttcaccgatgcccagaagcattaccagaccctggtcattcagctccctggctatccccagcaccagacagtgaccacaactgaaatcactcatcatggaacctgccaagatgtcaaccataataaagtaattgaaaccaacagagaaaatgacaagcaagaaacatggatgctgatggagctgcagaagattcgcaggcagatagagcactgcgagggcaggatgactctcaaaaacctccctctagcagaccaggggtcttctcaccacatcacagtgaaaattaacgagcttaagagtgtgcagaatgattcacaagcaattgctgaggttctcaaccagcttaaagatatgcttgccaacttcagaggttctgaaaagtactgctatttacagaatgaagtatttggactatttcagaaactggaaaatatcaatggtgttacagatggctacttaaatagcttatgcacagtaagggcactgctccaggctattctccaaacagaagacatgttaaaggtttatgaagccaggctcactgaggaggaaactgtctgcctggacctggataaagtggaagcttaccgctgtggactgaagaaaataaaaaatgacttgaacttgaagaagtcgttgttggccactatgaagacagaactacagaaagcccagcagatccactctcagacttcacagcagtatccactttatgatctggacttgggcaagttcggtgaaaaagtcacacagctgacagaccgctggcaaaggatagataaacagatcgactttaggttatgggacctggagaaacaaatcaagcaattgaggaattatcgtgataactatcaggctttctgcaagtggctctatgatgctaaacgccgccaggattccttagaatccatgaaatttggagattccaacacagtcatgcggtttttgaatgagcagaagaacttgcacagtgaaatatctggcaaacgagacaaatcagaggaagtacaaaaaattgctgaactttgcgccaattcaattaaggattatgagctccagctggcctcatacacctcaggactggaaactctgctgaacatacctatcaagaggaccatgattcagtccccttctggggtgattctgcaagaggctgcagatgttcatgctcggtacattgaactacttacaagatctggagactattacaggttcttaagtgagatgctgaagagtttggaagatctgaagctgaaaaataccaagatcgaagttttggaagaggagctcagactggcccgagatgccaactcggaaaactgtaataagaacaaattcctggatcagaacctgcagaaataccaggcagagtgttcccagttcaaagcgaagcttgcgagcctggaggagctgaagagacaggctgagctggatgggaagtcggctaagcaaaatctagacaagtgctacggccaaataaaagaactcaatgagaagatcacccgactgacttatgagattgaagatgaaaagagaagaagaaaatctgtggaagacagatttgaccaacagaagaatgactatgaccaactgcagaaagcaaggcaatgtgaaaaggagaaccttggttggcagaaattagagtctgagaaagccatcaaggagaaggagtacgagattgaaaggttgagggttctactgcaggaagaaggcacccggaagagagaatatgaaaatgagctggcaaaggcatctaataggattcaggaatcaaagaatcagtgtactcaggtggtacaggaaagagagagccttctggtgaaaatcaaagtcctggagcaagacaaggcaaggctgcagaggctggaggatgagctgaatcgtgcaaaatcaactctagaggcagaaaccagggtgaaacagcgcctggagtgtgagaaacagcaaattcagaatgacctgaatcagtggaagactcaatattcccgcaaggaggaggctattaggaagatagaatcggaaagagaaaagagtgagagagagaagaacagtcttaggagtgagatcgaaagactccaagcagagatcaagagaattgaagagaggtgcaggcgtaagctggaggattctaccagggagacacagtcacagttagaaacagaacgctcccgatatcagagggagattgataaactcagacagcgcccatatgggtcccatcgagagacccagactgagtgtgagtggaccgttgacacctccaagctggtgtttgatgggctgaggaagaaggtgacagcaatgcagctctatgagtgtcagctgatcgacaaaacaaccttggacaaactattgaaggggaagaagtcagtggaagaagttgcttctgaaatccagccattccttcggggtgcaggatctatcgctggagcatctgcttctcctaaggaaaaatactctttggtagaggccaagagaaagaaattaatcagcccagaatccacagtcatgcttctggaggcccaggcagctacaggtggtataattgatccccatcggaatgagaagctgactgtcgacagtgccatagctcgggacctcattgacttcgatgaccgtcagcagatatatgcagcagaaaaagctatcactggttttgatgatccattttcaggcaagacagtatctgtttcagaagccatcaagaaaaatttgattgatagagaaaccggaatgcgcctgctggaagcccagattgcttcagggggtgtagtagaccctgtgaacagtgtctttttgccaaaagatgtcgccttggcccgggggctgattgatagagatttgtatcgatccctgaatgatccccgagatagtcagaaaaactttgtggatccagtcaccaaaaagaaggtcagttacgtgcagctgaaggaacggtgcagaatcgaaccacatactggtctgctcttgctttcagtacagaagagaagcatgtccttccaaggaatcagacaacctgtgaccgtcactgagctagtagattctggtatattgagaccgtccactgtcaatgaactggaatctggtcagatttcttatgacgaggttggtgagagaattaaggacttcctccagggttcaagctgcatagcaggcatatacaatgagaccacaaaacagaagcttggcatttatgaggccatgaaaattggcttagtccgacctggtactgctctggagttgctggaagcccaagcagctactggctttatagtggatcctgttagcaacttgaggttaccagtggaggaagcctacaagagaggtctggtgggcattgagttcaaagagaagctcctgtctgcagaacgagctgtcactgggtataatgatcctgaaacaggaaacatcatctctttgttccaagccatgaataaggaactcatcgaaaagggccacggtattcgcttattagaagcacagatcgcaaccggggggatcattgacccaaaggagagccatcgtttaccagttgacatagcatataagaggggctatttcaatgaggaactcagtgagattctctcagatccaagtgatgataccaaaggattttttgaccccaacactgaagaaaatcttacctatctgcaactaaaagaaagatgcattaaggatgaggaaacagggctctgtcttctgcctctgaaagaaaagaagaaacaggtgcagacatcacaaaagaataccctcaggaagcgtagagtggtcatagttgacccagaaaccaataaagaaatgtctgttcaggaggcctacaagaagggcctaattgattatgaaaccttcaaagaactgtgtgagcaggaatgtgaatgggaagaaataaccatcacgggatcagatggctccaccagggtggtcctggtagatagaaagacaggcagtcagtatgatattcaagatgctattgacaagggccttgttgacaggaagttctttgatcagtaccgatccggcagcctcagcctcactcaatttgctgacatgatctccttgaaaaatggtgtcggcaccagcagcagcatgggcagtggtgtcagcgatgatgtttttagcagctcccgacatgaatcagtaagtaagatttccaccatatccagcgtcaggaatttaaccataaggagcagctctttttcagacaccctggaagaatcgagccccattgcagccatctttgacacagaaaacctggagaaaatctccattacagaaggtatagagcggggcatcgttgacagcatcacgggtcagaggcttctggaggctcaggcctgcacaggtggcatcatccacccaaccacgggccagaagctgtcacttcaggacgcagtctcccagggtgtgattgaccaagacatggccaccaggctgaagcctgctcagaaagccttcataggcttcgagggtgtgaagggaaagaagaagatgtcagcagcagaggcagtgaaagaaaaatggctcccgtatgaggctggccagcgcttcctggagttccagtacctcacgggaggtcttgttgacccggaagtgcatgggaggataagcaccgaagaagccatccggaaggggttcatagatggccgcgccgcacagaggctgcaagacaccagcagctatgccaaaatcctgacctgccccaaaaccaaattaaaaatatcctataaggatgccataaatcgctccatggtagaagatatcactgggctgcgccttctggaagccgcctccgtgtcgtccaagggcttacccagcccttacaacatgtcttcggctccggggtcccgctccggctcccgctcgggatctcgctccggatctcgctccgggtcccgcagtgggtcccggagaggaagctttgacgccacagggaattcttcctactcttattcctactcatttagcagtagttctattgggcactagtagtcagttgggagtggttgctataccttgacttcatttatatgaatttccactttattaaataatagaaaagaaaatcccggtgcttgcagtagagtgataggacattctatgcttacagaaaatatagccatgattgaaatcaaatagtaaaggctgttctggctttttatcttcttagctcatcttaaataagcagtacacttggatgcagtgcgtctgaagtgctaatcagttgtaacaatagcacaaatcgaacttaggatttgtttcttctcttctgtgtttcgatttttgatcaattctttaattttggaagcctataatacagttttctattcttggagataaaaattaaatggatcactgatattttagtcattctgcttctcatctaaatatttccatattctgtattaggagaaaattaccctcccagcaccagcccccctctcaaacccccaacccaaaaccaagcattttggaatgagtctcctttagtttcagagtgtggattgtataacccatatactcttcgatgtacttgtttggtttggtattaatttgactgtgcatgacagcggcaatcttttctttggtcaaagttttctgtttattttgcttgtcatattcgatgtactttaaggtgtctttatgaagtttgctattctggcaataaacttttagacttttgaagtgtttgtgttttaatttaatatgtttataagcatgtataaacatttagcatatttttatcataggtctaaaaatatttgtttactaaatacctgtgaagaaataccattaaaaaactatttggttctgaattcttact

SEQ ID NO: 607 - DNA, 4557 bp, HOMO SAPIENS
gacgttctcccctggtgaatgacttgtttttgtgtattttctttgtctctcgtgatgcatctgcactgacctgcagattttattttgtcctttttgcagactggaagtgtctccagaggcgcaacccacagccaggcttccttcccctactgactccccttcctctcttcctcctcttccttctagctctggccaggcatctgtcccctctgaattgggacatggtgcagacacacagtcctctgagagtccttctgtcttctcctctctctcatctcccatagcagctcccatttccacatccactccaattgaaagctggcctctcgtagacaggggccaggccaagtctgaaggaccacccttgctccctaaggcagagttgcaaactgagagtttaacaccggttccaaattctggttcttctgtcctgggatcacttttcaaacagccatcctttccagcaaataaagggacagaagattctctgatgggcaggacccgtgagacaggcacagagaagaacaccagcagccttgagttggaggagtctctcccagagcagcctgaaacagggcgacaagaggaagaacttccgagattcccctgcaaaaaacaagactacagcccatcatctggagaagcccaggaagtaccgtttgccctttcactcagcagtgatggagctgtgagccctgttggggagcttgcagcaggaggagacagagacttggagagtcaggctgggtctcttgtggagagcaaagccagggatgcagctgaagaagtggcgccccctcttcccatgggagcatcagtcccttccattgattccatgatgcggaagctggaagagatgggtctgaacctccgcaaggaccagaagaaaaccaagaagcgtgtgtcattttctgagcagctcttcacggaagaggcagtggcgggggctgccttgctggtggaaggacacagcagttgtccccaggagctgaaccctgcatggtctgttgctggaaacgcgtctgacggagagcctcctgagtctccccacgcagaggactcagaaagggaatcggtgaccacacctgggccagcgacgtgtggtgcgccagcctccccagcggatcacctcctcctcccctcccaggaggagagtttctccgaagtccccatgagtgaagcaagctcagcgaaagacactccactctttaggatggagggagaggatgcccttgtgactcagtatcagagcaaagccagtgaccacgaaggtttattgtctgaccccttgagtgaccttcagttggtctcagattttaaatctccaatcatggccgatctgaacttaagccttccttccattcctgaagtcgcatcggatgatgaaagaatagatcaggttgaagatgacggagatcaggttgaagatgatggagagacagcaaagtcgtcaactctggacataggagctttgtccttgggcttggtagtcccctgtcctgagaggggaaaggggcccagtggcgaggcagataggttggtactgggggagggcctgtgtgatttcaggctgcaagcaccccaggcatctgtgacagctccttcagagcagaccacagagttcggaattcacaaaccacatcttggcaagagctcaagcttggataaacagctgccaggccccagtggtggtgaggaagaaaaaccgatgggaaatgggagtccaagcccgcctcctggcacatccctggacaatcctgtacccagcccctccccttctgagatctttcctgtcacacactctttccccagctctgcacattctgacactcaccacaccagcacagcagaatctcaaaaaaaagccacagcagagggctccgctggtagagttgaaaattttggcaagaggaagccactcctccaggcctgggtctcaccctcggagacacatccagtctcagctcagccaggcgctggaactgggtcagccaagcacagacttcatcctgtgaagccaatgaatgcaatggccaccaaggttgctaactgcagcttgggaactgccaccatcatcagtgagaacttgaacaatgaggtcatgatgaagaaatacagcccctcggaccctgcatttgcatatgcgcagctgacccacgatgagctgattcagctggtcctcaaacagaaggaaacgataagcaagaaggagttccaggtccgcgagctggaagactacattgacaacctgcttgtcagggtcatggaagaaacccccaatatcctccgcatcccgactcaggttggcaaaaaagcaggaaagatgtaaatcagcagaaaaaaaacaccgagacgtttctgtgacttcactttcacctgctccaggggtcaaggacttgccttgcctgataaccagccagcaggctccgaatcaccatctccctcacatgttatccggcaagagtgaattctaccaatggaagccaggttaatgattacaattaatcttttactgtacattcccaaggctttagttttaaatgccactgtgcctttaacaaggttgtaaatattttatgcccaccagagatgtggtcataagatctgatcctgagccagagattcagatggcacaggaagtattcatgtattttaacactggggttttctttctttcatactgagattttttttcagtatgtatcctccagctcttaaagcttacctgagaaagctttaaatgagaaaaggaccatgcgattggtgctgtgttacatacacatactttcttggcttctgagtagctcaggtgtggcttttggctgcagatgttaaattttgataccatgtaaacctacccagcttctcagacttgggtcttgttttttgatgggaacagaggtgtttagagaaagcctctgagtatgcctttcagattttgaacaagcggccttttctaaacatcgacttctactactctctagccttaaaataccttctgcttagatccagggcccttctactggagataggaaaagtagaattcaggaattaaaagaattactctttattcaatttgaggaacttggtgaaagcccctcctcttatgacagccaggttcctgctggctagaccagcctattcagcgctttgctaggggattgggtggtccacgcactcgctaatacagttctccaggtgtggaatgatgtcaatacgattgcttggccttttccccctgtgcctttgctcggtgctctggtttcctcagcaacactccttgtaaggggcagagacagggtccaccaactccccaagatgaagaagccccttcaggccagtcgtggtggctcatgcctgtaatcccagcactttgcaaggccgaggagggtggatcacttgaggtcaggagttcgagaccagcctgaccaacatggcgaaaccccatctctactaaaaatacaaaaattagcttggcatggtggtgcgtgcctgtaatcccagctactcgggaggctggggcaggagaattgcttgaacttgggagatggaggctgcagcgagccaagatcgtgccactgcactccagcctgggcaagagtttttttaagactcttaaaaaaagagcctgggcaatttttttaagactctgtcttaaaaaaaactaaaaagaaaaaaagaagccccttcactctacaggggacaggagaccatggattggaccccaaagggattgaactgcatctgcatgtctgtcctttgaacactttctctccctgcccaaaaggaaacccaaattatttgtgggatactggggaaattgtagtgaagggcttaatgtagttaataaaagttaaaagtcagtagaaaacaggtgcctcagccttcaaatggttgctttttttccattttccctcatgaatagactcaccagcattttacccccttgttataaaactgtgcagagcaagaagatgatacttatttttgaatttgtatttttaaaactagatttatagactttttttttttttaactagggcacttgcttccttcttagctaaaagcaccagctgagatttttcaggtaattttgttgttactcacttaagactggaattagaatgtttctggtatttctcatttttttccctggctatgatagaatctcatctaatcttgacatctctcctaggggaagaatatcacaggctaatagcgtggttgggggtgaagatgatagcagttattaaatcaggaatctcttttatgtatgtccttgttacattgaggttaagagacaaaatcattggcagtgcaatctctttccaggatttcgtttgctgtggcattggttatatcagagcactttaatctgaaggatgatactgtaacttgatttatctaattagcttttaattatctacagctattttattttatttaattctctcctacagtactgggaccactgtaaacttctcagatgacttgtatttttgtagtgctatgaaatttatttacatacttataaagaaaactgtatgttcacttgaa

SEQ ID NO: 608 - DNA, 641 bp, HOMO SAPIENS
gcttgctgatgggtccgggtggggcgcgcgtggactatgggcccgggaggtcccttactgtccccgagccgcgggttcctcttgtgcaaaacggggtggcactccaatcgcctgcttggtgattgtggcccccacacacctgtttctacagcgcttagcttcatcgcagtaggaatggcagccccatctatgaaggaaagacaggtctgctggggggcccgggatgagtactggaagtgtttagatgagaacttagaggatgcttctcaatgcaagaagttaagaagctctttcgaatcaagttgtccccaacagtggataaaatattttgataaaagaagagactacttaaaattcaaagaaaaatttgaagcaggacaatttgagccttcagaaacaactgcaaaatcctaggctgttcataaagattgaaagtattctttctggacattgaaaaagctccactgactatggaacagtaatagtttgaatcatagtgaacatcaatacttgttccctatatacgacacttgataattaagatgatcaagaaccagaagatctgtgaagaaatgaaataaaatggtatttagtaagaaatctctattttaagaaaaaaagtaaaacctgttataaacaca

SEQ ID NO: 609 - DNA, 2719 bp, HOMO SAPIENS
acttaaggtcggcgacccgaggccgcggctgccgactgggtcccctgccgctgtcgccaccatggctccgcaccgccccgcgcccgcgctgctttgcgcgctgtccctggcgctgtgcgcgctgtcgctgcccgtccgcgcggccactgcgtcgcggggggcgtcccaggcgggggcgccccaggggcgggtgcccgaggcgcggcccaacagcatggtggtggaacaccccgagttcctcaaggcagggaaggagcctggcctgcagatctggcgtgtggagaagttcgatctggtgcccgtgcccaccaacctttatggagacttcttcacgggcgacgcctacgtcatcctgaagacagtgcagctgaggaacggaaatctgcagtatgacctccactactggctgggcaatgagtgcagccaggatgagagcggggcggccgccatctttaccgtgcagctggatgactacctgaacggccgggccgtgcagcaccgtgaggtccagggcttcgagtcggccaccttcctaggctacttcaagtctggcctgaagtacaagaaaggaggtgtggcatcaggattcaagcacgtggtacccaacgaggtggtggtgcagagactcttccaggtcaaagggcggcgtgtggtccgtgccaccgaggtacctgtgtcctgggagagcttcaacaatggcgactgcttcatcctggacctgggcaacaacatccaccagtggtgtggttccaacagcaatcggtatgaaagactgaaggccacacaggtgtccaagggcatccgggacaacgagcggagtggccgggcccgagtgcacgtgtctgaggagggcactgagcccgaggcgatgctccaggtgctgggccccaagccggctctgcctgcaggtaccgaggacaccgccaaggaggatgcggccaaccgcaagctggccaagctctacaaggtctccaatggtgcagggaccatgtccgtctccctcgtggctgatgagaaccccttcgcccagggggccctgaagtcagaggactgcttcatcctggaccacggcaaagatgggaaaatctttgtctggaaaggcaagcaggcaaacacggaggagaggaaggctgccctcaaaacagcctctgacttcatcaccaagatggactaccccaagcagactcaggtctcggtccttcctgagggcggtgagaccccactgttcaagcagttcttcaagaactggcgggacccagaccagacagatggcctgggcttgtcctacctttccagccatatcgccaacgtggagcgggtgcccttcgacgccgccaccctgcacacctccactgccatggccgcccagcacggcatggatgacgatggcacaggccagaaacagatctggagaatcgaaggttccaacaaggtgcccgtggaccctgccacatatggacagttctatggaggcgacagctacatcattctgtacaactaccgccatggtggccgccaggggcagataatctataactggcagggtgcccagtctacccaggatgaggtcgctgcatctgccatcctgactgctcagctggatgaggagctgggaggtacccctgtccagagccgtgtggtccaaggcaaggagcccgcccacctcatgagcctgtttggtgggaagcccatgatcatctacaagggcggcacctcccgcgagggcgggcagacagcccctgccagcacccgcctcttccaggtccgcgccaacagcgctggagccacccgggctgttgaggtattgcctaaggctggtgcactgaactccaacgatgcctttgttctgaaaaccccctcagccgcctacctgtgggtgggtacaggagccagcgaggcagagaagacgggggcccaggagctgctcagggtgctgcgggcccaacctgtgcaggtggcagaaggcagcgagccagatggcttctgggaggccctgggcgggaaggctgcctaccgcacatccccacggctgaaggacaagaagatggatgcccatcctcctcgcctctttgcctgctccaacaagattggacgttttgtgatcgaagaggttcctggtgagctcatgcaggaagacctggcaacggatgacgtcatgcttctggacacctgggaccaggtctttgtctgggttggaaaggattctcaagaagaagaaaagacagaagccttgacttctgctaagcggtacatcgagacggacccagccaatcgggatcggcggacgcccatcaccgtggtgaagcaaggctttgagcctccctcctttgtgggctggttccttggctgggatgatgattactggtctgtggaccccttggacagggccatggctgagctggctgcctgaggaggggcagggcccacccatgtcaccggtcagtgccttttggaactgtccttccctcaaagaggccttagagcgagcagagcagctctgctatgagtgtgtgtgtgtgtgtgtgttgtttcttttttttttttttacagtatccaaaaatagccctgcaaaaattcagagtccttgcaaaattgtctaaaatgtcagtgtttgggaaattaaatccaataaaaacattttgaagtgtgaaaaaaaaaaaaaaaaaaaaaaaaaaaaaaaaaaaaaaaaaaaaaaaaaaaaaaaaaaaaaaaaaaaaaa

SEQ ID NO: 610 - DNA, 373 bp, HOMO SAPIENS
ttcttacggcagtccacagggaagtggcctcattttctgtgtctgtcctgcccagcgcccccactctcctgtgctggtcccaggccatcccttagccagagtgcagaactccagacccccaatattctctcatatcctcagaatcttcagcttccatccatggatgttggctgaatcctgagtggggtcgtagaaagatctggtcctgtgagtaggggggcgaggaggaaggcagggacttcagctgggctgtctacaacctgagtctaaaacacctaaagacaagcacaacttgcccccgctaggacgaatttcttgctccagaccgcctcactgcatctctagggccatgtgtattcctgctatttggcca

SEQ ID NO: 611 - DNA, 2996 bp, HOMO SAPIENS
tggacttggatccgaggcagacgaggaagctgagaaaaccctggcgttgaccccgtggacctgggcgccccgggaaggccagcgcttggtccaggcaggcggggcctgtgcggtgaccaccctggtcctgaaaagtcccagccccgagcgccctccctcctagacctggaggcctggaacagccagccgcccacggacgccagagccgggaaccctgacggcacttagctgctgacaaacaacctgctccgtggagcgcctgaaacaccagtctttggggccagtgcctcagtttcaatccaggtaacctttaaatgaaacttgcctaaaatcttaggtcatacacagaagagactccaatcgacaagaagctggaaaagaatgatgttgtccttaaacaacctacagaatatcatctataacccggtaatcccgtttgttggcaccattcctgatcagctggatcctggaactttgattgtgatacgtgggcatgttcctagtgacgcagacagattccaggtggatctgcagaatggcagcagcatgaaacctcgagccgatgtggcctttcatttcaatcctcgtttcaaaagggccggctgcattgtttgcaatactttgataaatgaaaaatggggacgggaagagatcacctatgacacgcctttcaaaagagaaaagtcttttgagatcgtgattatggtgctgaaggacaaattccaggtggctgtaaatggaaaacatactctgctctatggccacaggatcggcccagagaaaatagacactctgggcatttatggcaaagtgaatattcactcaattggttttagcttcagctcggacttacaaagtacccaagcatctagtctggaactgacagagataagtagagaaaatgttccaaagtctggcacgccccagcttcctagtaatagaggaggagacatttctaaaatcgcacccagaactgtctacaccaagagcaaagattcgactgtcaatcacactttgacttgcaccaaaataccacctatgaactatgtgtcaaagaggctgccattcgctgcaaggttgaacacccccatgggccctggacgaactgtcgtcgttaaaggagaagtgaatgcaaatgccaaaagctttaatgttgacctactagcaggaaaatcaaaggatattgctctacacttgaacccacgcctgaatattaaagcatttgtaagaaattcttttcttcaggagtcctggggagaagaagagagaaatattacctctttcccatttagtcctgggatgtactttgagatgataatttattgtgatgttagagaattcaaggttgcagtaaatggcgtacacagcctggagtacaaacacagatttaaagagctcagcagtattgacacgctggaaattaatggagacatccacttactggaagtaaggagctggtagcctacctacacagctgctacaaaaaccaaaatacagaatggcttctgtgatactggccttgctgaaacgcatctcactgtcattctattgtttatattgttaaaatgagcttgtgcaccattaggtcctgctgggtgttctcagtccttgccatgaagtatggtggtgtctagcactgaatggggaaactgggggcagcaacacttatagccagttaaagccactctgccctctctcctactttggctgactcttcaagaatgccattcaacaagtatttatggagtacctactataatacagtagctaacatgtattgagcacagattttttttggtaaaactgtgaagagctaggatatatacttggtgaaacaaaccagtatgttccctgttctcttgagcttcgactcttctgtgcgctactgctgcgcactgctttttctacaggcattacatcaactcctaaggggtcctctgggattagttatgcagatattaaatcacccgaagacactaacttacagaagacacaactccttccccagtgatcactgtcataaccagtgctctaccgtatcccatcactgaggactgatgttgactgacatcattttctttatcgtaataaacatgtggctctattagctgcaagctttaccaagtaattggcatgacatctgagcacagaaattaaggcaaaaaaccaaagcaaaacaaatacatggtgctgaaattaacttgatgccaagcccaaggcagctgatttctgtgtatttgaacttagggcaaatcagagtctacacagacgcctacagaaagtttcaggaagaggcaagatgcattcaatttgaaagatatttatgggcaacaaagtaaggtcaggattagacttcaggcattcataaggcaggcactatcagaaagtgtacgccaactaagggacccacaaagcaggcagaggtaatgcagaaatctgttttgttcccatgaaatcaccaatcaaggcctccgttcttctaaagattagtccatcatcattagcaactgagatcaaagcactcttccactttacgtgattaaaatcaaacctgtatcagcaagttaaatggttccatttctgtgatttttctattatttgaggggagttggcagaagttccatgtatatgggatctttacaggtcagatcttgttacaggaaatttcaaaggtttgggagtggggagggaaaaaagctcagtcagtgaggatcattttatcacattagactggggcagaactctgccaggatttaggaatattttcagaacagattttagatattatttctatccatatattgaaaagaataccattgtcaatcttatttttttaaaagtactcagtgtagaaatcgctagcccttaattcttttccagcttttcatattaatgtatgcagagtctcaccaagctcaaagacactggttgggggtggagggtgccacagggaaagctgtagaaggcaagaagactcgagaatcccccagagttat

SEQ ID NO: 612 - DNA, 3059 bp, HOMO SAPIENS
cttctggcagtttctgggagctgcgaacgcgccgccccggggctcggcggccggaaacgctggcttcggagccttaggcgccgcggcctttccttgttttccgcccagtccacgccgccatggccaagtggggccaggggaacccccactggatcgtggaggagcgggaggacgggaccaacgtgaacaactggcgctggcgcggctggcggcggcctccttccgggatctggggagggccgggccgcgggagccggggctgccctggggtctgtgcggggccgcggggccagggggtcagggggccgccccccctcagctgctggacgcagggctcggccttcgcctctcggctcgggagagtccttgagtacggagaccggctaggagggttgcagctgcctctttttgaaagttgggttgggccccaagagtgacttccgacagacctttccactcccaccgtctgtggcctgagggccttcccttctcctcccgcccacccctctggatgtttcggggagttagaagggagctggattgagagactgtgttaggggcgggggtatggaacgtagtggaaagggcagaaatttggatctcagttcgcgcccaccccgcaggcgcctcccgcgagccgggccctctgtgagtgagacaagctccccttcctttacgcgcctcacctggcgcgtggggagaggtcggcagccctccgccgcagaacctccggaagggatgtcctctgccctgcgcctctggccggggctgtggtccctccaggccgtcgaggggatgctgaggccggtccccagaggagcatgacttggctggtccggaggagctctgagggcatgggcaatcttggctcgctgcaacctcagcttccagagttcaagcgagtctcctgcttcagcctcatgagtagctgggactacagatgcgtgccactacgtccgtctgatgtttgtatttttagtagagacagggtttcaccatgttggtcaggctgctctcgaactccagatctcgtgatccgcccgcctgggcctactaaagtgctgggattacaggcgtgagctagatctgactttctagtgtcctagccttggcccgatggacatgtcatttctctcagctcgtttctgtcccctaaagtgagaatattgcctgggaagattacattagacgatgtatatgcgaagacacttgatagctggtattgtcatgattctgattagttcactactgctactttccctgtggcctaggctttgcctatttccagtgggcgagctagctagatcctcctcccttaaataagccagtgtttttaagacagaatactacttgcatagtggacaataatatcttaaagaactgagcaggatgaaaagaatttgatagaaagcaggtttgaggagcacattggaggttggcaggtttcgaggctgcttgagaggacttgggccgatctgggctgggcttggacgtgaccctggcacccaggcaggtggatcccagctggggcttccattcacgactttctggtccctggcaggacagagcgggatgccaccagcttgtccaaagggaagttccaggagctcctggtgggcatcgttgtggagaatgacgctggccgcggcgagatcaacgagttgaagcaggtggaaggggaggcttcgtgcagcagccgcaaaggaaagctgattttcttctatgagtggaacatcaaactgggctggaaaggcatcgttaaagaatctggagtgaagcacaagggattgattgaaatacccaatctttctgaggaaaatgaagtagatgacactgagaatttacaacgggaatgattttaccaacgaaagctatggcaacccaggaattgactgtcaaaagaaaactgagtgggaataccctgcaggttcaggcctcatctccagtggcactgggtgtaaggattcccactgtggctcttcacatgatggaactgtttgacacaactgtagagcagctgtatagcatcttcactgtaaaggagttaacaaataagaagatcatcatgaaatggagatgtgggaactggccagaagaacactatgccatggttgcactgaattttgtgcctactctagggcaaacagaattacaattgaaggagttcctatctatctgtaaagaagagaacatgaaattctgttggcagaagcagcattttgaagaaataaaaggttcactgcagctgacccccctaaatggttgaattaaaatttattataaggcattactttttgtaagcggaaaaagtgtcacatttacctcttccctatcttttgtttaaaaggactgtctttattttatattggatgaaatctatgaacatatatacaatgtaaagcattgtttgactctttattataactagacactgcattgatttaaaagtagcaaacaacctgaaattaagtattaacctgaccttccatcgatattcctctggaaataggtaagtcctgagtgcagatagttgatgtttcccaagctgaagcttgtcctatagcaagcttgcttgcagctgtacttttagttcaagatgacaaaaaataaatggcatgttgacactattcctttattttactttagggtttttaaggtgtgtagatcttaggtcgtaaaacagtggtatattgcattcaaaagcatgttgaggtgagggcaaattggctgtgttttgctccacatctccctgcacatctccctgctgtggttttgcacttcggtgtggagaggattgagaagtctgtggggacacattagttctgtggactgctggtaacacttccagtgaaacagcatataatggataaatgtttcccccctctttcacggttttctcactactttcacctgagaagactgaagcaacgtatgtaaacaaatgaaaagtcatcacaatcagtttaattaagtgcacagaatagcaatcaatcaatcagtcatgtcaataaaaataaaacaattatttttaaaaaaaaaaaaaaaaaaaaaaaaaaaaa

SEQ ID NO: 613 - DNA, 13290 bp, HOMO SAPIENS
gaagcgcctgtgctctgccgagactgccgtgcccattgctcgcctcggtcgccgccgctttagccgcctccgggggagcggccgcctattgtctttctccgcggcgaaggtgaagagttgtcccagctcggcccgcgggggagccccgggagccgcacgtgtcctgggtcatgaaacttaatccacagcaagctcccttatatggtgattgtgttgttacagtgctgcttgctgaagaggacaaagctgaagatgatgtagtgttttacttggtatttttgggttccaccctccgtcactgtacaagtactcggaaggtcagttctgatacattggagaccattgctcctggtcatgattgttgtgaaacagtgaaggtgcagctctgtgcttccaaagagggccttcccgtgtttgtggtggctgaagaagactttcatttcgtccaggatgaagcgtatgatgcagctcaattcctagcaaccagtgctggaaatcagcaggctttgaactttacccgttttcttgaccagtcaggacccccatctggggatgtgaattcccttgataagaagttggtgctggcattcaggcacctgaagctgcccacggagtggaatgtattggggacagatcagagtttgcatgatgctggcccgcgagagacattgatgcattttgctgtgcggctgggactgctgaggttgacgtggttcctgttgcagaagccaggtggccgcggagctctcagtatccacaaccaggaaggggcgacgcctgtgagcttggccttggagcgaggctatcacaagctgcaccagcttctaaccgaggagaatgctggagaaccagactcctggagcagtttatcctatgaaataccgtatggagactgttctgtgaggcatcatcgagagttggacatctatacattaacctctgagtctgattcacatcatgaacacccatttcctggagacggttgcactggaccaatttttaaacttatgaacatccaacagcaactaatgaaaacaaacctcaagcagatggacagtcttatgcccttaatgatgacagcacaggatccttccagtgccccagagacagatggccagtttcttccctgtgcaccggagcccacggaccctcagcgactttcttcttctgaagagactgagagcactcagtgctgcccagggagccctgttgcacagactgaaagtccctgtgatttgtcaagcatagttgaggaggagaatacagaccgttcctgtaggaagaaaaataaaggcgtggaaagaaaaggggaagaggtggagccagcacctattgtggactctggaactgtatctgatcaagacagctgccttcagagcttgcctgattgtggagtaaagggcacggaaggcctttcgtcctgtggaaacagaaatgaagaaactggaacaaaatcttctggaatgcccacagaccaggagtccctgagcagtggagatgctgtgcttcagagagacttggtcatggagccaggcacagcccagtattcctctggaggtgaactgggaggcatttcaacaacaaatgtcagtaccccagacactgcaggggaaatggaacatgggctcatgaacccagatgccactgtttggaagaatgtgcttcagggaggggaaagtacaaaggaaagatttgagaactctaatattggcacagctggagcctctgacgtgcacgtcacaagtaagcctgtggataaaatcagtgttccaaactgtgcccctgctgccagttccctggatggtaacaaacctgctgagtcttcacttgcatttagtaatgaagaaacctccactgaaaaaacagcagaaacggaaacttcacgaagtcgtgaggagagtgctgatgctccagtagatcagaattctgtggtgattccagctgctgcaaaagacaagatttcagatggattagaaccttatactctcttagcagcaggcataggtgaggcaatgtcaccctcagatttagcccttcttgggctggaagaagatgtaatgccacaccagaactcagaaacaaattcatctcatgctcaaagccaaaagggcaaatcctcacccatttgttctacaactggagacgataaactttgtgcagactctgcatgtcaacagaacacagtgacttctagtggcgatttggttgcaaaactgtgtgataacatagttagcgagtccgaaagcaccacagcaaggcaacccagctcacaagatccacccgatgcctcccactgtgaagacccacaggctcatacagtcacctctgaccctgtaagggatacccaggaacgtgcggatttttgtcctttcaaagtggtggataacaaaggccaacgaaaagatgtgaaactagataaacctttaacaaatatgcttgaggtggtttcacatccacatccagttgtccctaaaatggagaaagaactggtgccagaccaggcagtaatatcagacagtactttctctctggcaaacagtccaggcagtgaatcagtaaccaaggatgacgcactttcttttgtcccctcccagaaagaaaagggaacagcaactcctgaactacatacagctacagattatagagatggcccagatggaaattcgaatgagcctgatacgcggccactagaagacagggcagtaggcctgtccacatcctccactgctgcagagcttcagcacgggatggggaataccagtctcacaggacttggtggagagcatgagggtcccgcccctccagcaatcccagaagctctgaatatcaaggggaacactgactcttccctgcaaagtgtgggtaaggccactttggctttagattcagttttgactgaagaaggaaaacttctggtggtttcagaaagctctgcagctcaggaacaagataaggataaagcggtgacctgttcctctattaaggaaaatgctctctcttcaggaactttgcaggaagagcagagaacaccacctcctggacaagatactcaacaatttcatgaaaaatcaatctcagctgactgtgccaaggacaaagcacttcagctaagtaattcaccgggtgcatcctctgcctttcttaaggcagaaactgaacataacaaggaagtggccccacaagtctcactgctgactcaaggtggggctgcccagagcctggtgccaccaggagcaagtctggccacagagtcaaggcaggaagccttgggggcagagcacaacagctccgctctgttgccatgtctgttgccagatgggtctgatgggtccgatgctcttaactgcagtcagccttctcctctggatgttggagtgaagaacactcaatcccagggaaaaactagtgcctgtgaggtgagtggagatgtgacggtggatgttacaggggttaatgctctacaaggtatggctgagcccagaagagagaatatatcacacaacacccaagacatcctgattccaaacgtcttgttgagccaagagaagaatgccgttctaggtttgccagtggctctacaggacaaagctgtgactgacccacagggagttggaaccccagagatgatacctcttgattgggagaaagggaagctggagggagcagaccacagctgtaccatgggtgacgctgaggaagcccaaatagacgatgaagcacatcctgtcctactgcagcctgttgccaaggagctccccacagacatggagctctcagcccatgatgatggggccccagctggtgtgagggaagtcatgcgagccccgccttcaggcagggaaaggagcactccctctctaccttgcatggtctctgcccaggacgcacctctgcctaagggggcagacttgatagaggaggctgccagccgtatagtggatgctgtcatcgaacaagtcaaggccgctggagcactgcttactgagggggaggcctgtcacatgtcactgtccagccctgagttgggtcctctcactaaaggactagagagtgcttttacagaaaaagtgagtactttcccacctggggagagcctaccaatgggcagtactcctgaggaagccacggggagccttgcaggatgttttgctggaagggaggagccagagaagatcattttacctgtccaggggcctgagccagcagcagaaatgccagacgtgaaagctgaagatgaagtggattttagagcaagttcaatttctgaagaagtggctgtagggagcatagctgctacactgaagatgaagcaaggcccaatgacccaggcgataaaccgagaaaactggtgtacaatagagccatgccctgatgcagcatctcttctggcttccaagcagagcccagaatgtgagaacttcctggatgttggactgggcagagagtgtacctcaaaacaaggtgtacttaaaagagaatctgggagtgattctgacctctttcactcacccagtgatgacatggacagcatcatcttcccaaagccagaggaagagcatttggcctgtgatatcaccggatccagttcatccaccgatgacacggcttcactggaccgacattcttctcatggcagtgatgtgtctctctcccagattttaaagccaaacaggtcaagagatcggcaaagccttgatggattctacagccatgggatgggagctgagggtcgagaaagtgagagtgagcctgctgacccaggcgacgtggaggaggaggagatggacagtatcactgaagtgcctgcaaactgctctgtcctaaggagctccatgcgctctctttctcccttccggaggcacagctgggggcctgggaaaaatgcagccagcgatgcagaaatgaaccaccggagttcaatgcgagttcttggggatgttgtcaggagacctcccattcataggagaagtttcagtctagaaggcttgacaggaggagctggtgtcggaaacaagccatcctcatctctagaagtaagctctgcaaatgccgaagagctcagacacccattcagtggtgaggaacgggttgactctttggtgtcactttcagaagaggatctggagtcagaccagagagaacataggatgtttgatcagcagatatgtcacagatctaagcagcagggatttaattactgtacatcagccatttcctctccattgacaaaatccatctcattaatgacaatcagccatcctggattggacaattcacggcccttccacagtaccttccacaataccagtgctaatctgactgagagtataacagaagagaactataatttcctgccacatagcccctccaagaaagattctgaatggaagagtggaacaaaagtcagtcgtacattcagctacatcaagaataaaatgtctagcagcaagaagagcaaagaaaaggaaaaagaaaaagataagattaaggagaaggagaaagattctaaagacaaggagaaagataagaagactgtcaacgggcacactttcagttccattcctgttgtgggtcccatcagctgtagccagtgtatgaagcccttcaccaacaaagatgcctatacttgtgcaaattgcagtgcttttgtccacaaaggctgccgagaaagtctagcctcctgtgcaaaggtcaaaatgaagcagcccaaagggagccttcaggcacatgacacatcatcactgcccacggtcattatgagaaacaagccctcacagcccaaggagcgtcctcggtccgcagtcctcctggtggatgaaaccgctaccaccccaatatttgccaatagacgatcccagcagagtgtctcgctctccaaaagtgtctccatacagaacattactggagttggcaatgatgagaacatgtcaaacacctggaaattcctgtctcattcaacagactcactaaataaaatcagcaaggtcaatgagtcaacagaatcacttactgatgagggagtaggtacagacatgaatgaaggacaactactgggagactttgagattgagtccaaacagctggaagcagagtcttggagtcggataatagacagcaagtttctaaaacagcaaaagaaagatgtggtcaaacggcaagaagtaatatatgagttgatgcagacagagtttcatcatgtccgcactctcaagatcatgagtggtgtgtacagccaggggatgatggcggatctgctttttgagcagcagatggtagaaaagctgttcccctgtttggatgagctgatcagtatccatagccaattcttccagaggattctggagcggaagaaggagtctctggtggataaaagtgaaaagaactttctcatcaagaggataggggatgtgcttgtaaatcagttttcaggtgagaatgcagaacgtttaaagaagacatatggcaagttttgtgggcaacataaccagtctgtaaactacttcaaagacctttatgccaaggataagcgttttcaagcctttgtaaagaagaagatgagcagttcagttgttagaaggcttggaattccagagtgcatattgcttgtaactcagcggattaccaagtacccagttttattccaaagaatattgcagtgtaccaaagacaatgaagtggagcaggaagatctagcacagtccttgagcctggtgaaggatgtgattggagctgtagacagcaaagtggcaagttatgaaaagaaagtgcgtctcaatgagatttatacaaagacagatagcaagtcaatcatgaggatgaagagtggtcagatgtttgccaaggaagatttgaaacggaagaagcttgtacgtgatgggagtgtgtttctgaagaatgcagcaggaaggttgaaagaggttcaagcagttcttctcactgacattttagttttccttcaagaaaaagaccagaagtacatctttgcatcattggaccagaagtcaacagtgatctctttaaagaagctgattgtgagagaagtggcacatgaggagaaaggtttattcctgatcagcatggggatgacagatccagagatggtagaagtccatgccagctccaaagaggaacgaaacagctggattcagatcattcaggacacaatcaacaccctgaacagagatgaagatgaaggaattcctagtgagaatgaggaagaaaagaaaatgttggacaccagagcccgagaattaaaagaacaacttcaccagaaggaccaaaaaatcctactcttgttggaagagaaggagatgattttccgggacatggctgagtgcagcacccctctcccagaggattgctccccaacacatagccctagagttctcttccgctccaacacagaagaggctctcaaaggaggacctttaatgaaaagtgcaataaatgaggtggagatccttcagggtttggtgagtggaaatctgggaggcacacttgggccgactgtcagcagccccattgagcaagatgtggtcggtcccgtttccctgccccggagagcagagacctttggaggatttgacagccatcagatgaatgcttcaaaaggaggcgagaaggaagagggagatgatggccaagatcttaggagaacggaatcagatagtggcctaaaaaagggtggaaatgctaacctggtatttatgcttaaaagaaacagtgagcaggttgtccagagcgttgttcatctctacgagctcctcagcgctctgcagggtgtggtgctgcagcaggacagctacattgaggaccagaaactggtgctgagcgagagggcgctcactcgcagcttgtcccgcccgagctccctcattgagcaggagaagcagcgcagcctggagaagcagcgccaggacctggccaacctgcagaagcagcaggcccagtacctcgaggagaagcgcaggcgcgagcgtgagtgggaagctcgtgagagggagctgcgggagcgggaggccctcctggcccagcgcgaggaggaggtgcagcaggggcagcaggacctggaaaaggagcgggaggagctccagcagaagaagggcacataccagtatgacctggagcgactgcgtgctgcccagaaacagcttgagagggaacaggagcagctgcgccgggaggcagagcggctcagccagcggcagacagaacgggacctgtgtcaggtttcccatccacataccaagctgatgaggatcccatcgttcttccccagtcctgaggagcccccctcgccatctgcaccttccatagccaaatcagggtcattggactcagaactttcagtgtccccaaaaaggaacagcatctctcggacacacaaagataaggggccttttcacatactgagttcaaccagccagacaaacaaaggaccagaagggcagagccaggcccctgcgtccacctctgcctctacccgcctgtttgggttaacaaagccaaaggaaaagaaggagaaaaaaaagaagaacaaaaccagccgctctcagcccggtgatggtcccgcgtcagaagtatcagcagagggtgaagagatcttctgctgaccctcttcctctctgctgaggcagctgcctcctgatcctggccagcccacctctcctgctgtccccgcgtgcacaagtctcttacactggacgcccactgctcctcagcgtccagtcctcctgggcggccccaggtcctggacaataagcaacagatgatattgagtgtcgggtggggaaggaggcccagactctgcttcggccatgatttgtgactgcccaggactctcaggttgggctggccctactcaggattacactgaaagtaatggcctcgtaagtacaggtgatggttttggacacgtcaggaattcctaaaggctgaaagagtgtatccaagtaaggtctgaacctccgaatgccttttatttgggggaacacaaaaccaaacagcagatgttttggacttgatctgtgtacgtacatggggacctgtctgcatatacacacggggaatgccagaagaaggcccagtctgcaccaggcgtctggtcaacttagcacaagggcagtgcctggacggacccggagcccccgcatatcagcagttcacccagtactcctcagagactggtttccctctaaacccatcccgggcacataccacccgtgttttgcatgtatttctcatttcattttagggatgacaaacatttgtgaaaccagtgagagaaggcttgatgtgtataaaagacgtgatgtgcaccacctcgatctcggtgtttcaggcactaaagcaacaaaacaacccatagtatctcattctgtcatcagatccagaagaaatatcctggttttccagcatgtttacccacatgttttggccatggataaagtgaagaggcctactcaccattatccctgcagcgtgacaccttttgattgtcactgaccactcagaaggggccacggcctcctggctgtgttcctgagcccccgtcgtgcctctcccagacagcagctgtctggcccttgctgggtgagggcacaccactgccaggggtcagcctcgcacccaggccaggcagaagctgtgctctgaagctaggacagctggctgagaagtgggttcaggcgaagggtgaagccatgtgtagcagttcctgccagtgcagatctggagaggagctggcccggaaggcgtggttgtgaaagcgcccttcttatgttaggaggccttggcaaaattggatttcttcaaaaatacatgtaaaggtctgttgttgaattgtactctgcccctggaagcagatacagatggctgcctgctgctcggctttgcttttgcttttcccaccgtgttttcatctttgttcacttgaggctttccccagctggtgtgtgcaggacagttcatggtaatgttgccctctgaggccccgtacaccagaagggaggccctggaaaattttgtgcttccaacgtggccttcaattcttgcttttttgcccctcggaagcatggggcttttgagcacacttaaaaaaagaaaaatctgtaacttggtgcttattgatgaattgcaagctggccttgcagatggagatatttatctttcagtttatttgaaagaggtctggtttaaaatttgtagcctacatttgttttatttattgtatttgtgtgtttgtgtttgtttttttttaagggtgagccaggtctagcccaacagtctaaactatccagtcaataccgagtgaagtggcagccagcactgttcactctgtgtcttttgaagtgccttgaaggcccagatgaaattttaaagggagggggtccatgtccttccctcccccaccccgcctcattctttaatcaaaggatgtcttctcccttgtttgagaatgaagaaactcgccacctctgacctacctttgcctttttctgtcatggagaatactcacccttcagaaacagaccaaaggccaaaacctgctgatttttctattgaaaatatgtccccttgcaaagaccctaaacaaaaagttaagtttctttctttcacctatttgtacaactccaagttacagctgaatctgtcgtgactttcctgagatctacccggggcttggctgtctgttctgggcactggctccgagttcccctcctgggatttgcaggagggcagtactgaacctgcattcttctccttgtaaatgtaggccgggtgcccctgttctccgggtttggaacaatacgaggttggtgctgatgggatttacttgcgtacgtgctcttcacaaaaacaccgtggatgctgaagttagagcacgtcgccacagagcttgacatcaatgttagagggtctcttactccccgcccagctgtgatgtttcatctgctttggttgttttggtggtcttttttaaaaatagagatttcacatctgcccagaccccactcaaaacgatttggtcaggttctggttggacaagtttaaaatcaaagtagtgcccggaattccctcaaaccacccaacttcatccaggaatacagtctgcagtgcagcaacagaaccgcttaccaagaactgtgcttacatacctttgtcatctctcttccccccttggaagttgtcctcagggggatttgttcctgtcctggggatttacctgggatggtggctgcctgtgcttttgctcatggccttgacagtgctctagttgctggatctaatggcctgtcttggtttctatcacatgagaaggggttgtttttttggggtgactcggactgaattccccatactgtttccacgccgggacaccatgttctccatcaagctaaagaaatcacgtgcctgaaactgtgcttaagttttgggggaaagatggagttcctatccagagcccccagatttccagaatcgagtgagcttcctggaaggagactgcgtcttctctcaattccagtcatctcagtcgttgtcgttaggtgacatgtgcactttaaatgctctcatcggttggcttcattttcaagacaatcaaatgtattgactgtgttttcttcttagaaaatggagagggttaaaaacatgcaaactgccactttcaacctttgccagtattccctctacccccgtgagagctatctggggggaagaatccttaccaaggtttttttggaaaggtacgaatcttaacttttttccccttctgtgtctcagggtaatactattcagagtcgcccctttgctcattttctcccgtatttgttaccttcctgaggcctcagtattagtcgtgagcacaaagttttgagacctttggcgttgtttcttgatgtgggaggggaggtgttagtgcatgcaagggttgaactagatagaccctgccttagtagagggtgggactataaccttagaggccagaacttgatccagaagttgctgtccacagaagtgctttctatttcatcatttttgtttctagggctctttttctgtagccaggtcttcccaaggattttagtatttgcattggagttgaggtttactctaatgatggtggcccagctgtgcccagaggacagccaggcaggccctgggagggagtttagaaagacagtcctggtgaatgggcttcaagtggtcacaaagagggtggctgtgaggtgaccccagacactgcagaacgatgtgcaccctctgcgttttggatgtccttggaatgtgggagcctagaaataaccctgtggatggaattggggcagcggctgctggagatctgtgtgccttgccttccttcagcaggaccgtctaggtgcgcagccacctatggatgcgtcccagccagccccgtcgctctcgtccatcctcagagacaaagaagagggcagggagtttgggcttggttttgaactttcctttcaatgtagcaaagcattcctagttaaccagagccttggaatctactgcctgctggccaggctttaaaatgaaaagtgttttaatgctgccataaaagggaggcgggggggaggaagggaaaataaaggcatctttccaagtactcatctaatttaattgtcaaaagattgataggccatgaattacttctccatctcactaagggttaaaggcgtgcaaccccccactggctgtgtcccctgccaccgaagtgagtgacctgccctacaaccaggtgggaccacctgtgctgcagtccggaggggcttctgcaggaagcactcaccccccacaccttccccggcctgagcttcccctacctttcgtcaccacctgagggcatgagcacaggccatggggcgtgcctggtgagtctgcctgtggttcaggcttagcctgtggtctcctgtgtgctgctgcccgcatgggatgcgcaggggaggcgtggggatccgcaggagggtggttgggatacaccggatacctctgctctcattgcttgtttgcaaatgctctatggacatttgtgtgctaaatcctattaaataaaaaagacgggttaaaacccagatgctgtatattcatttgtaattatgtataaagtgaagcagttttaaactgtaaagatttttttcagtgtgttttctcgaattttgccacaacatactggcttcgtattttatttatctttctttctagttaccagcttcagacccttgtaaagtctccctcagccctttcaaaaaataataaatttcctgtgaagtt

SEQ ID NO: 614 - DNA, 521 bp, HOMO SAPIENS
  misc_feature (37)..(37): n is a, c, g, or t
tttgtccatagaggcttcaagatagataggtaagagnccagtagtgttcataagaagccaatagagagcaggagccactttatcaggtggcaggtgtcctgggcctccctgctggctagtcccaagcggtggtgttgccaggatgtcttggaggtgataatgggacacacagaggcactgagtctccataggttaaaatgccaccaaaactggcctttgcctaatatccctcattgactatttagcatttaatttatttattttcctgacatttctgcaagctttgtatttatatttccactttatagatgaggaaatttgaggctcttagaggtaaaatgacttgcccaggtcacacaggaagtggcagagacaagctttttaaataagaaaaaattaataaaatataatatgagagtaacttaaaatattaataaaccacaattttaaattaattaaccgtgataaccaacattaataaaagttaagataccaaaacactggtgtctaattctttcaac

SEQ ID NO: 615 - DNA, 3064 bp, HOMO SAPIENS
gtgaccgtgacgcgcgagcgggcggcgggggcgcgggccaggggcgcgggccagggtgccggcaggggcgtccggggcgctctgaccggcctcgcccgccccccccgcagacacaagatggtgaaggagacccagtactatgacatcctgggcgtgaagcccagcgcgtccccggaggagatcaagaaggcctatcggaagctggcgctcaagtaccacccggacaagaacccggatgagggcgagaagtttaaactcatatcccaggcatatgaagtgctttcagatccaaagaaaagggatgtttatgaccaaggcggagagcaggcaattaaagaaggaggctcaggcagccccagcttctcttcacccatggacatctttgacatgttctttggtggtggtggacggatggctagagagagaagaggcaagaatgttgtacaccagttatctgtaactcttgaagatctatataatggagtcacgaagaaattggccctccagaaaaatgtaatttgtgagaaatgtgaaggtgttggtgggaagaagggatcggtggagaagtgcccgctgtgcaaggggcgggggatgcagatccacatccagcagatcgggccgggcatggtacagcagatccagaccgtgtgcatcgagtgcaagggccagggtgagcgcatcaaccccaaggaccgctgcgagagctgcagcggggccaaggtgatccgtgagaagaagattatcgaggtacatgttgaaaaaggtatgaaagatgggcaaaagatactatttcatggagaaggagatcaggagcctgagctggagcctggtgatgtcataattgtgcttgatcagaaggatcatagtgtctttcagagacgaggccatgacttgatcatgaaaatgaaaattcagctttctgaagctctttgtggcttcaagaagacgataaaaacattggacaatcgaattcttgttattacatccaaagcaggtgaggtgataaagcacggggacctgagatgcgtgcgcgatgaaggaatgcccatctacaaagcacccctggaaaaagggattctgatcatacagtttttagtaatctttcctgaaaaacactggctttctctggaaaagcttcctcagctggaagctttactccctcctcgacagaaagtgaggattacagatgacatggatcaggtggagctgaaggagttttgtcccaatgagcagaactggcgtcagcacagggaggcctacgaggaggacgaagacgggccccaggctggagtgcagtgccagacggcatgacgtggtgcggggcagcgtggccccaccggactagcacatgatgaatgtaaagttggcacaatgaaaatgacatcgctttaatggccttgtgtttgggatgtcctgtgtatgtgttcagcattcttaattgctgagtgtctttttggcttttcttttggttgtaacttaagttatagcttaatttatatttaaatgttttaagtataaatcacctctagtctgcatatggaatctgttcatttctattttcaggatatacttttgagatgtcagtgattgcaccaatactttgtgcttctagtggctttgccataattcagtgtcaccaataaggcacagcccagttagcagcttagcccccctagcaaaccccaaggcacaaagtgggcatcctgactcatctctaggtctgtggtttctcccctcttcccttggcagagttattgagggcatgatctcagggctgctaagataacatttctgaggattctagatgatcctcttaaagaataaaagcacatccgtggatcggacatggctgcatgtgcctgcttaacagggccaacttagttcctactgttctgtgcccttcagtggatggaacgtgagtgtctgatcatctctcttggaagttttctgaaccttccaagctctgtggtgaggacaaaccagtgtttgaatcatatgctgataactgtttgcctgtgaccctcacaccttgttcttcagggttttaatgattttctgttgacaacttttgcaatgctttcccaccaaagtgcttacttgtaaagaaaactaaatccttctgtgtccccggcagcctcagtgcagcaacagaagccaagggagaatgctgctggtttggcccatggcacagccagcttctctgaccagtaatccggggtgacttgagggtctgcaaaggcatagaactccccagtgttttccacctcattctcccagattgagctcccttccaaaggatcgttcctctcattgcacagccatattacaaagggtttcctgctcaagtgatgttttggtaagaacttcgctgagttccactgtggattacagtttgtatggactactactgtaaattatagcttgtttggagggatattagtcattattttattcatgacaggtagactacaattcgaacttagggttacctcagtctttagccattactgcttatttcttttccccaagtcacaaaaaacttgtaagctgctgggttaaagcagaggccacctgtcagatctaccctacccttatttggttacatggcacctgagagtttcactcagaccagggatcttccttaggagggtcaaagtgcagatcagaccatgcaggtaaggtgaaccagctgcacggaccaggttcccgcaaaacattgccagctagtgaggcataatttgctcaaagtatagaaacagcccacctgtgcccactttgaccattggtgaggatagatataaaatcacttcttccaacgaagcctaggtgaaaatctatttataaatggaccacaactctggggtgtcgtttttgtgctgtgacttcctaattattgctaaagaactactgtttagttggtaatggtgtaaaattacattcagctccttcttgtcatataaaaggaatttggagggtgtcgcttaaaattttattccacctgtacatttgtcactttaaaattaaaattgagctggtatgagagataaaaaaaaaaaaaaaaaaa

SEQ ID NO: 616 - DNA, 3739 bp, HOMO SAPIENS
tcgcgagactttcaggggtcggagcgcgggggccggccgagaggaaagctggaggcgcgggtggggaacatgtctgagtcggagctcggcaggaagtgggaccggtgtctggcggatgcggtcgtgaagataggtactggttttggattaggaattgttttctcacttaccttctttaaaagaagaatgtggccattagccttcggttctggcatgggattaggaatggcttattccaactgtcagcatgatttccaggctccatatcttctacatggaaaatatgtcaaagagcaggagcagtgacttcacctgagaacatcccagcgggaggacaagagaaatcatgtttattcctcaggaatactgaagtgccctggagtaagctgccattcttctgtaacaatgttatcagtaatgctttaaactccagcacctggttatgcatttgaaaccaagtctgtttcttgttttgtattttctctctggaagttgtaaggaggtggtcttaaataaattaaacaaaaataggaagtccattgcatggcctttgtttcttcacctttggtctctgagcatgaggaggactgtgtgtgaactgccagcagctgtagccacctgctcacagcctctctgagaaccccctgaaaccagttgttgggtatccttcccatttgccccctcaggcgtagttttcagaactgcttccacctcgtaatcagaagttgaagattgctgctgcgtggcctgatggagatgactgatgtcttaaggcgcctttccttctgtggcacctcttcgtgtgttctcacctggggacctggcagggcacatctccgctgtgcctactgcaaggcggtcccactgctgctgtattagcaggggaagaatcctggctgtgtggatggcccactccattgaagtcaagtcctgcagcttcatagagcttgagacagtccaagcttcagctctggagggcggaggaaagctcatggcatacccacctggccggaggagcccgattggggttaattttatcttcacgtagcagctgaagtttgaggacaaaagggccacttctgatgcccctctgagtttgttcctgtggtttcacttgaaccagggatgctagatgcaaaagtcatattttagcaatttcttcagacgatatacagaaccccagcgctcagccgttcttatttctttttccttatcgtagaattaagatagggagagcccgatcccacttgcccctgtatcctgtaaatgttgatttatcatctactgtaagcgaggcactgttgtaagcagcagagataaatggataaatagacacaggcttctgccttcaaggagcttagagtctgatggaaagacagacgtgcaaacacaactctgaaagaagtgttttaatggagaagagaggtgtaggcaaagtacactgagaacaaaggagaaggagcaactatgtctccctaggatggccccacaggcgacggaatgcctgcgctgggacccgaagttgactgggaatcccagacagaaggagggtagcctctgtgtttgctcaggatcatgtaatgcatattatagctgggaaatcgcaagtagttcagcatagccagggtgtgtaggggcaggggaaaggcatggagggggaggctgggcaatagggtacaactcatgtctgactccagttctggaacattgattagaccttagttcttgcaagtgctatagtgagtacattcagggtagcaaataccctccctcagcctccccactcccttttccagaaaggtctgctaggctctgccctgcaaactgtccaggctcctctgccctctgggcttgttttcctctttattgctacttggctgtttttcacttggtcctcttcattctatgattaaggcaacccatataattgaaagaaaaataatgtgcagcctgtttcatcccttccacttgttttcttactatttatttatttatttctgagatggaattttgctcttgttgcccaggctggagtgcaatggtggcgatctcggcctgctgcaacctccgcttcctgggttcaagcgcttctcctgcctcagcctcccgagtagctgggattacaggcatgcgccatcacacctggctaattttgtatttttagtagagacggtgtttctccttggtcatgctggtctccaactcccgacctcaggtgatcctcccgcctcggcctcccaaagtgctgggattacaggcgtgagccaccgcacccagcctcctatttgctttaaaagtaatttcctggccggatgcggtggctcacacctgtaatcccagcactttgggaggccaaggcaggtggatcatgaggtcaagagatcaagaccatcctggccaacattgtaaaaccctgtctctactaaaaatataaaaatcagctgggcatggtggcgcacacctgtagtcccagctactcaggaggttgaggcaggagaatcatttgaacccgggaggcagaggttgcggtgagctgagatcgcgccactgcactccagcccggcgacagagcgagaatctgtctcaaaaaaaaaaaaaaaaaaaaagcattttccttccccaatttttctgtcattttcccatcctcattcaggcagagagaagaataacatgcccccttccaaaaaagacaaaacacaaggtagccacaaattccctagacacattagaaaaatagggagtggagaggggcattggaatgaaagttctctatctcattagctgttaggctttaggcatttatttggatggatccctttggcaccttggaagcaccactgaagtgctctgagaaaggggtcagctgtctgagggaatagttctggatagaggccacaggaagcactggccagttgctttagttctagatagctttgtattcccgccttgttgcccttagcggaggctggcccaaagcacacttgatcttgtccccactccctgcccccatctcagatcaaccttcagaaagtcccggcttgttggcaaaggcacacattctgtgttactcttaagtttcattagaaattcaagtcctctggggccctgttcccttgtgggcttgtgcaactgactttgtttcttgtctgcctttctggaaccaaatccaaggaaattcatgggtttggggagacagcgatgggaacccagcagggcacaggatgctaggataaagctgtggcgccccaaaagtggcctgctctgccaacatacataaatacatacagtctgagcttgacactgtataatttggcccagaacaatatgtattttgagctcatttaggtgaatgactttggcattccatgtacccactaggggaagctttatcaggctgcatttgccttatgcagaagtatgcctttgttctgagaaatggcctcagaacacactgttgagctgtctcctttagtgagtgtcatcctctcatccatttcaaaagattgcagatgccgtcttgaagtcctgcttgtaagaaatgcaggggttgggaatggaggagatgacgatgtagttttgcttttagttttcccaaacctgtttacattttttaaaaatgtaaccaacccataattgcattttacttgtcgtggttcgatctgattgtattgtcgaaggactatttttgaacctgtccaaataaactctgcaaagtatttccacaaaaaaaaaaaaaaaa

SEQ ID NO: 617 - DNA, 3144 bp, HOMO SAPIENS
attctttcttcgtgttcctgtgcgggattggtgtgcccaggggtttggctttccaattggctaacgccggggtgggtggggaatgtggggagatttgaatttgaaaccggtagggagtgataatccgcattcagttgtcgaggagtgccagtcaccttcagtttctggagctggccgtcaacatgtcctttcctaaggcgcccttgaaacgattcaatgacccttctggttgtgcaccatctccaggtgcttatgatgttaaaactttagaagtattgaaaggaccagtatcctttcagaaatcacaaagatttaaacaacaaaaagaatctaaacaaaatcttaatgttgacaaagatactaccttgcctgcttcagctagaaaagttaagtcttcggaatcaaagaaggaatctcaaaagaatgataaagatttgaagatattagagaaagagattcgtgttcttctacaggaacgtggtgcccaggacaggcggatccaggatctggaaactgagttggaaaagatggaagcaaggctaaatgctgcactaagggaaaaaacatctctctctgcaaataatgctacactggaaaaacaacttattgaattgaccaggactaatgaactactaaaatctaagttttctgaaaatggtaaccagaagaatttgagaattctaagcttggagttgatgaaacttagaaacaaaagagaaacaaagatgaggggtatgatggctaagcaagaaggcatggagatgaagctgcaggtcacccaaaggagtctcgaagagtctcaagggaaaatagcccaactggagggaaaacttgtttcaatagagaaagaaaagattgatgaaaaatctgaaacagaaaaactcttggaatacatcgaagaaattagttgtgcttcagatcaagtggaaaaatacaagctagatattgcccagttagaagaaaatttgaaagagaagaatgatgaaattttaagccttaagcagtctcttgaggagaatattgttatattatctaaacaagtagaagatctaaatgtgaaatgtcagctgcttgaaaaagaaaaagaagaccatgtcaacaggaatagagaacacaacgaaaatctaaatgcagagatgcaaaacttaaaacagaagtttattcttgaacaacaggaacgtgaaaagcttcaacaaaaagaattacaaattgattcacttctgcaacaagagaaagaattatcttcgagtcttcatcagaagctctgttcttttcaagaggaaatggttaaagagaagaatctgtttgaggaagaattaaagcaaacactggatgagcttgataaattacagcaaaaggaggaacaagctgaaaggctggtcaagcaattggaagaggaagcaaaatctagagctgaagaattaaaactcctagaagaaaagctgaaagggaaggaggctgaactggagaaaagtagtgctgctcatacccaggccaccctgcttttgcaggaaaagtatgacagtatggtgcaaagccttgaagatgttactgctcaatttgaaagctataaagcgttaacagccagtgagatagaagatcttaagctggagaactcatcattacaggaaaaagcggccaaggctgggaaaaatgcagaggatgttcagcatcagattttggcaactgagagctcaaatcaagaatatgtaaggatgcttctagatctgcagaccaagtcagcactaaaggaaacagaaattaaagaaatcacagtttcttttcttcaaaaaataactgatttgcagaaccaactcaagcaacaggaggaagactttagaaaacagctggaagatgaagaaggaagaaaagctgaaaaagaaaatacaacagcagaattaactgaagaaattaacaagtggcgtctcctctatgaagaactatataataaaacaaaaccttttcagctacaactagatgcttttgaagtagaaaaacaggcattgttgaatgaacatggtgcagctcaggaacagctaaataaaataagagattcatatgctaaattattgggtcatcagaatttgaaacaaaaaatcaagcatgttgtgaagttgaaagatgaaaatagccaactcaaatcggaagtatcaaaactccgctgtcagcttgctaaaaaaaaacaaagtgagacaaaacttcaagaggaattgaataaagttctaggtatcaaacactttgatccttcaaaggcttttcatcatgaaagtaaagaaaattttgccctgaagaccccattaaaagaaggcaatacaaactgttaccgagctcctatggagtgtcaagaatcatggaagtaaacatctgagaaacctgttgaagattatttcattcgtcttgttgttattgatgttgctgttattatatttgacatgggtattttataatgttgtatttaattttaactgccaatccttaaatatgtgaaaggaacattttttaccaaagtgtcttttgacattttattttttcttgcaaatacctcctccctaatgctcacctttatcacctcattctgaaccctttcgctggctttccagcttagaatgcatctcatcaacttaaaagtcagtatcatattattatcctcctgttctgaaaccttagtttcaagagtctaaaccccagattcttcagcttgatcctggaggtcttttctagtctgagcttctttagctaggctaaaacaccttggcttgttattgcctctactttgattctgataatgctcacttggtcctacctattatccttctacttgtccagttcaaataagaaataaggacaagcctaacttcatagaaacctctctatttttaatcagttgtttaataatttacaggttcttaggctccatcctgtttgtatgaaattataatctgtggattggcctttaagcctgcattcttaacaaactcttcagttaattcttagatacactaaaaatctgagaaactctacatgtaactatttcttcagagtttgtcatatactgcttgtcatctgcatgtctactcagcatttgattaacatttgtgtaatatgaaataaaattacacagtaagtcatttaaccaattaaaaa

SEQ ID NO: 618 - DNA, 3920 bp, HOMO SAPIENS
atcacagggtgggaaataaaagctgtggcccccaggagttctggacactgggggagagtggggtgacatgagtgactccaaggaaccaagactgcagcagctgggcctcctggtgtccaaggtccccagctccataagtcaggaacaatccaggcaagacgcgatctaccagaacctgacccagcttaaagctgcagtgggtgagctctcagagaaatccaagctgcaggagatctaccaggagctgacccagctgaaggctgcagtgggtgagcttccagagaaatctaagctgcaggagatctaccaggagctgacccggctgaaggctgcagtgggtgagcttccagagaaatctaagctgcaggagatctaccaggagctgacctggctgaaggctgcagtggaacgcctgtgccacccctgtccctgggaatggacattcttccaaggaaactgttacttcatgtctaactcccagcggaactggcacgactccatcaccgcctgcaaagaagtgggggcccagctcgtcgtaatcaaaagtgctgaggagcagaacttcctacagctgcagtcttccagaagtaaccgcttcacctggatgggactttcagatctaaatcaggaaggcacgtggcaatgggtggacggctcacctctgttgcccagcttcaagcagtattggaacagaggagagcccaacaacgttggggaggaagactgcgcggaatttagtggcaatggctggaacgacgacaaatgtaatcttgccaaattctggatctgcaaaaagtccgcagcctcctgctccagggatgaagaacagtttctttctccagcccctgccaccccaaacccccctcctgcgtagcagaacttcacccccttttaagctacagttccttctctccatccttcgaccttcacaaaatctctgggactgttctttgtcagattcttcctcctttagaaggctgggtcccattctgtccttcttgtcatgcctccaatttcccctggtgtagagcttgtttttctggcccatccttggagctttatgagtgagctggtgtgggatgcctttgggggtggacttgtgttccaagaatccactctctcttccttttggagattaggatatttgggttgccatgtgtagctgctatgtcccctggggcgttatcttatacatgcaaacctaccatctgttcaacttccacctaccacctcctgcacccctttgatcggggacttactggttgcaagagctcattttgcaggctggaagcaccagggaattaattcccccagtcaaccaatggcacccagagagggcatggaggctccacgcaaccccttccacccccacatcttcctttgtcttatacatggcttccatttggctgtttctaagttgtattctttattttattattattattactatttttcgagatggagtttcactcttgtcgctcaggctggagtgccatggcgcgatcttggctcactgcaacctctgcctcccgggttcaagtgattctcctgcctcagcctcacgagtagctggaattacaggcaggcgccaccagacccggctaattttttgtatttttagtacagatggggtttctccgtgttggtcaggctggtcttgaactcccgacctcagatgatctgcccgcctcggcctcccaaaattgctgggattacaggtgtgagccaccgcgcctggcctattattttttgtaagaataaaacaggtttattgggatttgggactctgaacagttctgtctctactacctgatctcctcctaccacgactttgggatctagaggagctttggctccggctgtgacggctccggccgttctcactgcggctgcaccggcccccgctgcggtcactatttcttcctctgctaggtgaattgtgcctctcctggctctttgacatgtgctagtgagatttcttccttttcctttcggattccccatttcttttgtaggaatggtctggactagggttctccttccccgcagcctgtagtattcatcgtggtggcccaccctctctctccccttggagctcttgccaaaggaggagacaagcagaggtctctattggatttctcaacacctgaagaaagttgcagtgttttcctcttggacattgttgtatttcaaataaaccacaaatcatcattttccaccgagccactgggcagaattcacactgaagctgtcgtcctgcgtacataccatcgtccgttaaacagagaaagagctgcttggcattcttcttccgactggtactgaacatatatacttgcccctcaggtgaggttccaagttgcaactgaccttgaactgaatcactctccccacgttattttttaattactatttttttttaaagatggggtcttgctctgtcgccaggctggagtgcagtggcgcgatctaggctcactgcaacttccgcctcccgggttcaagcgattctcctgcctcagcctcccgagtagctgggactccactaaaagtacaaaaattagctgggcgtgcaccactgcgcccagctaattcttgtatttttggtagagacggggtttcaacatgttgaccaggatggtctcgatctcttgacctcgtgattcgcccgccgcgtcctcccaaagtgctgggattacaggcctgagccaccgcgcccagtctctccccacgttcttgaactcgggcagcacatcctcacagaaatctaggaactgttggtaggtttcttcctcgctgtactccaggcttgcttcggagtcatagtcatccctcctgcactgctcctttccaaacactgtaaacatgcttttaataagaagggtaggactggatgttgggaaatcatgtgaacatctatctccaaatctgcaagctcctgttttactgtagaagggacaattaactccatccttctccatgactctgaaatccaagggggggttccgggttttgccatgtggcgccattttccaactcattttcagcctgatccagcatcttctggacagcttccggtttttgtttcttctgtcgtttctgttcctcctcctctctctctttcctctgctgttcttcccattgttcctttaactttcgctcttgttcttgccgttttctagccacctcttccttttccttctttattctgaattcttcttgtgccttctgctctctcagcaaccactcctcatgtaatctttgcctctctcttccccatagcttttctagttgttgtttttcaataaaagtgtcctcctctttctgtgagagtcctgagtccctcagtggagcaagttcctgctggcgtttctttcgtttctccttcttcagggcggccctgtactttttgtggcttggtttctctggaaatgtcaccttttcgggcgcagccatcttgccggcaccgccccgcccctctagttgtatcctttataataaactggtaaacattgtaaccgcagattcagcccaatctggttcaactttgtgtaataaaatggcgagttgtttttcagttgtcgtggacccccaggttgcaagttacataccctgggcatgtccagatgaacgaagcgtgcaaatccacgtggaacctaagtgctcagaccgaggaacagggactgagttaagaagtggacaccacgtggcatgatccttgatccaatcagattgagccctggcgtgatccagtcagatcaagcctcctgaatcccctcattacaagatccaatcatatcatgcctcactaccctctgtatataaaatctgccccagcctccaacttggagagacagatttgggccagactcctgtgtccttgcttggctgccttgcaataaatttttctctctacaaaa

SEQ ID NO: 619 - DNA, 8436 bp, HOMO SAPIENS
attttgaccgctatttagaagagtgacctcataaatcttttagcaaagtagacacacatacctaccacatttcttaaaagtagattcgtattttgatttgagattgttgaaaagcatggtatgtttggagtgcacttagttatgtcccatctcataaagactgttgagctctctgcactgctgatgatgaagcattgcatgaacccagaaaacggggatgccaaagcacagggcttaggtgctgttccttgcgtcatcagcagaggtctgtccactttgtagaagggagagtcccgtattctcagagtaaaagttgtttctggaattgatctcgccaaaaaggacatctttggagccagtgatccgtatgtgaaactttcattgtacgtagcggatgagaatagagaacttgctttggtccagacaaaaacaattaaaaagacactgaacccaaaatggaatgaagaattttatttcagggtaaacccatctaatcacagactcctatttgaagtatttgacgaaaatagactgacacgagacgacttcctgggccaggtggacgtgccccttagtcaccttccgacagaagatccaaccatggagcgaccctatacatttaaggactttctcctcagaccaagaagtcataagtctcgagttaagggatttttgcgattgaaaatggcctatatgccaaaaaatggaggtcaagatgaagaaaacagtgaccagagggatgacatggagcatggatgggaagttgttgactcaaatgactcggcttctcagcaccaagaggaacttcctcctcctcctctgcctcccgggtgggaagaaaaagtggacaatttaggccgaacttactatgtcaaccacaacaaccggaccactcagtggcacagaccaagcctgatggacgtgtcctcggagtcggacaataacatcagacagatcaaccaggaggcagcacaccggcgcttccgctcccgcaggcacatcagcgaagacttggagcccgagccctcggagggcggggatgtccccgagccttgggagaccatttcagaggaagtgaatatcgctggagactctctcggtctggctctgcccccaccaccggcctccccaggatctcggaccagccctcaggagctgtcagaggaactaagcagaaggcttcagatcactccagactccaatggggaacagttcagctctttgattcaaagagaaccctcctcaaggttgaggtcatgcagtgtcaccgacgcagttgcagaacagggccatctaccaccgcccagtgccccagctgggagagcgcgttcatcaactgtcacgggtggtgaggaaccaacgccatcagtggcctatgtacataccacgccgggtctgccttcaggctgggaagaaagaaaagatgctaaggggcgcacatactatgtcaatcataacaatcgaaccacaacttggactcgacctatcatgcagcttgcagaagatggtgcgtccggatcagccacaaacagtaacaaccatctaatcgagcctcagatccgccggcctcgtagcctcagctcgccaacagtaactttatctgccccgctggagggtgccaaggactcacccgtacgtcgggctgtgaaagacaccctttccaacccacagtccccacagccatcaccttacaactcccccaaaccacaacacaaagtcacacagagcttcttgccacccggctgggaaatgaggatagcgccaaacggccggcccttcttcattgatcataacacaaagactacaacctgggaagatccacgtttgaaatttccagtacatatgcggtcaaagacatctttaaaccccaatgaccttggcccccttcctcctggctgggaagaaagaattcacttggatggccgaacgttttatattgatcataatagcaaaattactcagtgggaagacccaagactgcagaacccagctattactggtccggctgtcccttactccagagaatttaagcagaaatatgactacttcaggaagaaattaaagaaacctgctgatatccccaataggtttgaaatgaaacttcacagaaataacatatttgaagagtcctatcggagaattatgtccgtgaaaagaccagatgtcctaaaagctagactgtggattgagtttgaatcagagaaaggtcttgactatgggggtgtggccagagaatggttcttcttactgtccaaagagatgttcaacccctactacggcctctttgagtactctgccacggacaactacacccttcagatcaaccctaattcaggcctctgtaatgaggatcatttgtcctacttcacttttattggaagagttgctggtctggccgtatttcatgggaagctcttagatggtttcttcattagaccattttacaagatgatgttgggaaagcagataaccctgaatgacatggaatctgtggatagtgaatattacaactctttgaaatggatcctggagaatgaccctactgagctggacctcatgttctgcatagacgaagaaaactttggacagacatatcaagtggatttgaagcccaatgggtcagaaataatggtcacaaatgaaaacaaaagggaatatatcgacttagtcatccagtggagatttgtgaacagggtccagaagcagatgaacgccttcttggagggattcacagaactacttcctattgatttgattaaaatttttgatgaaaatgagctggagttgctcatgtgcggcctcggtgatgtggatgtgaatgactggagacagcattctatttacaagaacggctactgcccaaaccaccccgtcattcagtggttctggaaggctgtgctactcatggacgccgaaaagcgtatccggttactgcagtttgtcacagggacatcgcgagtacctatgaatggatttgccgaactttatggttccaatggtcctcagctgtttacaatagagcaatggggcagtcctgagaaactgcccagagctcacacatgctttaatcgccttgacttacctccatatgaaacctttgaagatttacgagagaaacttctcatggccgtggaaaatgctcaaggatttgaaggggtggattaagcaccctgtgcctcgggggtggttgttcttcaagcaagttctgcttgcacttttgcatttgcctaacagacttttgcagaggcgatggcagagagcagctgcaggcatggtccctggagccgagccttcaccacgcactcgtccaagttcggatgcgggaacctggtcccagcttgagttcctgcctttcccaccacaaattatcaactggttgatgtgtacactaattacatttcaggaggacttaatgctatttatgttgtgcctctgcaggcaaagcccttaataaatattttacatcctttctaatgacaatgaatggaattaatcactcaacaggtatagtattacgactcatgtttactttttaaaatgatttagaccgattttcagattttatttcgttatgattaaagatgtctcatgtacttggaaaagtgagcattttttttttttttgtatttcactttcataccaggcttaatgtcaatgacatttttatttttgaagtactctgacacctccaccctctactttattagaattggaaggcaaatttttgtccaaaaacctacagacaagtactttgagagaatttccaatataatattagacataatgataattttttccatactcagaatgaaaaactggatattacgtttttgttttggggtttttttgtacaaatttagctaatagctacaggctgagagaattgtaacatagcatgacaaattttgtgttgacttgaaaggaatcacaccattattccttagaagtaattacatgtgttctaacacatttgagacagggttggactcccatttctcatccgagaaattacttaacccttcctggcgctgtacagtcatcttttattctatttcctctttgctgtttgtagtagagacattttgaatgaaacttggcactgcttgattcaaaactgtggaaaccagatctgtttagtctcctgtttgtatgcgtttgctaatggtagctaaataaccagtttttgttgtaaatgcaccaattctgaaggcactttatgtactacatggaggtcatatctggttttgtttttatttttttatcatgaacattaaatgtgatgatgatttcttttccctgcacacatctttccggtgcaatatctatcaattgtgaatctggctgctggtgtataaaaacctggatgtaaagctgagcctacagacctgtcctcaccaactgttttgtgatttctactcaactacaaagatttatttaatgtactcttaatctaactgagttttgttaccaatgacctgttgcatgcttcaataccgtgtactgcctgagttgtgcctcttgtgtgctagattaaaagtgagacagagacttgacttgatcctctgagctcaagctattgagctggtagtggcagaggactgagggtacctgcacagtttgattcttttccacgtgtaagtctccattgcagaattgtcgtgctttgagaaaacacctgaggcagtgtgggagttgaacgaccctgctgtcctttttaacctgtgttgtcctagaccctgtcggggcagtcaggggacactagagatttgatctcatgcgagtcatcaataggacaaaaaagttgtggtttggggaggtctgtttgttacataaaaaggacctttcggtgtaagaaattgccgtttttaccctgccctggctggcatgtgagaagccatggaaggttgtggttgtaaatgagttgtctaaaggggtgcagaggcctgaggtttctaaaagaaggtagatttctacagagctgagtgttggttcctttttcttattggttgaaaattacctggtagtgatcagaaaacttagatgctatgtaactaaaaaaaaaaaaaaaaaaaaaaaaaaaaaaaaaaaaattcccgctcatgagttttgactattggtgagatgttttccgctacagttaacatgacaaatgtctcagtggcaaaaatcccctttttgtaagcccccatagtctagaggcagttttctttttaagaatcatgccagagcctgagtcgagcagtatgctttcttggtttttgagagtaattgtgtaattgtagagggagaaatccaattctaacctaagaactgggattcttctgtcatcttgtaaaccgtatattgaaaaaaacagaatgtcactaaatgcatattaagtcaagtattggaaagtataaaagaaaaatcattctgacaatttctaagccagaagcaaacaagaattactgaaatctaccccatgaatacttggaaggcagtaattgtgagtgacacctcagttcatcaaccccttaataatatcagcttaattttaatgacaactaaatatgctgaagtgaggatttagtattttttaaaaaagcaaaacaaggttcagtagtcctcagcaattctccaagtttctctctttgcctaaaatggtcatagatcttgatttctctgaatcgtgatgaccacacccagtcatcttcacagcataattgcaggtggcagtaaagagagtgtgctgggtaaggagcagttgctgggtcattccttgggccccgacctgcccggggagtagccctgggggagagagggcagtgttgcctatcccagaggtcccagcagtcacactgctctgcaggccgggctctctttatagccagagaaatcaccttaatgcagtctctttagttgtctgctgaagctgtagttattatgggccacttacatgaggctgagaagtacgtgccggagctcacacactgcctgttgcggttctcttaacatcagttatcacagctgcctgtgggtcccgggtatttccattcctgccccttgttggcccgaggaaggatgtggaaagagcacctggtgggatgaaggtccaacagcctgtgcctctccactgctggccctggagccggcagcagtgaggcattcattgtctgtgttgcggtgtattcccagcttcagtgctcttttcctttttgcctgaaatgtttatgcttctctgcagccagtcctctaacaaatctcaagaacaaaggtaagacacttggtttttgtttccaggacccttcagaaggtgacatcagatattccctaaattcagacaatgagggatacagagcgacttggcatgtattatttctcccatgtaaggacaaagggacagattattattgttatttctgagacagagtcttgctctgtagctcaggctggagtgcagtggctcaatctcagctcaccacaacctctgcctcctggcttcaagcgattcttctgcctcagcctccccgaatagttgggattacaggcacccaccaccacgcctggctaatttttgtatttttagtagagatggtttcaccatgctggccaggctggtcttgaactcctgacctcaggtgatcctcccgcctcagccttccaaagtgctgggattacaagcatgagccaccgcacccggcctcacagtgacagattctgagaaacagcatgcaaaacatttgaaccattttctacatctcccattgttgcatagagagtgtgcaccgctgctatcttgccagatccacactggtcctcccgaaagccaggttcatacacagcaactttttaattattctaacagttacccattaacagtcgactcctgtatttctgagagtcttgtactcacctctgaaatttaaaaacgtataaagagagcctgggttaatcagttctgcagcccctacgtgacactgtgctagttctccttcttctgtctcctccttaccctggccctgcacccctgtacttaagagggagaggtgggaggtgctgtctggtatcatttgctgcctcgccagtagagggtgccgctgtgcagggtaactgcccgcctgctcccttcctgacctcccctgaccccgaagatcactacctctgtcattcaggcattggggtacatcctgataagtcgtgtcagaactgccaatttcaggactgagatgtgtttttaaaaaacaaatccttataaactccactttgtactttagattttaaaactggggaaaaatgtgatattctttggaccacttttttaatttatataagccttaatgaacagtgtctatacatttgcatacacacacccccaccccagagtgttctcagtatgtcagagaaagtgccacagcattaggacgggagcttggagaacgttttctagaaaagggttagcttcctgttggcatgaaattttccaagcaaacctcattaaacatctgttgtttgttaaagatgttccactgaaagcaacgcatgtttcaaaggcacgtctttccgttcgttggttttctgtgtgtaaggagtagcattgctgttggcgcctaacctcgcgtgcactgcattctcaaccccgtaccagtgcatcatcagaagccttcctcgtgaccataactctgtgtctgcagatatgtgttcccgtgtaagccagttttccccttttactcagactgatttcacctagattgtcacggtttccttcatgttaactttgcgtgactttgttcttcctttactactctgtatgtaatatatatacatatatacgtacatatgctgtccaaatatatttgtatatatttgtatagcatttttacacctttattgagtaatctggtttcgaaaggaggtgagagtttagtcccttctgcagttttctccaagctgtgtcctgtgaatttcaacccttggagcctaagaaaaccctaggaagatgatgttaatttgctgtcatttcctaattcaggatctatcatcaaatgaaacatgaaaaaaacagtgacttttaaggtgaaaagagtttcaagcattccaaataaattatcaatgtttcataactttttattataaacccacctcctaataggaagccaagtactatttgatacagtggtaaaaaccaaactaccttgaatttttttaaggcaacttatgaataatgctcattttcacagtcagaatagctttaaaatatggttgaatttgatacacacaggaagttttcttgaagaacaatcctttcgcttttcttttttcttgagagatctaaagagaaactgtagattgttttcctgacagcaaaagactaatgtgacaaaatgaagtcattgtaaagaagcgatgcaacttgtcaaatatttaataaagaattatggaagctggaacattttctac

SEQ ID NO: 620 - DNA, 5306 bp, HOMO SAPIENS
aggagaccctcctttgtttggctcttttgctagacaacttctgtttgggtaggagggtcaaattagtaatgcaccatctttaatgtattttttatggagactgtacataaaattatataaatctacagaattggttctattttaaggagagaggggaatgtatgtgggaggcaaggatcagatgcaatcgtggagactgggagcttcgggcgagtggcactcgggtgtggggagcgggagggcaagagatgagtgccgggcaagatgggcaggggcccgtgccctctgcacacatatataaatataaagaacacctagataaagtctatatatctctatatctatatgaagtcatagtttgctttatttttgtacctgtgcttagagatgttttgagcagtgctaccttcccaggcagtctgggatactagctcatgccttgacgccacctccttccctgctcttcctttggtattctctctgttcagagttgcttgggtctttctgatggaaatgtgtatatatgaaaagtttgtaaaataacaaaacaaataacccacctgcaggaaggacaagtgagctgaaggttgtgtggagctgcaggatctgatagccctaaagaaccaggaccaatgtgtctcttgccacttgggagggatgttgacttgaacttctttgcagaggggcttaacagggcaaggctgaggagatgaaaactgtgactccatccccacgtggctgtggaaaggtaaccagttcctcagagaaaacctggcttcacagcattagaaagggggtggttgagactacctagggacctacggtgacacctgtcttggtttgtagcactgtagctcagacagctcagaccgctcatagagggcatggcaatgggagagtttgtgaggctggctgcctgggcttggtcttggagaacacatggcctgtttagtgttgctgcagattcttagagccagtgtgaatgtggtatgtagtataaatatgtcatctatgtttttttcagttatttttaattggaaataaagtgccattgcaaataggatgctccaatcctgggacactgagtggaggatgaggagggagagatgaactgtgggccggcctgggagagggggtcttagtggaaccttccttctggcctccagccggggacttacaaaactgaacaatgtattggcagaactggacccacaatgggagattctggggagcaggagttcacttgtatctgagcaggaagcagtgtgccctgaagaatacctctctgagcaaattccagacctcacacatatgcaagggctctgccttgcagcctcagcaagcgtctcctggtgctagctccttcctgacttgcccggagctcggagtgatgtatttgaagctggtgctgggccagatggtgcaggcagtgaggagagactcaggactgcaacctttcggctccttattcctgctcatcactcagaaaagggcagtactaacccctttcctaaccaagacatggcactccctaagagctcttgtctatagagtttggtccttagaggaaagcagataccttcagcgtgagaagggcttggttgacagttttggggtattatgggaagagtaggttggggtaaagcttgagtctaactcttgatccttacatggacctatgaggccctgccattcagtcaggcactgtccttgggtcctcaaattaactgctgagaacactccccactttccgaggacgctgatgggaaatgggctctgtccatgcagctggaaggatccagtgctggtgccactgtcagtggcaccatccttgccttgaatgatctttcttgcaggctcctgcagctgagtgtttcttgtaagatttttcagggggattgggcaagaagaagaggtgcaaattctgttcccttcctaccttgaagccttcccagaccaccacggtctctgcacaagggaggctcccattactgttctgttggcttctagacccaccatcccctctctttctgtggactctgcccgacttctggccacatgcaaccagcagagtaaactgctccaacacctcgggcatgtcctagggcttgccctcccaccagggccagcccaagattaggtcctcagcagcatcaaggtctgggagagccactggcccacatgtcaccattctattcctcagcctccaacaggactcttcattttggggagggaaagggaagatggggccatagcccctaccttgaaattgtacagtgtggaggggatgttagtgcctacctgtgacctttctgctccactgctcagcaagatgaggtaaggttgggtgtcagaggggacctccagcttctctgaagagccagcccttaaggcacttggagcaaaggtcattgagatcagctttatgtggagtaaggaggaggcctgggaaccgcttgtggcatcagttggggcgacaggtggatgagtgtgctctgatggagcttttacggcccacagccactgccaggagcctgagctcttccccatgcttgggacacgttccttggtccccacagcagaatggacattgaattttggtgcttttccctttggtagaaggtggaggtatctgaggagttgtttctgtcttgctacctctgtctactatatagagcaagagtcgggaatagggagatgtgtgagaatcactctcccatggatcagtgtgggccctgtccctcttccccactgtcaccaaccagcagcttggggaaaaggctctgtcgtggatttttgctgcctgcttcccgcttccactcttcttggcggtagatgttcatggtgatccactttgggcggtctgaaagtaggaggtgggggaagaggcaagcctgcacacacacttcctgtccacagggggttgcctgtggcattggagggtggagtctcagagtccagggactgggaggaaggtacttgatgggatggtcttgattctggaactttagactgaggtgttagaaaggggaattgttggctaggggagaagagcagtttaacgctccacttgctaagtcgtctgtatcagtgtcagaaggtcttgacctcccattcagatttaatttcctaactgccaggtgtggggctggggatagagggcccagaagggggcgcagtcactgacgtgaagggaccacatcccgcttcatgtcagtgactcctgccccttggtcttcagtgtttttctcttccccaggagggactttgatcatgcaggatagaattctcccatcgcacacctgggggcaagttttagatgagcttctttcctccatttcacctggtggtctgaggacacacagagggtgggggtgagcaggcagtgtgggtggggaggggctacctcccccagaccccttacaaactctgtacctctcggtgcgcggcagcctcttgctgtagttcttcttttctggatatgactgtcagtttcgtcatgagatttcttgctctcatttcgaactctttctttcttccactttctttgggggcgacccccgatccatgccaggtcttcctgtgaagaccgttccaacctcgtttccatttcttgaatgttgagtattacaacatcactgcgctagggtgcttcatggtgctgttctcgaagaggccagttgggctgaatctccttcctcccactggctcctgatatcttgctgtattttgtcttctttctgatttttccctaggggtttggggtgggtgacttaggggcggcttttgtgttctccctctctctctctttcttttctgtatgtatgtatggactggttaaagtgagtttgggcagctgactttatggtatgggttggctgacttttgttcaacattaaagacaaaccaacaaattgtacagctgcacacagaacacctttgagtgtgaacttgaatggcaactagaggcttactttttgaacttcaggtatgtaactcaaaagtaaataaaaccactattttttcagtaagcttttttttcttctaaaagatgacttagaaatcaaactataagaacatgaaatcggtgctgtaccaaagccttatatgaacatattctacactctgtataacctgtctgtgaggagctccctgctctatcaccctcttctcaaaagcctgggaatgccagcgcgtgccaagcctggggctgggtcttggggacctgtgggccaagggcaccctgggaagtaaaagatgacggtgaggatgggacacccttctgctgcctgagcagactgcaaggaaaccagatgtgtgtgtgtgcgcgcacctgcatatatatgtgtgcatacctgtgcgtgtgtgtgcgtgtgcgtgtgtgcacgcaagagagtgagagcgggagagagctcacaggtgcacagtgtcatggtgaatgtactaagtacgagcttgaagggaggcccaggttggctctgggagtggggcggtgtgggaatgaaggggggatgctctctcccctgttttctgcctccttcccttctccgtcagggaagggaggtgtattggaaacagctacactctcaatcaggtgctttttttccctcaaaatctccaaactcaaagcatttataaggggcccttccaatgggcaggcacccccagccaccaaatcacagacttccaagagtaggaggaactgtctcctcccgaacccttccttgctttcctggggaagagggttcttcctgcagggaccctgggcatcctgctgctgggcctgggcctatagactgccctgccccttcttcccaaacactgagaagaccccgctggagatgaccccaaagccacgcctgctctacggccctaagcaatagacgcctgccctggctgctgatgatggtgatccctttgtcctttgacttggcagtcaaaaatggagtgacaccccagactcagtcaggaagagaacctgcagcctgcctcagctcaggctaccacgccaggctccactcgctggtatttccaggcttgctaagtactaaccaactcatccccagtaacactgcatgttcatatcctgaattacaaatcaaaatgagcaaacacgtgcataagcaaatgagaaaaaagaaggcacacatcaaatgatgagatgtgcagccagtgcaggtaccccgggagtgttgcaagttaaactgatgaaaagacgtttagtatttaattgctcctcatgtaacattactctgcttcagaaatgttttgtattttgatataaataaacatttgctaaaaaagtt

SEQ ID NO: 621 - DNA, 392 bp, HOMO SAPIENS
taataccactgttgttactctttctccttacaatttttatgttgttgagatgtatcagttatgtattataatcatgaaattgtattggcctcaaacccaaattttctttgtagtctaggatagatttttcatgaaagctatatagttataactgtgattgtacagattgtttatttgttttacagctaacattaagcatgattccaggtttttaattatgttccagcaacactagtgtttctttataacttaaaatcataaccactttgataatttacctttggatctgaccagtgattcatttttttcttgaatatactttgtgtttgctttctcatccccgttaagtctgaaacattattgacaccccacatcacttactctgtttaaag

SEQ ID NO: 622 - DNA, 1811 bp, HOMO SAPIENS
agcagtcctgtcatgcggaagtagcagtccggtcctagggactagcaggtgggttggttgggcgcaggaggacgggggcgcgcttcccataacattaccctggctgagcgtgaggctccagggctgggcaccgggttgacctcttattcctcgctgagggcatcgttaccgcctgtggctgcaagccgaggcgcgcgggtggaaactgggtcgaggtctgggtagacgtctgagcgatctgcacaaggagtggcgcagtctggaatttgattgaggattcctaacgccctccgcttgatgttctggtgattcccgggggctcggcttcggaggaaggcaccaagaaactgataatgttcctttgaattggcttctgtatttgcttcatcaatgtctctcatactgaatatcttaagagagatgctggaatattttggcgttcctgtagaacaggttttgctgatttgggaaaataaagactatggatcaactaggagtattgttcgtattattgggaaaatgcttccactggaaccttgtcgaagacctaattttgagttgatcccgctcttgaactctgtagactctgataattgtggatctatggttccatcttttgctgatattttgtatgtggcaaatgatgaagaagccagttatctcagatttcgaaatagtatatggaaaaatgaagaagagaaagtggaaatttttcatcctttgcgactagttcgggatccactgtcacctgctgtaagacagaaagaaactgtgaaaaatgacctgcctgtaaatgaagctgcaattagaaaaatagctgcccttgaaaatgagctgacttttcttcgctctcagattgcagcaattgtggaaatgcaggaactgaaaaatagtacaaattctagttcctttggcttgagtgacgagcgcattagtttgggtcagctgtcatcatcgcgggctgcccatctgagtgtggacccagatcagcttccaggttcagtgctttctcctcctcctcctccaccacttcctcctcagttttcatctctccagccaccgtgttttcctcccgtacaaccaggatctaataatatttgtgactcagataatccagcaactgaaatgagcaaacagaacccggctgctaataagaccaattatagtcatcattcaaaaagccagagaaataaagatattccaaacatgttggacgttctaaaggatatgaataaggttaagcttcgtgcaattgagcggtcacctggcggtagacccattcataagaggaaaagacagaattcacattgggatccagtttctttaatatctcatgcacttaaacagaaatttgcatttcaagaagatgattcttttgagaaagagaatagatcttgggaatcttccccattttctagtccagaaacttcaaggtttggacatcacatttcacagtcagaaggacagcgaactaaagaagaaatggtcaacacaaaagctgttgaccaaggtatcagcaacacaagccttctaaactcaaggatttaaactcaacttaaggttgagctttaaacttccaaaacttcttcctggatgataaattattcttagaaactgatttggactgttaaaggctaaaagtagatgtatttaaagactcttcttgacacattttgcctacacttgctatgtaaatatgtatgcctgtcatttttgtttcctttgttcctttttacgtttatactctgttcttctgtacatagagcttaaaataaacattctttttgaacttgaaaaaaaaaaaaaaaaaa

SEQ ID NO: 623 - DNA, 1515 bp, HOMO SAPIENS
gtacgcggggcgtctggaacttaaaggggcagcgtaccttggccgtcccgttccacaacaaggtcccttctgcggtctcaaaggcttataagcaagggcgggggcagagggctaaagaagggagtttttgcggcccgagtgggtaatgcgtggaggactcccccaactcgtctctcaaggaaaagggggttcagaaagggagagagttcttccccctctcctgcctgggtgtcgctccaccagcctcctggccgtcgcgccccctcctcactgcgccacccccgggtgtgcctccttccctgcgtctcacacagcccctttcttgtccgcaaagactgaggagcggggagggcgggccctctgacaccggaacaggagccgtgcggcgtccggtttcagcagggaaggcttaggcgggcgtcccaacctccgggcttccggtgccgtttcccggttcgctcggccgcggtcgctatggaggagccggagatgcagctcaaggggaagaaagtcacggacaagttcactgagagcgtctacgtcctggccaacgagccatccgtggccctgtaccggctgcaggagcatgtgcgtcgctccctccccgagctggcccagcacaaggcagacatgcagcgttgggaggagcagagccagggagccatctacactgtggagtacgcctgcagcgccgtgaagaacctggtggacagcagcgtctacttccgcagcgtggagggtctgctcaaacaggccatcagcatccgggaccatatgaatgccagtgcccagggccacaggtagctcctgggaccgcccgcccccactgccactcccagctgcaaggaccgtctctcagctgcgctgggaaccgctgcttctcgcttattagaaaactgtctctttccttttgtcctggtgtctggtgacctcctcttgtcctgtggcatctataacctgagttcagtcacttaataccgaggtcctgcgctctgctgtgtgcctggccctgggctgggcactggggacatagcagtgaccgagacagacaggctcacaaggagacatacgacaaccaggtaaacatggcagacaagagcatgtcagatgcgctgtgaagaacactgcggggcccctcctaggaggtggcatgagttacatgcagacagagacgatccgggggcagacggagttccatgtggggcagtggtgagggcagacgctctggggctgggatccctgggagtgttcgagaagcaccgagaaggcttctgtggctggagccggccagctgggggagatggggccagggagatggcaggggcctctccctgtcccaggacccagagccaagggaggctttaagcccaggaccaggggtctgaaaacgaaaagcactcacagtccttgaacattggaaagagaatttttgaagagtagcccttctttttgtttttgttggcattctaagttaataaacacgcttatgaacacacaaaaaaaaaaaaaaaaaaa

SEQ ID NO: 624 - DNA, 317 bp, HOMO SAPIENS
  misc_feature (45)..(46): n is a, c, g, or t
  misc_feature (77)..(77): n is a, c, g, or t
  misc_feature (148)..(148): n is a, c, g, or t
ccgcgtccagcaaccaggagaaacagaactgctgagctcagaatnngccaaggccgcgtctgctagcagggagcaanggcacagcctgctgtctggcctcttctgccccatccctccaccgggacatggcccagatgagaaagagctnccagacggcaagtcaagcgtggggcgggagaggacaacgttttatgcaagagtggattctcggagcctctgcactctccatcagggctgctggcatggaaaacacagagaaaccatcacctaggacttgattgaactactggacttcccagaagagtccaatttaaagc

SEQ ID NO: 625 - DNA, 5313 bp, HOMO SAPIENS
agtctggaattcagatgcctattggtgactgctccgtggcagctaaaccaagaaaacagctgctctgctcattatttcaaaccacactagggtacagagctcgtgcttcgggatggaaacctatggttatctgcagagggagtcatgctttcaaggacctcatgaactctattttaagaacctctcaaaacgaaacaagcaaatcatggagaagaatggaaataaccgaaagctgcgggtttgtgttgctacttgtaaccgtgcagattattctaaacttgccccgatcatgtttggcattaaaaccgaacctgagttctttgaacttgatgttgtggtacttggctctcacctgatagatgactatggaaatacatatcgaatgattgaacaagatgactttgacattaacaccaggctacacacaattgtgaggggagaagatgaggcagccatggtggagtcagtaggcctggccctagtgaagctgccagatgtccttaatcgcctgaagcctgatatcatgattgttcatggagacaggtttgatgccctggctctggccacatctgctgccttgatgaacatccgaatccttcacattgaaggtggggaagtcagtgggaccattgatgactctatcagacatgccataacaaaactggctcattatcatgtgtgctgcacccgcagtgcagagcagcacctgatatccatgtgtgaggaccatgatcgcatccttttggcaggctgcccttcctatgacaaacttctctcagccaagaacaaagactacatgagcatcattcgcatgtggctaggtgatgatgtaaaatctaaagattacattgttgcactacagcaccctgtgaccactgacattaagcattccataaaaatgtttgaattaacattggatgcacttatctcatttaacaagcggaccctagtcctgtttccaaatattgacgcagggagcaaagagatggttcgagtgatgcggaagaagggcattgagcatcatcccaactttcgtgcagttaaacacgtcccatttgaccagtttatacagttggttgcccatgctggctgtatgattgggaacagcagctgtggggttcgagaagttggagcttttggaacacctgtgatcaacctgggaacacgtcagattggaagagaaacaggggagaatgttcttcatgtccgggatgctgacacccaagacaaaatattgcaagcactgcaccttcagtttggtaaacagtacccttgttcaaagatatatggggatggaaatgctgttccaaggattttgaagtttctcaaatctatcgatcttcaagagccactgcaaaagaaattctgctttcctcctgtgaaggagaatatctctcaagatattgaccatattcttgaaactctaagtgccttggccgttgatcttggcgggacgaacctccgagttgcaatagtcagcatgaagggtgaaatagttaagaagtatactcagttcaatcctaaaacctatgaagagaggattaatttaatcctacagatgtgtgtggaagctgcagcagaagctgtaaaactgaactgcagaattttgggagtaggcatttccacaggtggccgtgtaaatcctcgggaaggaattgtgctgcattcaaccaaactgatccaagagtggaactctgtggaccttaggacccccctttctgacactttgcatctccctgtgtgggtagacaatgatggcaactgtgctgccctggcggaaaggaaatttggccaaggaaagggactggaaaactttgttacacttatcacaggcacaggaatcggtggtggaattatccatcagcatgaattgatccacggaagctccttctgtgctgcagaactgggccaccttgttgtgtctctggatgggcctgattgttcctgtggaagccatgggtgcattgaagcatacgcctctggaatggccttgcagagggaggcaaaaaagctccatgatgaggacctgctcttggtggaagggatgtcagtgccaaaagatgaggctgtgggtgcgctccatctcatccaagctgcgaaacttggcaatgcgaaggcccagagcatcctaagaacagctggaacagctttgggtcttggggttgtgaacatcctccataccatgaatccctcccttgtgatcctctccggagtcctggccagtcactatatccacattgtcaaagacgtcattcgccagcaggccttgtcctccgtgcaggacgtggatgtggtggtttcggatttggttgaccccgccctgctgggtgctgccagcatggttctggactacacaacacgcaggatctactagacctccaggaacagacatggaccttctctccagagctcctgagtggaatcaagttcttgtctttaggatgaccgtttcttaacaatcaaatctggtattgaactgcaggtgactttggcagagaaatgttttcacttttggtctcctcttccagagtcacctttccccactcctatttttgtagatgctattctttctgatgtcttcttactaggggtcattttagctcaaaccctgtaagttacagtcacaattttctgtgccaaagcagctacaataatagagaggaagccttcttagaactctgcttactaatgtattaataccactgagaccttcaggccttgcctgggatatcacttcatcctgaagtttgcattaataatccttccaggccgggcacagtggctcacgcctgtaatcccagcactttgggaggccgaggcgggcggatcacgaggtcaggagatcgagaccgccctggctaacatggtgaaacatggtgaaaccccgtctctactaaaaatacaaaaaattagctgggtgtggtggcgggtcccagctactcgggaggctgaggcaggagaatggcatgaaccagggaggcggagctggcagtgaactgagaccgcaccactgcactccagcctgggtgacagagcaagactccatctcaaaaataataataataaataataataataataataataataataataatccttccagctgggcgcagtggctcacgcctgtaatcccaacattttgggaggccgagatgggcggatcacctgaggtcaggagttcaagaccagcctggccaacatggtgaaaccccatctctactaaaatacaaaaattagccgggcgtggtggcatgtgcctgtagtcccagctactcgggaggctgaggcaggagaattgcttgaacccgggaggcggaggttgcagtgagccgagatcatgccactgcactccaccctgggtgacagagcgagactccgtctacacacacacacacacacacacacacatccttcctcctctaaccccaaactaagatcacagaaggtgatccagtcagagaacagagggaaatcttaccaggaagggcttaagtacacttttttttaaaacagctttattgtttttaaagcctacaatttgataagccttgacatatgtatacctgtgaaagcatcaccacaatcaagacactggacatatctatcactcccccatctcagatatcccccctaatcctggataccatttgttgaaagatgttattactctagctgaacttacaagagactttagaccagggatctaaattacagtggccttagtgaccttgtccttatcttcttaggacagctgagaagccactgggacttagagcctttaaaaggagattaactgtcccaaaaggatctttgctactgaccagcagacacttcttccttcagtagcctttcatactgtgttgagtaacaccctagggtgtccattaaagttttgagttttacctagagcccagagccatgaatcaggattctgtctacatgattcgtgttttcattggtgtcaaaatacaaaagccaaagttctggctatgaattgttaacttggaagaaatactaactgccaccacttattaagtgcctactgtgtgccaggctctgaactaggtgcttcatatacattatcctaaattatctcaacatatgaggtaggtgttttaatttttattttatagaacttggtgtgtttgactgttaagctatggggctagagagagggtttgatcccaggtccctctgtgcttttgctgctgagccacacaacctctcatttcaaaaacactttcaaaatgctaacatattctaattcactctaggccaccaaaaactttaatactaatatctgatttgtaaatgacttaatgtatccttgaccctatcagctgaatttaatgaaatattcctctctgctgtgaaattttaccagtatagtatttggtctagtgacaggtgttctatttttttgagacgggtctcactctgtcacccaggctggagtgcagtggctcaatgcaacctctgccccccaagttcaagtgattctcctgcctcagcctcttgagtagctgggattacaggcacatgcaccacgcccggctgatttttttttgtatttttagtagacagggtttcaccatgttggccaggctggtcttgaactcctgacctcaggtgatccgcccgcctctgcctcccaaagtgctgggattacaggtgtaagccatcacacctggccctagtgacaggtttttatgggtacttttagatgatctaagaaatcatgtgcatatatctttcagatttctattttgggaaaatgaaggtttctacaacatattgtttcagtgttcaaataaactgaaggactcaacattacatttgaactatatccttcctagtgggttagtgtgaaaaagagtttggctgattcctaaaactctgccagccctgcagtaatctccagggcctggttattgttcagacattccatggtgattcctgggaaggaagcttggctgctcagtttctgagtctggggtgagataatgttctgggaagggacatctgttctttggtgtaatctctcatggtgaaatctgctctgtacatcagacaattgcattgctaccaagtttcataccaaatatttgaaaggatggtattgaatctaaaaccaaatattagtttttattaaactcatgggaaggctaatatattccaacgtaaattattacatatggttaagtaattgcatgttaatttattttaatgtaaatatttttgttactgttctgagccaaattctaaagaaaaaataaatacatttccttgttgaaaaaaaaaaaaaaaaaa

SEQ ID NO: 626 - DNA, 531 bp, HOMO SAPIENS
atgggtggatatttaaagaccaggccttggacgctgcagcacttctatctctgcttgatgcctgctgccacgtggctggtcctcctcctcctgctgtggctgagccttggggtgaagacagctgctcccaaccccagaacctttgctgtcttgggacggatcaccgctgcaagaggggaagttgctactgtgatgaattctgccatgtggcaccagactgccacccagaccacagtgtcctctgcaaccctggtaactcacatacaggcccgattccacctacagcaaagctggatgcgatggctggcagaggcaaaccctttgcctgcacttcaggccaaagccgggatgtggcctagatggttcctaaggtccctgacaatcctgagatcttgcatcttgtctatttcaggtcaaaggtgcctacatgctccttctagctttgtttccctgatgttccttgccacctgctactcctctctgagctacttttccaggttccacagggagaggttcagctgtccgtggtag

SEQ ID NO: 627 - DNA, 2609 bp, HOMO SAPIENS
cctgcggcgggctttagggagtggtccctggctgtggatagatctgctgatgagtccaggccccggtccattctcctcgcgctgcaaggatgctcctgggatttcggagaggccgcaggagtcatttcaaacacatcatccatggccttttacctgcagccagcgttgctccgaaggcagctgtgccacgcacacctcctccccgcagccccaacccatctccagagagaccaagatctgctctggcagcagccattctggcgacaacattgactgggcggacggttgctattcctcagcctcgccagaggtcccggtctgagagtgatgtgagcagtgttgaacaggacagcttcatcgagccctatgccaccacctcacagctgaggcctcggccaaattggcagagtgagatgggaagaagatcttctttgccatcctttgaaacactggactatggggacgaagaggacattgaaactcagctgtcatccagcggcaaggaattgggggatgtcagtgcccgggaggacagaggaggccacagtgatgacctgtacgctgtgccacacagaaatcaggtgccattgttacatgaggtgaacagtgaagacgatgaaaatatttctcatcaagatgggtttccaggctcccctcctgcaccacagcggacacaacaaaaagatggtaaacaccctgttctgaatttaaaggatgaaaaacctccattatgtgagaaacctccaccctccccagatataactggtagagcacgtcaaagatatacagaaataaccagagaaaagtttgaggcattaaaagaagaaaatatggacctaaacaatatgaatcaaagccttacccttgaactaaacacaatgaaacaagcaatgaaagaactacagttaaaacttaagggaatggaaaaagagaagagaaagctcaaagaggctgagaaggcgtcgtcacaggaagttgctgcacctgaattactttatctgcgaaaacaagctcaagaactggtggatgaaaatgatggattgaaaatgactgtccatcgtttgaatgtagaactcagtcgatatcagacaaaattcaggcatttgtccaaggaagagagcttaaatattgaaggcctcccatccaagggccctataccaccctggttgttggatataaagtacctgtcaccattgttgctggcttatgaagatatgatgaaagagaaggacgagctcaatgccaccctcaaggaggaaatgagaatgtttaggatgcgagtccaagaagtggtgaaagaaaatgaagaattgcaccaagagttaaataagagtagtgctgttaccagtgaggaatggcgtcagcttcagactcaagcaaaactggttttagaggaaaacaagttgttgctggagcagttggagattcagcaaaggaaagccaaggacagccaccaggagcgcctccaagaagtttctaagctgactaaacaactaatgctcctggaggcaaaaacccacggccaggaaaaggagctggcggagaacagggaacagctggagattttacgtgccaaatgccaagaactcaaaacacactcggatggcaaaatcgcagtggaagttcataaatcaattgtgaatgaattaaaaagccaattacagaaggaagaagagaaagaaagggctgagatggaggagttgatggagaagctgacagtcctgcaagcgcagaagaagagcctgctgttagagaagaacagtttgacagagcaaaacaaagcactggaagccgaacttgaacgagcacagaaaatcaataggaaatctcaaaagaaaattgaggtcctcaaaaagcaggtggaaaaagccatggggaacgaaatgtctgctcatcagtacctggcaaaccttgttggcctggcagaaaatataacccaggaacgtgacagtcttatgtgtttggcaaaatgtttagaaagtgagaaggatggagtgcttaataaagtcataaaaagcaacattcgcctgggaaagttagaggaaaaagtcaagggctacaagaagcaggcagcactgaagctgggggacatcagtcaccgtctgctggagcagcaggaggacttcgccggcaagacagcccagtaccggcaggagatgcggcacctgcaccaggtgctgaaggacaagcaggaggtgctggaccaggcgctgcagcagaacagagaaatggaaggtgaacttgaagttatttgggaatctaccttcagggaaaaccgaagaatccgagaacttctccaggacacactcacgaggacaggcgtgcaggacaaccccagagctctggttgcccccagcctcaatggcgtctctcaggcagacctgctggacggctgcgatgtctgctcctatgacctgaagtctcatgcccccacctgctagaatctgcgggagcccgtggtgtagcctcctctggcctgaaaggtctgcctcacacaggccttccctgcagggcagcccatggtggcagccggaggtgcgtaagcccactgaacgctgcagggcagggaagaaataaatggtctcatagtttaatccattgataaaaaa

SEQ ID NO: 628 - DNA, 9703 bp, HOMO SAPIENS
caggttaaagctaccgggacgggtcccggcatctctaaatcaccgctccctggcctcttcggcctccgtccgccgcggcccaggggccgggcttctcagctgctgacctactgccaccgactgcgctctctcccgtgggtcggctttttgctcgccatgcctccgccgcagggtgacgtgaccgccttgttcctggggcctccgggcttggggaagtccgcgctgatcgcagcgctgtgcgacaaggatgtggagacgctcgaggcccccgagggacggccggactccggggttcccagcctaagagctgcgggcccaggcctttttctgggcgagctgagctgcccacccgcagcgccggggccctgggcggcggaagccaacgtgctggtactggtgctgcccggacccgaggggaacggggaaccgttggctccagccctgggagaggcagcgctggccgccctggcccgagggaccccgctactggctgtgcggaacctccgtcctggggattcacagactgccgcccaggcccgtgatcagacagcagctctgctgaacagcgcggggttaggagctgcggatctgtttgtgctaccggcgaactgcggcagcagcgacggctgcgaggagctagagcgcctccgggcggcgctgcagagccaggcagaagcgctgcggaggctcctgccaccggcgcaggatggcttcgaggtgttgggtgcagcagagctagaggctgtgcgtgaggcctttgagaccggcggccttgaggctgcgctgtcgtgggtgcgctcaggcctggagcgcctgggcagcgcacggctagacctggccgtggctggcaaggctgacgtgggccttgtggtggacatgctgcttggattggatcctggcgacccaggcgctgcgcctgcttcggtccccacagcacccactcccttcccagccccagagcgcccgaatgtggtgctctggaccgtgcctctgggccacacgggcactgccaccaccgcggccgccgcctctcacccaacgcactacgacgccctcatcctcgtcacccctggggcccccactgagaaggactgggcccaggtccaggccttgctgctaccagatgcgcctcttgtctgcgtgcgcacagacggcgagggcgaggatccggagtgtctgggagaaggcaagatggagaatcccaagggcgagagcttaaagaacgcaggtggagggggattggagaatgcactcagtaagggaagggagaaatgtagcgctggatcgcagaaagcaggcagcggggaaggtcctgggaaagctggcagcgagggtttgcagcaggttgtcggcatgaagaaatcaggtggtggcgactcagagcgggccgctgcgttaagcccggaggacgagacgtgggaggtgctggaggaggcgccgccgccagtgttccccctacggcctggcggactcccagggctatgcgaatggctgcggcgagcgctccccccagcccaggcaggggcactgctgctggcgttgccaccagcatctcccagcgctgcccgaaccaaggctgcggcgttgcgagccggggcgtggaggccagctctgctggctagtctggcggcggcggcggcaccactcccagggctgggctgggcatgcgacgtggcacttctgcggggtcagctggcggagtggcgacggggcctggggctggaacccacggcactggctcgacgtgagcgtgccctgggcctggcttctggagagctggcagcgcgcgctcatttcccaggcccggtgacgcgcgccgaggtggaagcaagactgggcgcctgggcgggcgagggcactgctgggggcgcagcactgggggctctctccttcctgtggcctgcgggtggtgcagcggcgacaggtggcctgggctaccgagcggctcacggcgtcctgctgcaggctctcgatgagatgcgggctgatgctgaggctgtgctggcaccccctgagcctgcccagtgaggagtgggagggggcttgggagtccagactctgacaggggatgcctgggcttaatcctgggtgcttgaaggggatgtggactcttgacttccagctgggatgtgtgacttcttatcacctggattcagagagtctgggggacaggaatcctgatttttttttttttttttcttttttttgtgagacgaagtctcttgttgcccaggctggagtgcaatggcgcgacctcggctcactgcaacctccgcctcccgggttcaagcgattctcctgcctcagcgtccggagtagctgggattacaggtgcctgccaccacacctggctaatttttgtatttttagtagagacggggtttcaccatgttggccaggctggcctcgaactcctgacctcaggcgatcgacccgctccggcctcccaaagtgctaggattacaggcgtgagccaccgcccctggccaggaatcctgatacctttgggaaccatggtgaatgacatctagacccttctgtcctgaagggagttggtggcccagactctagcagggactatgtctttgtctcctagggagtagaaactggagttactggatgtttagtcctccagggaggctggtagaagtcctgtttcctaattggtggggaggtgtccatgactgggacctgaactccagtataggggagggagacctgagcgccccagggagctggaactcttgggcttcagagcctcagagggaaacagggtctacatttctctgggagaaaaagcctgcacacaggtccccaaggagcagtgggctttgaatcttgatggggtggcggaggcccctggggtctgagacttccggggttctaagatggctgtggaccttggttcctaaatattgggtaaggggaggtctgcatctggaggagggatcgggggcttgtgcgagaaagctggagacttcttgatctctcctggggagtggatgggtttctataattgccctccaaaagcatgtagggagggtggtcccacaaaaatgaggtgaggtgggtaagaggtctgggcatggtgggctctgggagtagccagggaccaggaatgaggtcttttgggtgtggaagggcagtaaagcatacctcagagacagctcctccaaaccttgtattgggatcccggcaactgcctctgtgagtgtgactgggaagggatatgactgccttcatcttctaggtgctgagcaattcaggtgatctctggggagtctgtttctctgtctcttttctttaggagtttctatctttttttggcctttttctcctggtatttaaccataaccctttatggccttggtgttttgtgcaccttccttttcagaagagcagctgtactgctgcactggtccaaacacttctgtatggacacctcgggtatccccaagaggctctgctttctgatgtacatagagggtgctgcattgagccaggggcccaccaaatgggtggtcaggcacttgagaccatgggaatatgccaggagtgaatgaagcaaaggcagaaaccacagtgcctggaatgttctaggctgctagccacatgtgggggaaaagttgcaggttacagaattcttcagtgtcaaaaacagaaaaggaggatctgagaatccaagcgatagaatcccttttgtcgtagacagaaagagcaaagtccagagagggcaggcttgaggcccaacagcacacagtaaggccctgtgggtctggcccttgcctattctcattcactgccccttcccactcctgtccagcctgatagactttccttctttttttttttgaaatggagtctcaccttgtcacccagtctggagtacagggatgtgatgactgtagctgagatgacaggcatgtgccaccacacctggctaatttttgtagtttagtagagaagggatttcaccctgttggtcaggctggtctcgaactcctgacctcaggtgatccacccgactcagactcccaaagtgctgggattacaggtgtgagccatcatggccgcctgactctttctgatgcctgagtggctaccttgagtcctgcctggggacccatgcacctgctgttctctttccttcaaggctctactcacaacttcctgttctactctcaaaccttcctgtgacgggctcagtcagatctcagctcacgtatcccctcagagaggacttcccctccctgaccaccctatctgaagtagctcacattcccccactattcatttcggccagttgagtttccttgtagcaattattactgtcaaaaatgatcttatttatttacctgtttattggcttttgacccgttgcctgtcctgttctctgttgtttccccagcatctagaacaataggtgcctgacacaataggtgcttcgtaaatatttattattattattattattttagagacagggtcttgctctgttgccccggctggaatacagtgggatgatcatggctcactgccatctccaactcctgggctcaaacgatcctcccacctccgcctacagagtagctgggactataggtacacagcaccaaattttctgtagagacgggggtcttgctttgtagcccacactagtgttgaactcctggcctcaagtgatcctcctgccttgatgggattacaggtgtgagccaccacacccagcctaaatgtttatttcattggtcagtgtcagaactaggattggaatttagattgttaatctcttgccacaagataggaaaatggagcaagatgaggagaaaaaagcatttaatgggagagaacacccttgtctgaggtcagggacctgggaagcaagcacgactttgccactgtcactgtgtgttacttggacagtgccttattttcccatctgtgaaataaaagagctggataagaaccttagttttgagatcctgtctcccttaaaagctgaagacaaaggtaactgatccaagggcagacaagggatggtaccatcatctccagcttggactcccactgctgacaaaatttgtcccttcaaagttgagatagctaccatggggaagagcacttagttctatactgaatggctccaggcattttcatgaaagctctttcagctttggggaagaatattcatccatatctttaccccatcatattagtgtctaagccctgcaatcaggcatgtcagccacgtgatggaatgggagggctgcagggcagcactgtccagtagaaacgaaatgcaagccacatatgtcattttaagttttctttttttgagatggagtttcactccatcacccaggctggagtgcagtggcacgatctcgcctcactgcaacctccgcctcccaggttcatgtgattctcctgcctcagcctcctgagtagctgggattacaggcatatgccaccatgcctggctaatttttgtatttttagtagagatggggtttcaccatgttgatcaggctggtctggaactactgacctcaggccacccgccttggcctcccaaagtgctgggattacaggcatgagccaccgcgcccagctaatttttgtatttttattttatttatttatttattttttgggagacggagtcttgctctgtcacccaggctggagtgcagttgtgcgatcttggctcactgcaacctcagcctcccaagtagctgggattacaggcatgcaccatcatgcccagctaatttttgtatttttagtagagatggggtttcactgtgttggccaggctggtcttgaactcctgacctcaggtgatccaccggcctcagcctcccaaagtgctgggattataggcgtgagccactgcacccgtcctaatttttgtatttttagtagagatggggtttcaccatgttggctaagctggtctggaactcatggcctcaagttatctgcccacctcagcctcccaaagtgctgagtaagccaagttttctaatagccacattagacaagtaaaaggaaacaggttaaattcattttaacatgttttacttaacccaatgtatccaaaatagcatttcaacatgtcatcggttttttagttttttttttttttgagatagtgcttcgctttgttgcccaggctggagtgcagtggcacaatctcggctcactgcaacctccaccttccaggttcaagtgattctcctgcctcagcctcccgagtagctgggattacaggcacccgccaccatgcccactaatttttgtatttttggttagagatggggtttcgccatgttggccaggctagtctcaaactcctgacctcaggtgatccacccacctcggcctcccaaagtgctaggattacaggcgtgaggcaccgtgcctggcgtcatcggtattatttaaatgaattatgttacgttcttttgtgctgtcttcaaaatctgttatatattttacacttacaccaaatctcaattaccatggtacatttttatctgaaatgcttgacctttattttgatttcataaaattcatagttggagaagtagattcacatatccaagttgttccaattatataatagttttccaaaaactgagatgggtgtccattttttttttaagtaaagatgcaggtctggttatgttgaccaagttgctgggttgttttgttttgttttgagacagagtctcactttgtcacccaggctggagtgcagtggcatgacctcagctcactgcaacctctgcctcccaggttcaactgattctcttgcatcatcctcctgagtagctgggactacaggtgtatgccaccatgcctggctaattttggtatttttctcagagacggggtttcaccatgttgggcatgctggtcttgaactgctgacctcaggtgatccgcccacctcggcctcccaaagtgctggtattacaggcatgggccaccacacctggcctcagctgttcaattaaaagtaaatacaacttaaaattctatgtttcattggcagtagtgcaacattaatactgagtagccacatgtgattagtggctatggtattggacagggaaggtacagaatacttccatcaacatagaaaattctatcagtctagctctaggggcagatagtccttccactgacttgggcaagtcactctacaaatggcatctacctcacatggttatggtgagaattcagcgtatgtatgtacatgcaggcacacaatatgcacacagacacataacatagtacaccctttcctgaaaagcctgacacatggagctcaaacatgagtgccacccacccctgggcagcaccaagatggctctagtctgggtgcctttgtctcacccccatgcctttgctcggagtgtgctcctcatttttctgccactttgaccctgtctctgatttggtcctgtctgacatcactgctatatgctttgctcctctcaatttcctctgccctcatgccagcaggagtcatgccagagatcatatctgagaaagcaagacaattttgtgtgtgtgtctgtgcccatagaggagtgctggttgtgttgatatagttgtagattggttgtgtttacacagttgtatatattgacacccttgagtgttatgacttcttttgggggtggtcgccttttaaatcataacttttaatgggattccattttagtctttgtgaagacataaggttgttggcaggcatctgtccctgggagcatccaagcagaaaagactaagactcccttgtagacagatcactggccgccactgaagtgtgtctgcatggcaccacagggctggaagacccttgaaggcaggaattcaaggaaatgtatgatgaattttggcattgccatcaaaagcagaacaggcatggaaaacttgggtgagtgggcgagacaacctcctcaccacagcagagttccatccatgcctggataatgatggagggatttgtgtccactgcagtggggaaccatgaaggacacatcaagggtgtggttggcctgtggtgctctttggaggaatgaataaaaatgaatagaaatcctattgcgtgtctgttcttttggagtttgagggaaaagaaagatccttgagattttgactgggctggaaacctagactccagcgtctggggataggagggatggtggggaatccgctgggaaaaactgggctgtgatcaagagaatttatcagtatctgagtttttccaccctggaaggagtgcgggcagacttactgtttaaacattgggagcttatgatggtaaagcgccttagttctggagccaggtatacccattaatgaccccaactgggccagcctttctgtagccatgcccttggattgttgctctccttctaggtttgactatgtggtttgcttcagccactagaacaatagcaaacatgatacaagcagaggcttggaaagtgcttatgcggccgggtgtggtggctcacacctataatcccagcactttgggaggccagggcgggcagatcacaaggtcaggagatcgagaccatcctggctaacacagtgaaaccccgtctctctactaaaaatacaaaaaattagctgggtgtggtggtgcacacctgtagtcccagctactcgggaggctgaggcaggagaatagcttgaacctgggaggcggaggttgtagtgagctgagactgcgccgctgcactccagcctgggcaacagagcgagacttctctcaaaaaaaaaaaaccaaagtgcttatgcactgggacttcctctcttgctccccttgggacccctaccaccactgccacatccaaaccccgggctggctgagcatggtggcatatgggtataaacccataatcccagcacttagggaggcaaaggtggaagaatttcatgagcccaggagatcgagactagcctgagcaacatggcaagacccccatctctacaaaaaagcaacaacaacagaattagccagatgtggtggtgtgcacctgtggtcccaactacatgggggaggctgaggcaagtggattgtttgagcccaggaagtcgaggctgaagtgagctatgatggctccactgcactccagcctgggtgacagagcaagacaatgtctaaaaaaataaaaagaaggaaagaaaaggaaaagatctgggctaacctgctgggtaataaagggaaaagagacacatggctccgtcatccttgatccctgccacccatagccaaccaacctctgaaacagagctccctagctgataggcagctgaacccagctgagaccagcaaaagaactgcccagctgatcccagaccaagttgcaacccagagaatcattaactaaataggtgattgttctaaaccactaaattttggagtggtttgttatgtagcaaaagcaactaatacagacttgttctctctgtgtgtgatgtggtctctttctccccaacaacatgacccaatgattaaaatcttaaattctgccactttttagctgtgtgactgccaatgtgacagccttctgagcctctgatgtctcctgaaaacagagatgtgaataatagtgcctatgacatagagttgtgaaaataaaatgaaaaacagcttcttaaaaaaaaaaaaaaaaaa

SEQ ID NO: 629 - DNA, 3403 bp, HOMO SAPIENS
gattccagaagatactgtctggcgtgaaattagtctcagtagaaacataagtcccgcgcgtcttgtgctgcgcgtgcgcaagcttttgggccctcccgagaaagggaagtgcattctcgcttccgtagcggtctccgccggttggggggaagtaattccggttgttgcaccatggcgtccatggggaccctcgccttcgatgaatatgggcgccctttcctcatcatcaaggatcaggaccgcaagtcccgtcttatgggacttgaggccctcaagtctcatataatggcagcaaaggctgtagcaaatacaatgagaacatcacttggaccaaatgggcttgataagatgatggtggataaggatggagatgtgactgtaactaatgatggggccaccatcttaagcatgatggatgttgatcatcagattgccaagctgatggtggaactgtccaagtctcaggatgatgaaattggagatggaaccacaggagtggttgtcctggctggtgccttgttagaagaagcggagcaattgctagaccgaggcattcacccaatcagaatagccgatggctatgagcaggctgctcgtgttgctattgaacacctggacaagatcagcgatagcgtccttgttgacataaaggacaccgaacccctgattcagacagcaaaaaccacgctgggctccaaagtggtcaacagttgtcaccgacagatggctgagattgctgtgaatgccgtcctcactgtagcagatatggagcggagagacgttgactttgagcttatcaaagtagaaggcaaagtgggcggcaggctggaggacactaaactgattaagggcgtgattgtggacaaggatttcagtcacccacagatgccaaaaaaagtggaagatgcgaagattgcaattctcacatgtccatttgaaccacccaaaccaaaaacaaagcataagctggatgtgacctctgtcgaagattataaagcccttcagaaatacgaaaaggagaaatttgaagagatgattcaacaaattaaagagactggtgctaacctagcaatttgtcagtggggctttgatgatgaagcaaatcacttacttcttcagaacaacttgcctgcggttcgctgggtaggaggacctgaaattgagctgattgccatcgcaacaggagggcggatcgtccccaggttctcagagctcacagccgagaagctgggctttgctggtcttgtacaggagatctcatttgggacaactaaggataaaatgctggtcatcgagcagtgtaagaactccagagctgtaaccatttttattagaggaggaaataagatgatcattgaggaggcgaaacgatcccttcacgatgctttgtgtgtcatccggaacctcatccgcgataatcgtgtggtgtatggaggaggggctgctgagatatcctgtgccctggcagttagccaagaggcggataagtgccccaccttagaacagtatgccatgagagcgtttgccgacgcactggaggtcatccccatggccctctctgaaaacagtggcatgaatcccatccagactatgaccgaagtccgagccagacaggtgaaggagatgaaccctgctcttggcatcgactgtttgcacaaggggacaaatgatatgaagcaacagcatgtcatagaaaccttgattggcaaaaagcaacagatatctcttgcaacacaaatggttagaatgattttgaagattgatgacattcgtaagcctggagaatctgaagaatgaagacattgagaaaactatgtagcaagatccacttctgtgattaagtaaatggatgtctcgtgatgcatctacagttatttattgttacatccttttccagacactgtagatgctataataaaaatagctgtttggtaaccatagtttcacttgttcaaagctgtgtaatcgtgggggtaccatctcaactgcttttgtattcattgtattaaaagaatctgtttaaacaacctttatcttctcttcgggtttaagaaacgtttattgtaacagtaattaaatgctgccttaattgaaggggtttgggtggatttttttttctcaaaataagctgtagggactattttaacagcttaaacaggagctctcaagatgcactttcatattgagaggaatatgggcttgatcctcttcctatctaaatgggtgggccatttgattgtagagggtccaccacagaattatgggatgccttaagtgctgttactaggttgctcacagcctaacctggcgtgttgtttagggctgatggagacccatgtgagcctttgctttcctctggccccggccccaccctgaacacagctcatacacagaatcaggaccagcatgtgcagagctggccaccagcacaggcttagggcagttcagaacccacttgtttccctatcagagggacacagtgaagtggaggttaaagtaaattacaggaaataagggagaaatcttgcagttaccatgttcagatagagtgactgaaattaattgtacttactaaagtattaactagctaacagtgatgggccaagacgctccgagaactctaccgggattgtctgttctgacaacccagtgaggcagatacactttcttactgctcacatcttacaggtgagtactcataattggccagcatctcaccaccagcaagtagtagggccaggtcaatcccaggcagtctgaccccagagtggcccagctcatcccctactctgttatttgcttgttaatgattctctagattttctaaaataatgtttcttagcattgtgatgataaagctcatgatgaactttatcactagttatgccaccttaactagtcagatttcctagaattaggaaatggtgactcttgtctaaatttggttaagtgatgaatttgggttaccgtctcatgtgaacctggagattcaccagtcttaacttttgggtcattgtgttttctctacattcatgcattggatgttttgctaaataactcctgtggatttaggaatgtgtgctaatagcaatcttcctaattttcatgtttatatggaactatgcagttgagtattgaaagctttaaactgagtttatttacaaggactgagtctagcctacagagaacatacagcagccttctttggaccacagtcttatccgaggggtctgtggttgtatcagaagagccactaaaccaatccccctttccaaaattgaacctcacagacgttcctgttttttgtgattgagaaactggtcaatgaacaggaagacttagagatgtttcacaagcctttgatttttgtttcatttatttgtaataaacctcttccacgtga

SEQ ID NO: 630 - DNA, 2136 bp, HOMO SAPIENS; identical to SEQ ID NO: 504

SEQ ID NO: 631 - DNA, 9725 bp, HOMO SAPIENS
cgcgcgggctacctcagttctcgggcgtacggcgcggcctgtcctactgccgccggcgccgcggccgtcatggggttcctgaaactgattgagattgagaactttaagtcgtacaagggtcgacagattatcggaccatttcagaggttcaccgccatcattggacccaatggctctggtaagtcaaatctcatggatgccatcagctttgtgctaggtgaaaaaaccagcaacctgcgggtaaagaccctgcgggacctgatccatggagctcctgtgggcaagccagctgccaaccgggcctttgtcagcatggtctactctgaggagggtgctgaggaccgtacctttgcccgtgtcattgtaggaggttcttctgagtacaagatcaacaacaaagtggtccaactacatgagtacagtgaggaattagagaagttgggcattctcatcaaagctcgtaacttcctcgttttccagggtgctgtggaatctattgccatgaagaaccccaaagagaggacagctctatttgaagagattagtcgttctggggagctggcgcaggagtatgacaagcgaaagaaggaaatggtgaaggctgaagaggacacacagtttaattaccatcgcaagaaaaatattgcggctgaacgcaaggaagcaaagcaggagaaagaagaggctgaccggtaccagcgcctgaaggatgaggtagtacgggctcaggtacagctgcagctctttaagctttaccataatgaagtggaaattgagaagctcaacaaggaactggcctcaaagaacaaggagatcgagaaggacaagaagcgtatggacaaggtggaggatgaactgaaggagaagaagaaggagctgggcaaaatgatgcgggagcagcagcagattgagaaggagatcaaggagaaggactcagaattgaaccagaagcggcctcagtacatcaaagccaaggagaacacctcccacaaaatcaagaagctggaagcagccaagaagtctctgcagaatgctcagaagcactacaagaagcgtaaaggtgacatggatgagctggagaaggagatgctgtcagtggagaaggctcggcaggagtttgaagaacggatggaagaagagagtcagagtcagggcagagatttgacgttggaggagaatcaggtgaagaaataccaccggttgaaagaagaagccagcaagagagcagctaccctggcccaggagctggagaaattcaatcgagaccagaaagctgaccaggaccgtctggatctggaagaacggaagaaagtagagacagaggccaagatcaagcaaaagctgcgggaaattgaagagaatcagaagcggattgagaaactggaggaatacatcaccactagcaagcagtccctagaagagcagaagaagctagagggggagctgacagaggaggtggagatggccaagcggcgtattgatgaaatcaataaggagctgaaccaggtgatggagcagctaggggatgcccgcatcgaccgccaggagagcagccgccagcagcgaaaggcagagataatggaaagcatcaagcgcctttaccctggctctgtgtacggccgcctcattgacctatgccagcccacacaaaagaagtatcagattgctgtaaccaaggttttgggcaagaacatggatgccattattgtggactcggagaagacaggccgggactgtattcagtatatcaaggagcagcgtggggagcctgagaccttcttgcctcttgactacctggaggtgaagcctacagatgagaaactccgggagctgaagggggccaagctagtgattgatgtgattcgctatgagccacctcatatcaaaaaggccctgcagtatgcttgtggcaatgcccttgtctgtgacaacgtggaagatgcccgccgcattgcctttggaggccaccagcgccacaagacagtggcactggatggaaccctattccagaagtcaggagtgatctctggtggggccagtgacctgaaggccaaggcacggcgctgggatgagaaagcagtagacaagttgaaagagaagaaggagcgcttgacagaggagctgaaagagcagatgaaggcaaaacggaaagaggcagagctgcgtcaggtgcagtctcaggcccatggactgcagatgcggctcaagtactcccagagtgacctagaacagaccaagacacgacatctagccctgaatctgcaggaaaaatccaagctggagagtgagctagccaactttgggcctcgcattaatgatatcaagaggatcattcagagccgagagagggaaatgaaagacttgaaggagaagatgaaccaggtagaggatgaggtgtttgaagagttttgtcgggagattggtgtgcgcaacatccgggagtttgaggaagaaaaggtgaaacggcagaatgaaatcgccaagaagcgtttggagtttgagaatcagaagactcgcttgggcattcagttggattttgaaaagaaccaactgaaggaggaccaagataaagtacacatgtgggagcagacagtgaaaaaagatgaaaatgagatagaaaagctcaaaaaggaggaacaaagacacatgaagatcatagatgagaccatggctcagctacaagacctgaagaatcagcatctggccaagaagtcggaagtgaatgacaagaatcatgagatggaggagattcgtaagaaactcgggggcgccaacaaggaaatgacccatttacagaaggaggtgacagccattgagaccaagcttgaacagaagcgcagtgaccgtcacaacttgctacaggcctgtaagatgcaggacattaagttgccactgtcaaaaggcaccatggatgatattagtcaggaagagggtagctcccagggggaggactcagtgagtggttcacagagaatttccagtatctatgcacgagaggccctcattgagattgactacggtgatctgtgtgaggatctgaaggatgcccaggctgaggaagagatcaagcaagagatgaacacactgcagcagaagctgaatgagcagcagagtgtgcttcagcgtattgccgcccccaacatgaaggccatggaaaagctggaaagtgtccgagacaagttccaggagacctcagatgagtttgaagcagcccgaaagcgagcaaagaaggccaagcaggcattcgaacagatcaagaaggagcgctttgaccgcttcaatgcttgttttgaatctgtggctaccaacattgatgagatctataaggccctgtcccgcaatagcagtgcccaggcattcctgggccctgagaaccctgaagagccctacttggatggcatcaactacaactgtgtggctcctgggaaacgcttccggcctatggacaacttgtcaggcggggagaagacagtggcagctctggccctgctctttgccatccacagctacaagccagcccccttcttcgtcctggatgagattgatgctgccttggataacaccaacattggcaaggtggcaaattacatcaaggagcagtcgacttgcaacttccaggccatcgtcatctctctcaaggaggagttctacaccaaggccgagagcctcattggagtctatcctgagcaaggggactgtgtgatcagcaaagtcctgaccttcgacctcaccaagtacccagatgccaaccccaaccccaatgagcagtagcagtatttttgccctcccgccctgtctggatccctaagctgtccctctcccaatctctggatatttgactcccaaccttccccctacctcctggccctttttggtgtagtcatgggatttaggcactgctaatcaagcatgaagaggaacagaggtgatgttaggtctggagcaaaaattcctgaacgacagggagtattctggcctctgaaaggaggtgctgagctgaacagggccatctgttcatcacacacacccccttcctccccctcatcacccataatcgtgggccccttgggcctcttgcccactgtgtgtgtgggtatgtatgtgtgtatgtatgtatccgcatgtgtgcatgtgagtatgtttgcaaaataataaaggatattggagacctgttttagaaggagcctaggctgaatttgattccaagagagcttaggatgacagcacccctgagctgggcaaaggtactcaggacctcataggagtcttaggcagttacctgaaactgccttcattcactcatttgtgtattcattcatttatgtattcatcagacacataccgaacaccctctatttgtcaggctctgtgcttggaatacagagttgaatcagacatgatctctaccctcctagtaaggagatacagtgggttcatgaatgactatagttagctgaatgtcatatgtactttgaatttgagaagtgggtgatcccctctaggcttcctggaggtcacatttaagctagaccttgacaaattggtaggatttggtcaggcactaggagtggagcatgagctctggggacagacagttatgggttctggtcccactttttatcacttactagttgtttgaccttgggcaagtcatttgaccttctgtgcctcagtttcctcatctgtaaaatggggctaacaatattacctacctcataggatttaatgatgtcaagctcctcactggaggccttatcccttcgtggagcccactaggtgccgacccctcagaatataaccctcatgcctggacccctgagagcttctgatcccagctattagggacagaagaagcctccaaatctggaaggtgctgaatgccctgctgactgggaaagtttcagggcactgatggggtctacctggtaagcggagggcctgaggaaacctgtagcttcaatcatgtctggtaaccgggtgcctgagccccaatctgggttgtgaggaaataggggagaggtatcctgggccacatcccagcctaacacctgtgaggttcattttaggaactaacctcattagctataaggatcatgcagaggcagcaaagccgggtgcgatgagctcagcctttactcattcacatacaccatcacactttaattccaatctgtatattgctttttaaaagttaagtccattctaattacccaaatatgcatgaattcattctccttttgagaagttagattgttaaagatagtctcattcagctaccaaccactccttgatccttcccttcttagtggctgttgtttgttgtacttccgtttagactttgttttaatgcttgtacgtacatatgtgaactcattggaaatattgtgtgtttaatgcaaatgatatattgaattgtttagcaatttgttttctttgcttaacgatgtttttgagatctgtgcatgttacttaatgtagctcaatccatcttctgtaattgctgtatagattgtcatcatatgattaccacattttacttacgcatttcttttgtgatggacattaagactgtttttaggttttgctattacaaaatactacacaggagcatcactatgcctgtgtgaaagtatatgtatgaaagtttacctagggttgattcctagaagtggaattgcaaagtcataggatatttatatattggtttttaataatacttccaaattgccctcctgtactatttactcagtatttttcttgaggttgatctgaggtctaacattgttatcctatatcattttcatcccaagtagtgatatctgtgaaatcacaggtttgatgtgtgctaattatgtattcttctaatacatattaaaagacataactatcaaaacaaaataaatttgtctgttttcaaccaaagaagtcacgtaccactggtggtactgtgtgccataatttggcaaatgctggcctttatggacgagcacaattcgggggtcagacctggttcaaattctagctgtagaaacttgtgcaagttacttcacctctgagcctaagtttccacatctgtaaaaggagataataaacacctaccttgcagtagtgaagcaaagagaaaattaaatatatatgaagcaatttggctggcatctagatcattcacagccctttaaaggtcacctttgctgttctccccactttacagataaggaaactgaggcccaaaaaggtttgaacccaggtcttccaagtcattcaagtgctttctccactgtacaggtggttatcaaccttggctgcgcatcagaatcgtttgtaaagctttttctttttcctttttaaaaagtaaagcaatatatacacaggtaaaaaaataaaatagtacagaagggcttataatgagaagcagcagttccctgcttgcacccccacatccaaaggatgtggagctctttaaaaataaattgctctggtcccacctctggaaatctgattcagccagcatggataataacccagataactaacccctacctcacaggataaaaaggattacatgagatgccttaggctaaggccctggcacacaggaacacatgtgctacaaaggagctttggggacttaagtcctgaggatccaggaggtgaggtgacttgtccaagattccactggtttagtggcagagcctagacttccactcggatctatttagtgcttgccccctgctctctcctgtcgtgccccaccacctcctggcatcacagggcaaccgttgtcaaggctatgctcacgggaggctgggcaccacagtgtttccaagagcaagctggatccgagtagattccctagggcttgttggaggaactagtttgactcccttatactgtggacgcagtagccttgctgtagggagttgaagagtactccacaacagtatcttaagtttaactgggcacttccctctggaaatcacagtgttgtgcaccaggaacacaaagatgagtcaaatctttatcctgcctttgaggagctcactgtttagttggggaaaccatttgtaaaacagccattaaccatacagtgtgatcaacactgacaggagcacaggaaaaacatctagcttatgtgaagattcagagaaggcatcctgtagtctaggtggtgatacctgaactgagtcttgagggacgggtaggaattagccagttgaggaagtagaaggaatttccagatattggaaacagtatgcatgaagacatgaaggcaagaaacagcaaaacaaatactgaagcatgaagattcctggggtggggggaaagcagcaagaaaaggtagagaggaaccagattggaagagggtcgtaaatgcatggctacagaattcagatttgttttgtaggacagtgtggttcccaaactggctgtataccacaaacaggtacggcattctgggccccggcccctaaaacattcattaagtctggggtgaagatttggaatcttgaatgcttataaaggttaccacatgactagggtacagccagatttggaaaccatagcttgaaggcagtgagggagccatgaaatggtttttaatagggggactccagatcagatgtgaacttaacctgtttctggctggctagccaaccagcatggaaaacagattaggttagatgttcatgctgtatgtgcccgtgcctgtagcttccctgttaatcagcttcttacactactatatttgcttattttgtctctgaataagctttaggcaccacaagggtgggcctggggatattttgcttaccagtatagcccctgcaaaaaagcacagtgcctgacacaaaacaggcacccagtaaagtttttgaatgaatgaatgcatgagtgaatccatttgtgagagagcgaatggagatgacaagattagctaggagactggaaaaagaccaggaggcctgcactagggcaaaggccagtaggaatagattggaggtgttaaggtgtgaactgttaaggtaagatgataacttaatgactgattattggatgtggagggtgactgagaggatagaatgagtacccatgaatagccatgattcctaccctgtcccagtcatctctttccttatccatctctgaaacaatctgcttacatcctcctcagcaactggaattcctcaagttagttagacattctgtgtgctgtgtggtctctcactgcccccccactccccacccctccacaagccattgattcattcatccagttcaataaatcttggctaagcacctccagtgtgcagtaaggctcttccaagccaggactctgactccctctttcctacctcaagagatgtttttgagggctttcccaggtaagagtcacatctcttatacaataacttatagtgagatacccagaatgtcagacttgtaagggaagactgcccaaaccccttctgaggtcctcagaggggaattaacttcctaaggtccgactgctaggaagtgttggagccagaaatggaacctaggtttcctttctatgtcatctctggagtcttgatcttgatctatcccattgtagatcaggacaggcagaggtggtcagggagaaggtgggacttaggttgaaccttgaaggtcaatgtattggacaggtcaaacaagatggttgccaattacactgcccccttctggaaacccttagcaaacctgccatgcttgcagtcccttctaaggggtttccttagcataagttgccatgctctgtaccatgtgacctcacaatcctggccacagatagctagatgtggatagtgtctggttcaagggcaaccaatctctaggctggccagtggcctgttagctggactggcataaggacttcaccttacaggggtggcatgtatcaaatggcaaatgtatgaaacaaccagatctttcagggaggcagaatgtgagctattcagaagaagtgaacgttaattagaatttaatgaggcattagtggtggtggatgaggggtggccagaaactaaacagcaaaagcaaagagaaagctgcagaaaccataagtaagcagaggtcatgagacatttgtataatgagatcacggagccacagggtggcagaagccatgaagcagcaaggcaacaatgggctagaagccatgaagcaataggagccacgaggaacagaaaccgtgagacaaaactgactatgagatccacaaagcagcagaaggcttgaatagataagatcatgagacagtagaagcgatgagactgcaagaaccacaaggtagccagaaccatgtggcaacatggcaacaggaatggaagaggcagcaggagctacaatgcagaaaagccatggattaataggaactgaagcgccgggagccatgaagctgcaggacccatgaggcagaaaaagccatgggctagcatcgaggggggcagaaagaagttagtcagtagcagtaggaggagtataaatacagccagaaaggagttgagtcaccaatttgggaagcactagagaagggagcaacagatgcctgcagctgagggggtgacaagataagccaggctctagagctgctttggatcatgaaccattttcaagtttctgttcttccatgaggctgcctgtgtagctgttcttgtcttccttatttccctgtgaatgctttaataaatccccatcactaa

SEQ ID NO: 632 - DNA, 263 bp, HOMO SAPIENS
  misc_feature (65)..(65): n is a, c, g, or t
  misc_feature (80)..(80): n is a, c, g, or t
ctgccaaaatattctctctctgtccacctgaccctccattcctgcttcctgtgacctgggaatgnagaattaccctctgnactccttgtgccctccctgctcaggatatcagcacagagggacgaaggcaattgcctaccctgcttgagagatgcagaggcctggtgtggagttagcagtattatgagattggatcagcctggatcactgaatcactgcatgtaggacacactatggagagtttcttgtgccaagatcagaca

SEQ ID NO: 633 - DNA, 411 bp, HOMO SAPIENS
  misc_feature (26)..(26): n is a, c, g, or t
  misc_feature (28)..(28): n is a, c, g, or t
  misc_feature (32)..(32): n is a, c, g, or t
  misc_feature (38)..(38): n is a, c, g, or t
  misc_feature (46)..(46): n is a, c, g, or t
  misc_feature (49)..(49): n is a, c, g, or t
  misc_feature (60)..(60): n is a, c, g, or t
  misc_feature (63)..(65): n is a, c, g, or t
  misc_feature (68)..(68): n is a, c, g, or t
  misc_feature (76)..(76): n is a, c, g, or t
  misc_feature (79)..(81): n is a, c, g, or t
  misc_feature (90)..(90): n is a, c, g, or t
  misc_feature (98)..(98): n is a, c, g, or t
  misc_feature (214)..(214): n is a, c, g, or t
gaatatttgaatctacctagtgagtntntagngcatgnttttgtcnggnatcctggaaangcnnnccncaaaaagntannntttgccccnttcaaaancatgcaccctgaagaagctgtttgtacaggattgggtttattctgttattaagacaaaggcatcatggcctttgggtgagaggcccgtgtgtgtttgggatttggcaatcagcatnccatctctgtcatcaccattattgagaaaatagatggattggttccctctctgcagtcctgtggagcagttggactgctctctctgctctcaggatgatactgtgagaacaatttaaatatgctaagcacatgtcaggaaacagttttgtggtctttggacactcgctgtagccattccgttccatttcaggtgatt

SEQ ID NO: 634 - DNA, 326 bp, HOMO SAPIENS
  misc_feature (117)..(117): n is a, c, g, or t
  misc_feature (156)..(156): n is a, c, g, or t
  misc_feature (240)..(241): n is a, c, g, or t
agggagaaagtcaggggagccctgacaagtctttctgtaccttcttcgtaagtctggcattacagattaatggaacattttgctagagggaatttgattctgcatatagggctaatnacaaggaaaggaagcatttgtaagcaatcctgtaaagancgttttagaaataaagtatatcaatagatctaatagcaggtatccagaagttataaaaatttatggccataatattttgagccnnttttttttttttaacaatcttgaatcctgttagttctgaacattaaattattgaggactttataaatcaaaactaggctggacac

SEQ ID NO: 635 - DNA, 8449 bp, HOMO SAPIENS
gcgacctccggcgccattttgtagagaaacaagcggagttaaccgaagagggggtcgaggagagccggagtcggggacccaggagtttcctgtgtccagcgctgccggagccgcctgaggtgccatgtttcagaacagagtaagacccctggtaaagaagaactgaagatattatacagataccagatatagcctaattacaaagaaagcattaacctgcctctgaggtgactaaaggggaataatggtgattttgcgccgggctcggccgcctgcttccgccccaaccagcaatgaatcttgactcgctctcgctggccttgtctcaaatcagctacctggtggacaatttaaccaagaaaaattaccgagccagccagcaggaaatacagcatattgtgaatcggcacggtcctgaggcagacaggcatttattacgctgcctattttcgcatgtggatttcagtggcgatggtaaaagcagtggcaaagatttccatcagactcagtttctgattcaggagtgtgcgttgctgattacaaagccaaattttatctcgacgctgtcctatgccattgataatccattgcactatcagaagagtttaaagcctgcaccccacttatttgcccagctgagtaaagtgctcaaattaagcaaagtacaagaggtaatttttggccttgccctgttgaattcttccagctcagatcttagaggtttcgctgcccagtttatcaaacagaagcttccagatcttctgcgttcttacattgacgcagacgtcagtggaaatcaagaaggtggcttccaagatatagcaatagaggtcctacacctcctcctctcccatctcctctttgggcagaagggagcctttggagttggacaagaacagatagacgcttttcttaagacgctgcgcagagattttccccaagaacgctgtcccgtggtgctcgcaccacttttataccctgaaaaacgggacattctaatggacaggatcctgcctgattccggaggggtagctaaaaccatgatggagagctctttggctgatttcatgcaagaagtaggctatggcttttgtgcaagtattgaagaatgtcgcaatataatcgtgcagtttggtgttcgggaggtcacagctgcccaggttgcaagggttttgggaatgatggctcgaactcattcaggattaacagatggcattccattacagagtatttctgctccgggcagtgggatctggagtgatgggaaagataaaagtgatggagcacaggcacacacatggaatgtagaagtcttgattgacgttcttaaagaactgaatccaagtttgaatttcaaggaagtaacttatgaactggaccatcctggatttcaaattcgtgacagtaaaggacttcataatgtggtttatggcattcagaggggtttgggtatggaagtgttcccagtagacctcatatatagaccttggaaacatgctgaaggccagctctccttcattcaacattcccttataaatccagagatcttctgttttgctgactatccctgtcatactgttgccactgatattctgaaagcaccaccagaggatgacaatcgagaaattgccacatggaagagcttggatttgattgaatctctgctgaggcttgcagaggttgggcagtatgagcaagtcaaacagctcttcagcttccctatcaaacactgtccagacatgctggtattggccttactacaaattaacacctcttggcataccttgcgccatgaacttatctccactctgatgccaattttccttggaaaccatcctaactcagctattattttgcactatgcatggcatgggcagggacagtctccctcaattcgccaacttatcatgcatgcaatggcagaatggtacatgagaggggagcagtatgatcaggccaaattgtctcgaatacttgatgtggcccaggacttgaaggccttgtcaatgctgctaaatggtactccatttgcctttgttattgaccttgctgcacttgcttcacgtcgtgaatacctcaaacttgataagtggctcacagataaaattcgagagcatggggagccttttatccaggcgtgtatgacttttttaaagagacggtgtccttctattttgggcggacttgccccagaaaaagaccagcccaaaagtgctcaacttcctccagaaactttggcgacaatgttggcctgtctgcaagcttgtgcagggagtgtttctcaggagctatcagaaactatcctcaccatggtagccaattgcagtaatgttatgaataaggccagacaaccaccacctggagttatgccaaaaggacgtcctcctagtgctagcagcttagatgccatttctcctgttcagattgaccctcttgctggaatgacatctcttagtataggtggttcagctgcccctcacacccagagtatgcagggttttcctccaaatttgggttctgcattcagtacccctcagtcaccagcaaaagcatttccacccctttcaacccccaatcagaccactgcattcagtggtattggaggactttcatcacagcttccagtaggtggtcttggcacaggcagcctgactggtataggaactggtgctcttggactccctgcagtgaataacgacccttttgtacagaggaaactgggcacctctggactgaatcagcctacattccagcagagtaagatgaaaccttcggacttgtctcaggtgtggccagaggcaaaccagcactttagtaaagagatagatgatgaagcaaacagctatttccagcgaatatataatcatccaccacatccaaccatgtctgttgatgaggtattagaaatgctgcagagatttaaagactctactataaagagggaacgagaagtatttaactgtatgctaaggaacttgtttgaagaatatcgtttttttccccagtatcctgataaagagttacatataacagcctgcctatttggtggtataattgagaaaggactggtcacttacatggcactaggtctggctctacgatatgttcttgaagccttacgcaagccttttggatccaaaatgtattatttcgggattgctgcactagatagatttaaaaacagattgaaggactatccccagtattgtcagcatttggcttctatcagtcactttatgcaatttccacatcatttacaggagtatattgagtatggacagcagtctagagatcctcctgtgaaaatgcaaggctctatcacaacccctggaagtattgcactggctcaggcccaggctcaggcccaggttccagcaaaagctcctcttgctggtcaagttagcactatggtaaccacctcaacaactaccactgttgctaaaacggttacggtcaccaggccaactggagtcagctttaagaaagatgtgccaccttctattaatactacaaatatagatacgttgcttgtggccacagatcaaactgagagaattgtggagcccccagaaaatatccaggagaaaattgcttttattttcaataatctctcacagtcaaatatgacacaaaaggttgaagagctaaaggaaacggtgaaagaagaatttatgccttgggtttcacagtatctggttatgaagagagtcagtattgagccaaactttcatagcctgtattcaaacttccttgacacgctgaagaatcctgaatttaacaagatggttctgaatgagacctacagaaacattaaagtgctcctgacctctgataaagctgcagccaatttctcagatcgttctttgctgaagaacttgggacattggctaggaatgatcacattagctaaaaacaaacccatcttacacactgacttggatgtgaaatcattgctgctagaggcttatgttaaaggacaacaagaattgctctatgtagtgccctttgttgccaaagtcttagaatctagcattcgtagtgtggtttttaggccaccaaacccttggacaatggcaattatgaatgtattagctgagctacatcaggagcatgacttaaagttaaacttgaagtttgaaatcgaggttctctgcaagaaccttgcattagacatcaatgagctaaaacctggaaacctcctaaaggataaagatcgcctgaagaatttagatgagcaactctctgctccaaagaaagatgtcaagcagccagaagaactccctcccatcacaaccacaacaacttctactacaccagctaccaacaccacttgtacagccacggttccaccacagccacagtacagctaccacgacatcaatgtctattcccttgcgggcttggcaccacacattactctgaatccaacaattcccttgtttcaggcccatccacagttgaagcagtgtgtgcgtcaggcaattgaacgggctgtccaggagctggtccatcctgtggtggatcgatcaattaagattgccatgactacttgtgagcaaatagtcaggaaggattttgccctggattcggaggaatctcgaatgcgaatagcagctcatcacatgatgcgtaacttgacagctggaatggctatgattacatgcagggaacctttgctcatgagcatatctaccaacttaaaaaacagttttgcctcagcccttcgtactgcttccccacaacaaagagaaatgatggatcaggcagctgctcaattagctcaggacaattgtgagttggcttgctgttttattcagaagactgcagtagaaaaagcaggccctgagatggacaagagattagcaactgaatttgagctgagaaaacatgctaggcaagaaggacgcagatactgtgatcctgttgttttaacatatcaagctgaacggatgccagagcaaatcaggctgaaagttggtggtgtggacccaaagcagttggctgtttacgaagagtttgcacgcaatgttcctggcttcttacctacaaatgacttaagtcagcccacgggatttttagcccagcccatgaagcaagcttgggcaacagatgatgtagctcagatttatgataagtgtattacagaactggagcaacatctacatgccatcccaccaactttggccatgaaccctcaagctcaggctcttcgaagtctcttggaggttgtagttttatctcgaaactctcgggatgccatagctgctcttggattgctccaaaaggctgtagagggcttactagatgccacaagtggtgctgatgctgaccttctgctgcgctacagggaatgccacctcttggtcctaaaagctctgcaggatggccgggcatatgggtctccatggtgcaacaaacagatcacaaggtgcctaattgaatgtcgagatgaatataaatataatgtggaggctgtggagctgctaattcgcaatcatttggttaatatgcagcagtatgatcttcacctagcgcagtcaatggagaatggcttaaactacatggctgtggcatttgctatgcagttagtaaaaatcctgctggtggatgaaaggagtgttgctcatgttactgaggcagatctgttccacaccattgaaaccctcatgaggattaatgctcattccagaggcaatgctccagaaggattgccccagctgatggaagtagtgcgatccaactatgaagcaatgattgatcgtgctcatggaggcccaaactttatgatgcattctgggatctctcaagcctcagagtatgatgaccctccaggcctgagggagaaggcagagtatcttctgagggaatgggtgaatctctaccattcagcagcagctggccgcgacagtaccaaagctttctctgcatttgttggacagatgcaccagcaaggaatactgaagaccgatgatctcataacaaggttctttcgtctgtgtactgaaatgtgtgttgaaatcagttaccgtgctcaggctgagcagcagcacaatcctgctgccaatcccaccatgatccgagccaagtgctatcacaacctggatgcctttgttcgactcattgcactgctcgtgaaacactcaggggaggccaccaacactgtcacaaagattaatctgctgaacaaggtccttggtatagtagtgggagttctccttcaggatcatgatgttcgtcagagtgaatttcagcaacttccctaccatcgaatttttatcatgcttctcttggaactcaatgcacctgagcatgtgttggaaaccattaatttccagacacttacagctttctgcaatacattccacatcttgaggcctaccaaagctcctggctttgtatatgcctggcttgaactgatttcccatcggatatttattgcaagaatgctggcacatacgccacagcagaaggggtggcctatgtatgcacagctactgattgatttattcaaatatttagcgcctttccttagaaatgtggaactcaccaaacctatgcaaatcctctacaagggcactttaagagtgctgctggttcttttgcatgatttcccagagttcctttgtgattaccattatgggttctgtgatgtgatcccacctaattgtatccagttaagaaatttgatcctgagtgcctttccaagaaacatgaggctccccgacccattcactcctaatctaaaggtggacatgttgagtgaaattaacattgctccccggattctcaccaatttcactggagtaatgccacctcagttcaaaaaggatttggattcctatcttaaaactcgatcaccagtcactttcctgtctgatctgcgcagcaacctacaggtatccaatgaacctgggaatcgctacaacctccagctcatcaatgcactggtgctctatgtcgggactcaggccattgcgcacatccacaacaagggcagcacaccttcaatgagcaccatcactcactcagcacacatggatatcttccagaatttggctgtggacttggacactgagggtcgctatctctttttgaatgcaattgcaaatcagctccggtacccaaatagccacactcactacttcagttgcaccatgctgtacctttttgcagaggccaatacggaagccatccaagaacagatcacaagagttctcttggaacggttgattgtaaataggccacatccttggggtcttcttattaccttcattgagctgattaaaaacccagcgtttaagttctggaaccatgaatttgtacactgtgccccagaaatcgaaaagttattccagtcggtcgcacagtgctgcatgggacagaagcaggcccagcaagtaatggaagggacaggtgccagttagacgaaactgcatctctgttgtacgtgtcagtctagaggtctcactgcaccgagttcataaactgactgaagaatcctttcagctcttcctgactttcccagccctttggtttgtgggtatctgccccaactactgttgggatcagcctcctgtcttatgtgggcacgttccaaagtttaaatgcatttttttgactcttggccaaaatttagaagatgctgtgaatatcattttgaacttgtgtaaatacatgaaagagaaaacctttgtctggaacttcttggctttgtgcaagctgtgtccaaggcaagtacataaactggtaccttgtaatgaagaggcagctgatgccatgcacttgtctgagggcatagctccatgtcttctgacattcctggtgtcccaaagaatagcaaaaagccagtttgaatattatgtaacttatttttttaatgtggacaggggaccttgaaaatcactaagttattaaaaatgtggatgtgctagaattggatatgtccaggaacatgggaagggctcactattggaatcccatgagtttccattttgtctctacccaaacgtattccaaagctgactgcatttgtaccatcttatttcttttggggattatacacctcagccgcctgagatgggggtcagctctttatataaagggaaaccagaccaggcctaaagcccacccctaccctcacccccccaatcctctcctgaaacttaaaaacagtgggaatataggaaagggaaccaaatctcattaattaattgttctcccccattaccccactgaatgaatggccatacaggctaagctgaataatgacaaagttgaaaggaccaatacagccccttttataaggattttgaatgttttgcaaatgtattggtccctgtgttgtattttgtagccttttcctgggcttcagctcccctacttcttgtatgtgtatgcatactgtagctaaccattaaagtcatgacacacaaaaaaaaaaaaaaaaaaa

SEQ ID NO: 636 - DNA, 4449 bp, HOMO SAPIENS
ggcactaaaggtttgcttccgggcgtttcttttgcttccccttccctctttcacgcttcctcccctccccctcctcccttatcccttcgctttcgctcttttccgtcgaggccgacccctgagttgtgagtctggggtctggttggtgaaaaagagcccttgaagctggaagacgggagaggacaaaagcatgtcttcccttcctgggtgcattggtttggatgcagcaacagctacagtggagtctgaagagattgcagagctgcaacaggcagtggttgaggaactgggtatctctatggaggaacttcggcatttcatcgatgaggaactggagaagatggattgtgtacagcaacgcaagaagcagctagcagagttagagacatgggtaatacagaaagaatctgaggtggctcacgttgaccaactctttgatgatgcatccagggcagtgactaattgtgagtctttggtgaaggacttctactccaagctgggactacaataccgggacagtagctctgaggacgaatcttcccggcctacagaaataattgagattcctgatgaagatgatgatgtcctcagtattgattcaggtgatgctgggagcagaactccaaaagaccagaagctccgtgaagctatggctgccttaagaaagtcagctcaagatgttcagaagttcatggatgctgtcaacaagaagagcagttcccaggatctgcataaaggaaccttgagtcagatgtctggagaactaagcaaagatggtgacctgatagtcagcatgcgaattctgggcaagaagagaactaagacttggcacaaaggcacccttattgccatccagacagttgggccagggaagaaatacaaggtgaaatttgacaacaaaggaaagagtctactgtcggggaaccatattgcctatgattaccaccctcctgctgacaagctgtatgtgggcagtcgggtggtcgccaaatacaaagatgggaatcaggtctggctctatgctggcattgtagctgagacaccaaacgtcaaaaacaagctcaggtttctcattttctttgatgatggctatgcttcctatgtcacacagtcggaactgtatcccatttgccggccactgaaaaagacttgggaggacatagaagacatctcctgccgtgacttcatagaggagtatgtcactgcctaccccaaccgccccatggtactgctcaagagtggccagcttatcaagactgagtgggaaggcacgtggtggaagtcccgagttgaggaggtggatggcagcctagtcaggatcctcttcctggatgacaaaagatgtgagtggatctatcgaggctctacacggctggagcccatgttcagcatgaaaacatcctcagcctctgcactggagaagaagcaaggacagctcaggacacgtccaaatatgggtgctgtgaggagcaaaggccctgttgtccagtacacacaggatctgaccggtactggaacccagttcaagccagtggaacccccacagcctacagctccacctgccccacctttcccacctgctccacctctatccccccaagcaggtgacagtgacttggaaagccagcttgcccagtcacggaagcaggtagccaaaaagagcacgtcctttcgaccaggatctgtgggctctggtcattcctcccctacatctcctgcactcagtgaaaatgtctctggtgggaaacctgggatcaaccagacatatagatcacctttaggctccacagcctctgccccagcaccctcagcactcccggcccctccagcacccccagtcttccatggcatgctggagcgggccccagcagagccctcctaccgtgctcccatggagaagcttttctacttacctcatgtctgcagctatacctgtctgtctcgagtcagacctatgaggaatgagcagtaccggggcaagaaccctctgctggtcccgttactatatgacttccggcggatgacagcccggcgtcgagttaaccgcaagatgggctttcatgttatctataagacaccttgtggtctctgccttcggacaatgcaggagatagaacgctaccttttcgagactggctgtgacttcctcttcctggagatgttctgtttggatccatatgttcttgtggaccgaaagtttcagccctataagcctttttactatattttggacatcacttatgggaaggaagatgttcccctatcctgtgtcaatgagattgacacaacccctccaccccaggtggcctacagcaaggaacgtatcccgggcaagggtgttttcattaacacaggccctgaatttctggttggctgtgactgcaaggatgggtgtcgggacaagtccaagtgtgcctgccatcaactaactatccaggctacagcctgtaccccaggaggccaaatcaaccctaactctggctaccagtacaagagactagaagagtgtctacccacaggggtatatgagtgtaacaaacgctgcaaatgtgacccaaacatgtgcacaaaccggttggtgcaacatggactacaagttcggctacagctattcaagacacagaacaagggctggggtatccgctgcttggatgacattgccaaaggctcttttgtttgtatttatgcaggcaaaatcctgacagatgactttgcagacaaggagggtctggaaatgggtgatgagtactttgcaaatctggaccatatcgagagcgtggagaacttcaaagaaggatatgagagtgatgccccctgttcctctgacagcagtggtgtagacttgaaggaccaggaagatggcaacagcggtacagaggaccctgaagagtccaatgatgatagctcagatgataacttctgtaaggatgaggacttcagcaccagttcagtgtggcggagctatgctacccggaggcagacccggggccagaaagagaacggactctctgagacaacttccaaggactcccaccccccagatcttggacccccacatattcctgttcctccctcaatccctgtaggtggctgcaatccaccttcctccgaagagacacccaagaacaaggtggcctcatggttgagctgcaatagtgtcagtgaaggtggttttgctgactctgatagccattcatccttcaagactaatgaaggtggggagggccgggctgggggaagccgaatggaggctgagaaggcctccacctcaggactaggcatcaaggatgagggagacatcaaacaggccaagaaagaggacactgacgaccgaaacaagatgtcagtagttactgaaagctctcgaaattacggttacaatccttctcctgtgaagcctgaaggacttcgccgcccacctagtaagactagtatgcatcaaagccgaagactcatggcttctgctcagtccaaccctgatgatgtcctgacactgtccagcagcacagaaagtgagggggaaagtgggaccagccgaaagcccactgctggtcagacttcggctacagcggttgacagtgatgatatccagaccatatcctctggctctgaaggggatgactttgaggacaagaagaacatgactggtccaatgaagcgtcaagtggcagtaaaatcaacccgaggctttgctcttaaatcaacccatgggattgcaattaaatcaaccaacatggcctctgtggacaagggggagagcgcacctgttcgtaagaacacacgccaattctatgatggcgaggagtcttgctacatcattgatgccaagcttgaaggcaacctgggccgctacctcaaccacagttgcagccccaacctgtttgtccagaatgtcttcgtggatacccatgatcttcgcttcccctgggtggccttctttgccagcaaaagaatccgggctgggacagaacttacttgggactacaactacgaggtgggcagtgtggaaggcaaggagctactctgttgctgtggggccattgaatgcagaggacgtcttctttagaggacagccttcttcccaacccttcttgaactgtcgtttcctcaggaactgggtcttcctgattgttgaaccctgacccgaagtctctgggctagctactccccccagctcctagttgatagaaatgggggttctggaccagatgatcccttccaatgtggtgctagcaggcaggatcccttctccacctccaaaggccctaaagggtggggagagatcaccactctaacctcggcctgacatccctcccatcccatatttgtccaagtgttcctgcttctaacagactttgttcttagaatggagcctgtgtatctactatctccagtttgtattatttcttgaaagtcttttaacaatatgataaaactaagattgtgaaa

SEQ ID NO: 637 - DNA, 2211 bp, HOMO SAPIENS
gtgctcagctcccgtcggcagcagggcctcatccggcccaggcctgccctccgccgccgcggcccgccccgcccgaaaaacactcacttgccagccgcggtccatcgagtcccccgctactgcctcctccgccggctgcggctccggtccccgggtcccccaggtccggcttcttgggcccggggggcggcccagctcccccgcccgcgacggctcccggcggaaagccggccacgggtgcaccagccagagccagggggacgctgttgctatggaggccgaggcccggggcagccccggcggcagggtcctcatgcaggaactgacactcctccccgtagaagcaagtcttatccttagcgtagtagcggcagtacttcagcttcactcctaccgccgccccgccggggacacccccgacccccggcggggccaccaccgccaccgccgccgccagcgaggaggaggaaggggaggcggcggccgaggggggcgggaggccgccgccactgttcatggcaacgccgcagcctcgtcttccgccgccgcccgaggagccgccgccgccaccaccatagacgggggaggaaaggaagacgctgccggtgccggataaaagcctgggcgggggccgcgcgggacgacggggtgagcgcgcgggcccagacggggacttcgagggcgcgggcaggggaagagggagcggcagcggcaagcgggtggggaaggcggaggggccggtttatttttaaattctgcctccactcgctctctcgcgctctggttcctccgagttgtttattccattttcctcttcctgagacggccgtcgccgctgcgcgtgcgcgctgagacgcgagggcttatgggtagcgggagcgctaggggaagcctggccggcgtcgggcccccgggggcatccgcgagctatcggcggttggaccggcggctctcggtggggttccggacgcggatctggcgccgaattctcacgagacctgataccttccttatttgtatattctcttacttaaaaagccagatgtcttttttttttttttcattgaaaagagaaaattgacaaggtaaacggtcgtttggaggggccacctggggacgcggcccgagccctggctctacctgaagaatatcttctatttgccacacttcctctccccgtttcctttcttcgcccctctcctctttccccttcccctcgaaggtaatgagaactactggaccgattacgctaacctcttggccctttgtcaaaaaatggagccaaaaaggttgatttagacagaccccctgctcagtgcagcacctgttattctctgtatttatattaccaagggccttcggtaaattatgaaaaataggatgccacctgggacaacactgcttagacagcactggaagacctttataaatatactaggttgcttttctccaatcagcctagccttgatttgaaattcatttttattttttttgagacggtgaaattcatttttaaaagatagttttaacctcagcgatctctgatgtttgcgctaatacccttttaaaggctttcagaaattttaaagaattgctatgaaaggaaaagtaacattctagtttttctctgtaaaagaggttcacaaacggcagatcgctgttatgaaaaggaggggtggaagtatttaaggaattgtggcaaacaaagtcacagaagaatggatataagcaaaagtagcacactgaaaaaaatggggaaaagtggagtctagatcacaaactggtaagcttggtgatgttctctagccaaattcgaaggtaataacattgtattatggctttctgtttaaaagcagtttcgcttatttgattattcaacaaatctttattaacacgcattacgtgtaccagaaactgtggtacacttaactgtggagctggggaagcaaaagtgaacatgccgccttaagtgagttcagatggcttatcttccggttggggaggcatcaagtacacaggtccgttgtaaaccagtgtcttaagtgctaaccttatcacatttgctattagaggatattaaacatgtcagacttcttggagaaagttgatattttcatgttccaagtttgggaacatcattgaattcagacagatctggattgaaacagattaaagtgcctacactttaataaaaaaaaaaaaaaaaaaaaa

SEQ ID NO: 638 - DNA, 2150 bp, HOMO SAPIENS
gtatgcattattcatcactgttctaatcaaacaatcaaaatcgtttactttcaccgggaatatttagcaagatcaaagacactctggctggaacggctcttgttttaccgctgacagatagcctttgatttttattttttgcagtgttccagtgttttctctcaaaactctgtgtttggaacatcaaggatggattatcccaaaatggattattttctggatgtagagtctgctcacagactcttggatgttgagtcagctcaaagattcttctacagtcaaggagctcaagctcgccgggcgaccctgctcctgcctcccacattaatggcggcatcctcggaggatgatatagaccggcggcccatccggagagtgcgctccaagagcgacacgccgtacctcgcagaggccaggatctcctttaacctgggggcagctgaggaagtggagaggctggcggcgatgcgttctgactccctcgtcccaggcacccacaccccacccatccgcaggagaagtaagtttgccaacctgggaaggattttcaagccttggaaatggaggaagaagaaaagcgaaaagttcaaacacacgtcagcagccctggaaaggaaaatatctatgaggcaaagcagagaagagctgataaagcgaggagtcctgaaggaaatctatgataaagatggggaactctctatatccaatgaagaggactccctagaaaatgggcagtccctgagctccagccagctgtctctgcctgccctgtccgaaatggagccagtcccaatgcccagggatccctgctcatatgaggtgctccaaccgtcagacatcatggatgggccagatcctggcgcccctgtgaaattgccttgtctgccagtgaaactgtcgcctccgctacctccaaagaaagtcatgatctgtatgcccgtgggggggccagacctctcactggtgtcctacacagcccagaagagtggccagcagggtgtggcccagcaccaccacactgtcctgccctcccagatccagcaccagctgcagtacggcagccacggccagcacctcccctccaccaccggctccctccccatgcacccctcgggctgcagaatgatagacgagctcaacaaaacgctggccatgaccatgcagaggctggaaagctctgagcagcgggtcccctgttccacttcttaccacagctctgggttgcactcgggtgatggggtcaccaaagcaggacctatgggccttccagaaataagacaagtgccaactgttgtgattgaatgtgatgacaataaagaaaatgtgcctcatgagtcagactacgaagactcttcttgcctgtatacaagagaagaggaggaagaggaggaggacgaagacgacgacagctcattatacaccagctccctggccatgaaggtctgcaggaaggactccttagccatcaaactcagcaacaggccctccaagcgagagctggaagaaaagaacatccttcccaggcagacggatgaggagcggctggagctgaggcaacagattggcaccaagctcaccaggcggctgagccagaggccaactgcagaggaactggaacagaggaacattttgaaacctcggaatgaacaagaggaacaggaggagaagagagagatcaagaggaggctaacccgaaagctcagtcaaaggcccacggtggaagagcttcgggaaagaaagatcctcatccgcttcagtgactacgtggaggtggctgacgctcaggactatgaccgcagggcagataagccgtggacccgcctcaccgctgcagacaaagctgccatccgaaaggagctcaatgaattcaaaagcactgagatggaagttcatgaattgagtagacacttaacaaggtttcaccgaccttaacagtcgaattcctcttgagtgctatgctgtcttcaaaacataaatttataagaaccataagtgctggtatttattcacttccccattacgatgtaaatcttctgaactgccttttttttaaaaagaagaaaaatcaaggaaacacaatcaggattttatgtgtgaaaacgcaaaagtgatggctcggcggtccgagctgctggtcccacttctgacac

SEQ ID NO: 639 - DNA, 1518 bp, HOMO SAPIENS
cagagagaagaagaaatatttccaaatataccaggctgatctttcgtagtttctcagtcttgctgtctgttgttgtttgaaatctgtttcccacgagactctgggaagatggaggtgcagggcttgggtaacagctgccttcctcagggctgggtacctgctctccgagtctgtgtctccaggctgtgtgctcagacttgaccatgtttgggcatggaggcttgccccagatggggaccaaaagctgcttccctggagacgggcggggaggccaaacttcctgctgaagctctgtggcctcttttggggtgggggcgggggtccaggcagaaagaaactgtctgctgctcaagacccacaggacgccgggaagactaaatgatcactgcccccagtgaatatggtgaagaagctggtgatggcccagaagcggggagagacacgagccctttgcctgggtgtaaccatggtggtgtgtgccgtcatcacctactacatcctggtcacgactgtgctgcccctctaccagaaaagcgtgtggacccaggaatccaagtgccacctgattgagaccaacatcagggaccaggaggagctgaagggcaagaaggtgccccagtacccatgcctgtgggtcaacgtgtcagctgccggcaggtgggctgtgctgtaccacacggaggacactcgggaccagaaccagcagtgctcctacatcccaggcagcgtggacaattaccagacggcccgggccgacgtggagaaggtcagagccaaattccaagagcagcaggtcttctactgcttctccgcacctcgggggaacgaaaccagcgtcctattccagcgcctctacgggccccaggccctcctcttctccctcttctggcccaccttcctgctgaccggtggcctcctcattatcgccatggtgaagagcaaccagtacctgtccatcctggcggcccagaagtagagccatccatccatgccataccacttgtcagggcacaggggactggctgggcccccagggctgctccccacttgcagcacaatgccttctccacctgccctcccactcttccagtccaatccacgctgtcttctgttgcaggactaacctttgagaaatccttttgtgaagtcattgcctgctcaagaatgtacagtggctccccaatgccttggaggccataaggccagccagttctagctctctattacctgtccccactcaactgactcatacctgtttccggctgcatcactatgtgccccacagagaacgatgatcgtcacctctgtgcctgagttctccctgttgtctcaaagcggtacccatcctcccccagaagctgtccccagcgagcctcccttctttgtttgaattctctaataagagcaacagcagctcccatttctagaacacatttacagtattactattttctaggatataaagtgccatatatatttttaattccaatattaataaatgtatgccaaacaacaata

SEQ ID NO: 640 - DNA, 334 bp, HOMO SAPIENS
  misc_feature (229)..(229): n is a, c, g, or t
  misc_feature (268)..(268): n is a, c, g, or t
  misc_feature (271)..(271): n is a, c, g, or t
  misc_feature (284)..(284): n is a, c, g, or t
cattgatcacagatgaccataacagatataataatgatgagaaagtttgaaatattgtgagaattaccaaaatgtggtacaaggacacaatgtgagcacatgcttttgggaaaatggtaccaatagacttgctgaatgtagagttgccacaaaccttcaatttgtaaaaaatgcaatatctagctgggtgcagtggctcatgcctataattccagcgctttgggaggcnaaatcaggaggatgactggagcctaggagattgaggttncanttagctatgatcntaccacctgtattacagcctagacaacagagcaaaacactgttccttaaa

SEQ ID NO: 641 - DNA, 14340 bp, HOMO SAPIENS; identical to SEQ ID NO: 378

SEQ ID NO: 642 - DNA, 4630 bp, HOMO SAPIENS
agacagctagccaagattctaaagaaacccagacaaggcagggtggagaccgagaggagaaatttattccagaaattaactgttagcagtagtgtttcttaatacataagctatatcatactcctcaagtagattctttgcttaaaactttcactgtaaataattttatagcaaccatgtgaataacttaagaataatagaatcagtctcatttgtaggcactgtagaccatctccattccctacatgtcagagactctgggggatgaattggagatattaagaggtaaaatgatgcagagaagaccaaggtcagcagaagtcaaatacttctatttctttaaaattttgcttaggctacgcctggctattttgaagtatttatttattgatgataaaggaatactttttgtaagtagtagaaaacacctaccaactttgcctactctcttgagtagactaaaactgtttttggtaaaggatcctcttttagatttcaaaggacagatcttcacagaagctaatttttccagggaatgtttctctcttcaagaaactttggaagcttttgtgaaagaagatttttgtatggataaagtgaacttttgtcaagagaaactagaagatacaatatgtttaaatgagccgtcaagttttcttattgagtatgaattcttaatacctccaagcctcaaaccagaaattgatattccatcactctcagaactgaaggagttattaaacccagtgccagaaataataaactatgtagatgaaaaggaaaagctttttgaaagagatcttactaacaagcatggaattgaggatatcggggatataaaattcagctccacagagattttgaccattcaaagccagagtgaaccagaagagtgcagtaaaccaggagagttagaaatgccactaactcctctattcctaacatgccaacattcttcagtgaattcattacgtacagaacttcagacatttccattatctccggtttgtaaaattaatttgcttactgctgaagaatcagctaatgaatactacatgatgtggcaattagaaagatgtagaagccctttgaacccatttttgcttacagtgccaagaattcaagagccccacagccaatattcagttacagatttgaaaaagatattttctgttaaagaagaaagccttgtgattaatctggaaaaggcagagtggtggaaacaagcaggactaaatctgaaaatgatggaaacattggaacatctgaatacatatttatgtcatgataatttgtcttctaatgacactaaaattgagatatttttgcctacgaaagtgcttcaattagaatcatgtctagaacataaaagtcattcttcacctattgcacttattgatgaaaaatctacaaatgctcatttatcacttccacaaaagagtccatctctggcaaaagaagtaccagatctatgtttttctgatgactatttctctgataaaggagcagcaaaagaagaaaaaccaaagaatgaccaagaaccagtaaacagaataatccaaaagaaagaaaataacgatcactttgaacttgactgcacaggaccatctattaaatcaccttcctcttcaataattaaaaaagcatcttttgaacatggcaaaaaacaagagaatgatttggaccttttgagcgactttattatgctgcgaaataaatataagacttgcacctcaaagactgaagtcacaaacagtgatgaaaaacatgataaagaagcatgttctttgacacttcaagaagaaagtcctattgttcatattaataaaaccctggaggaaataaatcaggaaaggggaacagatagtgtcattgaaattcaagcgtcagatagccagtgccaagcattttgcctcctcgaagcagcagcttctcctatcttaaaaaaccttgtatccttgtgtaccctccctactgctaattggaaatttgccactgttatttttgaccaaacaaggtttctcttaaaggaacaagaaaaagtagtaagtgatgctgttcgccaaggtacaattgatgaaagagaaatgactttcaagcatgccgctctcttacatcttctggtaacaattagagatgtccttttaacatgcagcttggacacagcattgggatatttgtcgaaggcaaaagatatctacaacagcattttaggcccctatttgggtgacatttggagacagctggagattgtacagtttattagggggaaaaagcctgaaaccaactacaagatacaagaattgcaatgtcagatactaagttggatgcaaagtcaacagcaaattaaggtactgattataataagaatggactcagacggtgaaaaacattttctcattaaaattcttaacaaaatagaaggtttaacactgactgtccttcattcaaatgaaagaaaagattttctggaatctgaaggtgttttaaggggtacaagttcctgtgtagttgtacataatcaatatattggagcagatttcccctggagtaatttctcatttgtggtggaatacaattatgtggaagactcttgttggactaaacactgcaaagagttgaatattccttacatggcctttaaagtgattcttccagacacagttttagaaagaagcaccttgctggatagatttggaggttttcttttggaaattcagattccatatgtgttttttgcatctgaaggacttcttaatactccagacatacttcagctgctagaatccaactataacatctcactagtagagagaggctgcagtgagtcattgaaactctttggaagttcagagtgttatgtagtggtgacaattgatgaacacactgccataattttgcaggatctagaagaattgaattatgagaaggcatcagacaatatcattatgaggctgatggcattatcattacagtacagatattgttggataattttatataccaaagaaacattaaattcagagtatctgcttacagaaaagacacttcatcacctagcactgatttatgcagctttggtttcatttgggctaaactctgaagaactggatgtaaagcttataattgccccaggagtagaagcaactgccttgataattcgacaaattgctgaccacagtttaatgacctcaaagagagatcctcatgaatggttggataaatcctggcttaaagtttcaccatctgaggaagaaatgtacttacttgattttccatgtattaacccattggtggctcagctcatgctaaataaaggaccttcactgcattggatattattagcaactctgtgtcaacttcaggaactcctacctgaagtcccagaaaaagtgttaaagcatttttgtagcatcacttccctattcaagattggttcttcttccataacaaaatcaccgcaaatttcgtcacctcaggaaaataggaatcagattagtaccttgtcttctcaaagttcagcttctgatttagactctgtcattcaagaacataatgaatattatcagtatttaggattaggagagacagtgcaggaagacaaaaccaccattttgaatgacaactcttccattatggaactaaaagaaatctcaagttttttaccacctgtgacttcatacaatcagaccagctactggaaagactccagctgtaaatctaatatagggcagaatactccttttctaattaatatagaatcaaggagaccggcttataactcctttctaaaccacagtgattcagagtcagatgtcttttctttgggtctaacacaaatgaactgtgaaactataaaatcaccaactgacactcagaagagagtgtcagttgtcccccgttttataaattctcagaaaaggagaacacatgaagcaaaaggtttcataaataaagatgtatcggaccctatcttttcactagagggcactcaatctcctcttcattggaactttaagaaaaatatatgggaacaagagaatcacccgttcaacttacaatatggtgcacagcagactgcatgtaacaaattgtactctcagaaaggtaatttattcactgatcagcaaaaatgtctatcagatgagtctgaaggcctcacatgtgaaagttcaaaagatgagactttctggagagaattaccatctgtccccagtttggatttatttcgtgcttctgattctaatgcaaatcaaaaagaattcaacagcctttatttctaccaaagagctggaaaaagtttaggacagaaaaggcaccatgaatcttcatttaactcaggagacaaggaatcattaacaggttttatgtgctcacaactaccacaattcaaaaaacgacgtctagcatatgaaaaagtccctggtagagttgatgggcagactcggctgaggtttttttgaaggaggagaagagcaatgttacatgccatattccactgtttttgatgctaatccactagcgcaattatttagatttgctcatacactaaagaaaacacaattgttcatatatgtctcagtatttctgtattaaatattcataatatgtaaaaaaaaaaaaaaaaaaa

SEQ ID NO: 643 - DNA, 2568 bp, HOMO SAPIENS
ctccgaggccgccgggccctcctccagagtcccgccagtcccccagagtccaggccagtccccgccgtcacccggtgcgagcccgcgagaggcctagtgcagctggcagccccgccccggcacccgcctgctcttctcgcgggtccggaccgcgagcgcgggggccgacgggtcgccgctgcgccgggccgggatggcggccaccgcgctgctggaggccggcctggcgcgggtgctcttctacccgacgctgctctacaccctgttccgcgggaaggtgccgggtcgggcgcaccgggactggtaccaccgcatcgaccccaccgtgctgctgggcgcgctgccgttgcggagcttgacgcgccaggtgagccgggccggggagcccgggcccctgccccgtccccgccgctccgtccctgtcgggccgctggggtctccaccgtctttgctgagccacctctttgcctcggcagctggtacaggacgagaacgtgcgcggggtgatcaccatgaacgaggagtacgagacgaggttcctgtgcaactcttcacaggtgcacaaatggagtccagaggaggctgtaagagccatcgccaagatccggtcatacatccacatcaggcctggccagctggatgttcttaaagagttccacaagcagattactgcacgggcaacaaaggatgggacttttgtcatttcaaagacatgatgtatggggattagaaagaactcaagacactcctgcttgatacagaacaaaaagagcttaacaggaccaacagggcttaagcccagacttgacgtaacagaaatgtgccaataggtaataggtaatttttctttctctgacttgttttgttttcttgaaataacactgttgtgtggctagaaaggaaaagatttagtgtggcttgtattcatgggatacaggacagggatggggctatcatcttttcttgaatagggctaaagaagtattttaacaaaaatctattatgtacctaatattgtgcctaataatatttagcaccacaactcaaaaaacatttagcacttgaaaaaaggagactcacctctggctctttgccactgtcagaatctgaatctcactggccctgtggagtagggatcctatctggagaagtgggagcatgggctgcagtcaggactgctgcagactgagccatgtgatggtacgtaatgagttcccctgagggaatgaaacaccctcaccccttcaaagtcacccctttggaattcaacacagacacacatatcccttcaaaaacttttatttgtatcaacagttcctagctcttgacttagcttagagcttttaaaagagcagacaccttatatatttgagattgaaaaagtttctgctattaatcagaaataatcatttctattttctggcttaccccttggaataagccaaaaataaaaccaaagttacatttcctgacagatggataagaaaacaatagaaggaacatcctgaattctagagttgactcttgctggtgaagtacaccttcagcttagtccattctcctaagtaaagcctgaaggaaaactcttaacacctaattctttgtggaaaaatgatcaactagccatttcacaggctatagaacaaaagtacaattgggcatctttccttatgtcctgggatcaggggtgcttacatttaacattgatcaggtaaagaggagaggctgtgcctaaggtctgagaaaaggcttgctctaagcaagctgtggtgaggcacaggatgactagggaatggcagagaacaggctggcctactgtcagttcaagcaaccagctgagcagcagcagtctaaaaagccccaaacagaacacctccatggattcagggaagggctgaggcactgcctttctagtatgtgccaaaaaaaacataactctgaattggggcccaggggactttgagtttgtatggggagggaaaaggagtgagcagttctcctcccctccccacagccttaggccaacacaaactgcaaattggtaagcagcaccttaatacctcttgtgacagttacggctgaagtggcagggtcaagcttgtaggtgttggcatccccctttttatatcggtcccggaagacatagatgctcccgttacagctggcaatcttccagagggatggggcagagctccaggcctcaggaaggcaaagccgggtgaagctgtctagcaagggattgtagcacaccagggagtccccttcagccacgatgaacaccagatctttatgcacagctgcgtgcatgcggcctgcaaagggcagcacatagggcttcacatggcatttgtctgtctctgtgtcaaagcactggatgagtcgggaaggtttggtaaagaagtccagatcattctcctccccccctagtaagtagatgatcccgttgaggttggcaccagcagcccctgacacagccacctctagctgagttgtctctgtccacacattatcacctacgcgataataaatgactgcgttggagagggtaaaaaaaaaaaaaaaaaaaaa

SEQ ID NO: 644 - DNA, 5458 bp, HOMO SAPIENS
ggcggcgcggctggtccccaggggtctgcgggcgactgcgcggctgaggcgcccgagtgcggtactggcggcgggcggcgggcagccatggcggaggccgcgtcgccgcacttgtcgctgccctcggggctgctggagctctgcgcgctgctgggcgccccccgggacagtctccgaagtctcgagcagaggtcctgtccattttcgtgcctccttttatcagtaaagaggacagtcaaacggccggtgccaactgcggcactctcggtaaaacccggatgcgctccttgagaaagaagagagagaagcccagaccagagcagtggaagggcctcccggggccccccagagcgccagagcctgaggatgtcgccgtcccgggcggcgtggacctcctcaccctgccgcagctgtgcttcccagggggtgtgtgcgtggccactgaacctaaggaggattgcgtccacttcctggtgctgaccgatgtctgcgggaataggacctatggcgtggtggcccagtactaccggcccctgcatgatgagtactgtttctacaatggcaaaacgcaccgggagtgtcctggctgcttcgtgcccttcgcggtgtgcgtggtctccaggtttccctattacaactccctcaaggactgcctttcctgtttattggctcttctgaagccctgtaaagattttgaagtggacagtcatataaaagatttcgctgcgaagctgtctttaatacccagcccgccacctggaccgctccatttggtatttaacatgaagtcgctccagattgtgttacctgcccgagcagaccccgaaagccccatcctggacctggaccttcacctgcccttgctgtgcttcaggcctgagaaggtgctacagatcctgacatgcatcctgacggaacagcggatcgtcttcttctcctcggactgggctctgctgacgctggtcactgagtgcttcatggcctacctgtatccgctgcagtggcagcaccccttcgtgcccatcctgtcggaccagatgctggatttcgtcatggcccccacgtccttcctgatgggctgccatctcgaccacttcgaagaagtcagcaaggaagccgacggtttagttctgataaatattgatcatgggagcatcacctactccaagtccacggacgataacgtggacattcctgatgtccccctcctggcagcccagacgtttattcagagggtgcagagcctccagctccaccatgagctgcacgccgcccacctcctctccagcacagacctgaaggagggccgagcccaccggcggtcctggcagcagaaactcaactgccagatacagcagaccaccctgcagctgctcgtgagcatcttcagggatgtaaagaatcatttaaactatgaacacagagtctttaatagtgaagaatttctcaaaaccagggctccaggggaccatcagttttataagcaggtcttagacacctacatgttccattcttttcttaaagcccggctcaataggaggatggacgcctttgctcagatggacctcgacacccagtcggaggaggacagaataaatggaatgcttctaagtccaaggagaccgaccgttgagaaaagagcctcccggaagtcctcgcacctgcatgtcacccacaggcgcatggtggtcagcatgcccaacctgcaggacattgccatgcctgagctggcacccaggaactcctcgctccggctgacggacaccgcaggctgtaggggcagcagcgcagttctgaatgtcacgccgaagtccccgtatacattcaagattcccgaaatccactttccgctggagagcaagtgcgtgcaggcataccatgcccactttgtctccatgctgagcgaggccatgtgctttctggcccccgataactctctgctcctggcccgctatttgtacctccgagggctcgtttatctgatgcagggacagctgctgaacgccctcttggacttccagaatctgtataaaacagacatacggatctttcccactgatttggtgaagaggacggtggaatccatgtctgcccctgagtgggagggggctgagcaggcgccggagctgatgaggctcatcagcgagatcctggacaagccgcacgaggcctcgaagctggacgaccacgtgaagaagttcaagctgcccaagaagcacatgcagctgggcgacttcatgaagcgggtccaggagtcagggatcgtgaaggacgccagcatcatacaccggctgttcgaggccttgactgtaggacaggagaaacaaatcgacccagaaacattcaaagatttctacaactgctggaaggagacggaagcagaagcccaggaggtcagtctgccgtggctggtgatggaacacctggataaaaacgagtgtgtgtgtaagttgtccagctccgtcaagacaaacctaggcgttggcaagatcgccatgacccagaagcgcctgttcctcctaaccgaaggaaggccaggctacttggagatttccaccttcagaaatatagaggaggtcaggagaaccactactacatttctacttcggagaatacccactttaaaaatcagagtggcgtccaagaaagaagtcttcgaagccaacctgaaaaccgagtgtgacctttggcacctgatggtgaaggagatgtgggctgggaagaagctggccgatgaccacaaggaccctcactacgtccagcaggcgctgaccaacgtcttgctgatggacgccgtcgtgggcacactgcagtcaccaggcgccatctacgctgcctccaagttatcctactttgataagatgagtaacgaaatgcccatgacgcttccggagacaaccctggaaacactgaagcataaaatcaacccctcggcgggggaggcgttcccacaagcggtggacgtgctgctctacactccagggcatcttgacccagccgaaaaagttgaagatgctcaccccaagttatggtgtgctctgagcgaaggcaaggtgaccgtgttcaatgcttcttcatggaccatccaccagcactcctttaaagtgggcactgcaaaagtgaactgcatggtgatggccgaccagaaccaggtgtgggttggctcggaagactccgtcatctacatcatcaacgtccacagcatgtcctgcaacaagcagctcacagcccactgctccagtgtcacggatttgattgtgcaggacggacaggaggcacccagcaacgtgtactcgtgcagcatggacggcatggtgctggtgtggaatgtgagcacactgcaggtgaccagccgcttccagctgccgcgaggtggcctgacgtccatcagactgcacggcggccgcctgtggtgctgcacaggtaacagcatcatggtcatgaaaatgaatggatccctccatcaagaattgaagattgaggagaacttcaaagacaccagtacctccttcctggccttccagctccttcctgaggaggagcagctgtgggcggcctgtgcaggacgcagcgaggtttacatctggagcctgaaggacctggcccagcccccgcagagggtgcccctcgaggactgctctgagatcaactgcatgatccgggtgaagaagcaggtctgggtgggcagccgagggctggggcagggaacacccaaggggaaaatctacgtgattgacgccgagaggaagaccgtggagaaggagctggtggcgcacatggacaccgtgaggacgctgtgctcggctgaggacagatacgtgctgagtgggtcgggcagggaggaggggaaagtcgccatttggaaaggcgaataaacgtggctgagtctgccaagtggaactgtgccctatgtgtggggactggctgccccctagagcctgccaggagcagaagcctggaggggtggcagggcagagcagcccaggctcagcatggagcccacttaccgtgtggccagccgcgagacccatggccacgcaccttctctcaggccttcgggccccctggttaaactgcaccaagggtgtttcctgttggggtgtgtctcaggcaggcagctgcgtcttgttggtgataacctctgctgggaggttactttgttgcctagaaagttctggaatccacaaccaggggctggcactggagccagcagcttggccgagtcacaggtgacccgtggccctcacgtctctggttttacctttccttacttcattcattcactcacccagtccttacgaatcaccgaggaacactgggctgagcacatgacagggagcctggagccccggggcctccagcgaggcctgagaagggtggttcgggtaaccactgtgggctctctcccatcacagaaggtggacagggcctacccaggtggaggggaccaccctgcgatcaggtgtttgcgacaggggttgggccagctgaggcaagctgtcttttttcccttttctttttaatagatgcaacatttttataataatcctagagaccttttttctaccaaagatcacagaccagaaaaagttccatctaaaatatcatgcccaggaaagcacatgggatcaaaagtaaaatagcatcatgtgtgatctcgtcttccagcgtgccgctcagttccccgaatccgtgtgcacacgtgtgatctcgtcttcagtgtgccgctcagttccctgaatccgtgtgcacactgcgtatgtgtacgcgcagcatgctatactgaactcaacaagatcttggctgtacataaatatttgtaaaagagaccctttgcacctttttactgtaatgttgagacttcattacttaaatgttctacggaaggttctggtgtggttgttggagccggagggagcgtgtcagcacgtgctgagggcatggggcctgccccctgggcacccatccacaagctgggccacggagctccagcttctcaggacaaagccccggggctggcgcatcctgagggtctctgggggtgtttgccaggctcctgggatgggccgctttcagaagccctgcagtgcctccagatggaaaggcgggcccggcctccggttgggtctgcattttggagagtccacaccacggaccaggttttcccccaaggcttggctttgtgtagctactaacttcttggggcattctgagagtgtgggcagagagaattatgtggcctcatcctcccccaaggctgtgcttgcagcccgggcaccttcccactttctagctctggagaggttggattttgcttttgtaaacacatgaatccttatgataaaagtctgtcagtcaaaaatacatttataaattatttaatgccagtcctcatgtaacctcaggtatcttcagcttgtggagaataaatctggtttaataaaaaaaaaaaaaaaaa

SEQ ID NO: 645 - DNA, 4494 bp, HOMO SAPIENS
gcggccgcgggggcgcgacggccggggcgggggcgctgctgctgcgggggcaggcggcggcaggggcggcggcggcggcggcggcccgctccagccatgccgaataaaaacaagaaggagaaagaatcaccaaaagcagggaagagtggaaaaagttcaaaagaaggacaagacacagtagaatcagagggaacaagtcctgaagaaccctcaagccctaaagtaccacctccacttcttcctgagttgctggttcttatttttggtgggcttcaaggaagagatgttcctcctgctgatcaagagaagctttttatccagaagttacgtcagtgttgcgtcctctttgactttgtttctgatccactaagtgacctaaagtggaaggaagtaaaacgagctgctttaagtgaaatggtagaatatatcacccataatcggaatgtgatcacagagcctatttacccagaagtagtccatatgtttgcagttaacatgtttcgaacattaccaccttcctccaatcctacgggagcggaatttgacccggaggaagatgaaccaacgttagaagcagcctggcctcatctacagcttgtttatgaatttttcttaagatttttagagtctccagatttccaacctaatatagcgaagaaatatattgatcagaagtttgtattgcagcttttagagctctttgacagtgaagatcctcgggagagagattttcttaaaaccacccttcacagaatctatgggaaattcctaggcttgagagcttacatcagaaaacagataaataatatattttataggtttatttatgaaacagagcatcataatggcatagcagagttactggaaatattgggaagtataattaatggatttgccttaccactaaaagaagagcacaagattttcttattgaaggtgttactacctttgcacaaagtgaaatctctgagtgtctaccatccccagctggcatactgtgtagtgcagtttttagaaaaggacagcaccctcacggaaccagtggtgatggcacttctcaaatactggccaaagactcacagtccaaaagaagtaatgttcttaaacgaattagaagagattttagatgtcattgaaccatcagaatttgtgaagatcatggaacccctcttccggcagttggccaaatgtgtctccagcccacacttccaggtggcagagcgagctctctattactggaataatgaatacatcatgagtttaatcagtgacaacgcagcgaagattctgcccatcatgtttccttccttgtaccgcaactcaaagacccattggaacaagacaatacatggcttgatatacaacgccctgaagctcttcatggagatgaaccaaaagctatttgatgactgtacacaacagttcaaagcagagaaactaaaagagaagctaaaaatgaaagaacgggaagaagcatgggttaaaatagaaaatctagccaaagccaatccccagtacacagtgtatagtcaagccagcaccatgagcattccggttgcaatggagacagatgggcctttatttgaagatgtgcagatgctgagaaagacagtgaaggacgaggctcatcaggcacagaaagatccgaagaaggaccgtcctcttgcacgccgcaagtccgagctgcctcaggacccccacaccaagaaagccttggaagctcactgcagggccgatgagctggcctcccaggacggccgctagcctccggggcgccgcgtcggggccgggcccgccagttcttttccggattctgtagaaaatacatacttcctgtgccataccaatcagttacactcaaagctttcttggaccccgttccgtaggcaataacgtgcgtccgcctcagcgcgagattaggagttcaaacaatggtgacttcccagagcccgctggcagagccgcgggttgacgacggtgtcctcgcagtgtcgccgccaccccagcgtagtccaagtcagactatttcacaaagtcagagcgataggaaagcaccctgcccttcatcttcatgttctcccaaatggaacttaggatcttttaacataggtggttctgtgataacatcagtgttttccaaatcaaaggaacgctttaaaaaataggacctattttttaagactttacagcctttgaaatggtttccacgtgattgttacgccagcagttctcgttttgtttgtttttcaatctcagtgaaatggctctttgctttcgagttctcacgcaacgtactgggcaaatgacaatcctcagccgctggtattttctaaggggtctcttcactttgatgagtgacatgaacaccgtgtctccttctcttgtgtgtacctaaagccatatttccaagtctgtggtactccaggattccaggagtaagcctgtagaagagatttattttaaaagagattgctctgaaatttatcttaaaagagcttgctctgtctaccttgacagaaattggagttttaaaattatgtgttaatatttttatttgcagatttcgtttccgtcaacttaaacattgttgcccttcaacaaggctcttgaattaataaaattatagtctctaagaattccacattttatggaaagttagagcaaaatcattttgagttaagccagttcttagcctaatgcaaactgcagcgcctttaagcataaagtaacacaacagcattgcacggggccggcactgccgctgccttcactgaaggctgcagtgctgttctgagagcttggaggaggcaccagcgaggatgacgtttagtggagctctttctgttgaaaagagctcacgttatcaacaccttgtaaggaaaatacagtgtctgagttttcatcggtcttcacatgctgctatatattccacagagttccttgcatgtactgagcttttgttttagatggaatagcacaaggagaaaaatctttaaacttagtgctttgtctattctttatttctctcagggtggccagtattttgacttatttatcctgcttgaaagctacttgagatgtgtactgctattctaaacacgtgatctagtttctttcatctctggcataagattatataacttaatgttaagtgtcttgaggcataaaagacaaaatgtggcttattttaggatctgttttttcatcgaggtctcgggtatcctttcaaagatagtgagaagcagacactgctccttgtgcagctctggtacctcctgcccactgctgtcacttcaagccactggcaatgcttctgtcctcgtgtcttggaggaaaatcacctggggggaggggacttcttgtggtaagagcaagtgcaggtatgaaatgcgaagattgccccagctaaaagtggacaagtccgctttgtgagatgaatacttcctgagaaacttgacaagtatctctccattttaccattatgaaaactatcattaaaaaaaacagtttagatgccttctccttttgagggaaaaagggtgctttttattgtataaagcagcgtcttatgtattttgatataccattgtttgaacttccgtctttagctgatagattctcaaatatccttgattttggatgttcagtatgtttgtgagagaggtttctgggaagactctctttttgccctcgggaaaaagcaaaatatcaatgtttgggtgactgtgtaaagctcagtgtgtaagaacatctttttgtctaggttttctttctgctctttattgaagacaaacactcaccaaaaagaaaaataaaagttttcagagaaactaattttctttggcaagagtattacttaatattttggcctcctaaagtttccctagttagtactcggactcctgtgctaattgtcagcttacatatcattgtatagagactgtttattctgtaccaaactgatttcaaaagtactacattgaaaataaaccggtgactgtttttcttcataaagttctgcgtttggcatcttcactctttccaaaatgtatctgtacatcagaaatgtcactattccaagtgtctttttagtgtggctttagtatggcttccttttaatattgtacatacattgtatctttgttttatggtaataagtaataaaaatgtagacttcatattttgtacaaaatgtcctatgtacagaataaaaaagttcatagaaacagcaaatataggtaagtggcacaattatttttctttagaaaatatctgtaactttatgcattagtgaaatgttaagtaccgacatattttttaacattttgtaattcaaaactttttgttttgacattgtttatgaagagaaacttcatacacttgccatttaatatgctcttttatctaattttcaaaaactctaaaaaacggtgtatcatatggactaaataaagaacatgtgaattttattgctcatcatgaaaaaaaaaaaaa

SEQ ID NO: 646 - DNA, 1581 bp, HOMO SAPIENS
actacttctcccccggactccttggtagtctgttagtgggagatccttgttgccgtcccttcgcctccttcaccgccgcagaccccttcaagttctagtcatgcgtgagtgcatctccatccacgttggccaggctggtgtccagattggcaatgcctgctgggagctctactgcctggaacacggcatccagcccgatggccagatgccaagtgacaagaccattgggggaggagatgattccttcaacaccttcttcagtgaaacgggtgctggcaagcatgtgccccgggcagtgtttgtagacttggaacccacagtcattgatgaagttcgcactggcacttaccgccagctcttccaccctgagcaactcatcacaggcaaggaagatgctgccaataactatgcccgagggcactacaccattggcaaggagatcattgacctcgtgttggaccgaattcgcaagctggctgaccagtgcaccggtcttcagggcttcttggttttccacagctttggtgggggaactggttctgggttcacctcgctgctcatggaacgtctctcagttgattatggcaagaagtccaagctggagttctccatttacccggcgccccaggtttccacagctgtagttgagccctacaactccatcctcaccacccacaccaccctggagcactctgattgtgccttcatggtagacaatgaggccatctatgacatctgtcgtagaaacctcgatatcgagcgcccaacctacactaaccttaaccgccttattagccagattgtgtcctccatcactgcttccctgagatttgatggagccctgaatgttgacctgacagaattccagaccaacctggtgccctacccccgcatccacttccctctggccacatatgcccctgtcatctctgctgagaaagcctaccatgaacagcttactgtagcagagatcaccaatgcttgctttgagccagccaaccagatggtgaaatgtgaccctcgccatggtaaatacatggcttgctgcctgttataccgtggtgacgtggttcccaaagatgtcaatgctgccattgccaccatcaaaaccaagcgtaccatccagtttgtggattggtgccccactggcttcaaggttggcattaattaccagcctcccactgtggtgcctggcggagacctggccaaggtacagagagctgtgtgcatgctgagcaataccacagctgttgccgaggcctgggctcgcctggaccacaagtttgacctgatgtatgccaagcgtgcctttgttcactggtacgtgggtgaggggatggaggaaggcgagttttcagaggcccgtgaggacatggctgcccttgagaaggattatgaggaggttggagcagatagtgctgacggagaggatgagggtgaagagtattaacctgtgtgctgtacttttacactcctttgtcttggaactgtcttatttttgttctgtaaatgtctattgccgtaaattgttaataaaattgatgtttccatttcaaaaaaaaaaaaaaaaaaaaaaaaaaa

SEQ ID NO: 647 - DNA, 6268 bp, HOMO SAPIENS
gatgtttcgcgaccaggtcggggtgctggcgggctggtttaagggctggaacgagtgcgagcagactgttgcgctgctgtcgctgctcaagcgcgtgagccagacccaggcccgcttcctccagctctgcctggagcactcgctggccgactgcgccgagctgcacgtcctcgaacgcgaggccaacagccccggaatcattaaccaatggcaacaggaatccaaggataaagtgatttccctcctgttaactcatctgcctttgctgaagccaggaaacctcgacgcgaaagtagaatatatgaaactgctgcccaaaatcctggctcactctattgaacacaaccagcacattgaggagagcaggcagctgctgtcctatgctttgatacatccagccacttcgttagaagaccgtagtgctttagccatgtggctgaatcacttggaggaccgcacgtcgaccagctttggtggccagaaccgaggccgctcagactctgtggattatggacagacacactactatcaccaaagacagaactctgatgacaagctcaatgggtggcagaactctcgggattctgggatttgcatcaatgcctccaactggcaggacaaaagcatggggtgtgagaatggccatgtgcccctctactcctcctcatctgtccccaccacaatcaatacgattggaaccagcacaagtacaaatgttccagcctggctgaaaagcctccgcctgcacaaatatgccgcgcttttctcccagatgacctatgaggagatgatggccctcaccgagtgccagctggaggcgcagaatgttaccaaaggtgcaagacacaaaattgtcatcagtattcagaagctcaaagaaagacaaaatctcctgaagtctttggaaagggacatcatcgaggggggcagcctgcgcatcccgctccaggaactgcaccagatgatcctgactccgatcaaggcctacagctccccgagcaccacccccgaggctcgccgccgggagccccaggccccgcgtcagccctcactgatgggccccgagagccagagccccgactgcaaagatggggccgcagccactggcgccacggccaccccctcggccggggccagcggggggctccagccgcaccagctgagcagctgcgatggggagctggccgtcgcccccctgccagagggggacctccccgggcagttcacacgcgtcatggggaaagtgtgcacacagctcttggtctccagacctgatgaggaaaatataagttcctatttacagctcatagacaagtgtctaattcatgaggcatttacagagacacagaaaaaaagattgttgtcatggaaacagcaggtgcagaagctctttcggtctttccctcggaaaacccttctagacatatcaggatatcgacagcaaagaaatcgaggctttgggcaatccaactccctcccgacggctggctctgtgggcggtggcatgggcagacggaacccgcgccagtaccagatcccctctcggaacgtcccttccgcccgcctgggcctcttgggcaccagtggattcgtcagctccaaccagcgcaacaccacagctacccccaccatcatgaaacaaggaagacagaacctgtggtttgccaaccccgggggcagcaatagcatgccaagccgcacccacagctcagtccagaggacccgctcgctgcccgtgcacacttccccacagaacatgctgatgttccagcagccagaattccagcttcccgtgaccgaacctgacatcaacaacaggctggagtcgttgtgcctcagtatgaccgaacacgccctgggagacggggttgaccggacctccaccatctagaagctgaagacgagagtgaccgcgctggccgtgaaatcgactgctgcgggtccagtgtccgccatcttcagggttgcacagaatcctccaagatactttgcagccttttttccccctggtccctctcccgttttgattttgtgagagcgtaggtcatcctcgtaaacatatcagtagacctggggttggttattttgtcatttgtttctgtcatgggatggtttggtgtgtggggtggggaggggtctctagggaattatgagactgggaggggggtggagggaatgcaggtagctctctggatggaacggggacaggggaaagagtactgccatgaaagagataggagacacataagaggacagcagaagccctggccctggggaggcttctcggaaggcctggcttcacaggcaggccacagaaggatatcgcgggcacgtgcacccaaagcaagatagtggcttcccttttatatccaatctaatcctgattggatgtccctgaggcccctgctggaaacagccataggagagggcccatggcagtaggggaaagaaggaagaaattccctgcaacaaaacttcagctaaactttgatttgtgtattgtttacataataattttaaagggtacataatgtgtaaagagtttggatagaacctctcttcatactatggttttcgtaaaggatctgttgttgttacggattcattttttccctctatttttataagagcagcagagttgtcttctcaaaacggctgccaagctctgcttcttgggaagatggatgcagtcatgtaggcctgagctgtccgtctttcaccgttaggtgggaggagcgtatgggtggacttgaaggacatggacgtggctggaatgagcacagcattgggtgagcgcacaaggatgaggacatcatgtgatcagttatgggtttgctcgcagggcacccagagattctcaaagaatcctgcagcctctttctgtgctggatttgcttgtcacggagaggcctccctccctttccaccccacccatggggcattatcctgtcactcccagccttgctccacacacacacaggtgggtacaagttccactggaggagaaaaggcaaggatggactttttccccttgtgagaggtttgatacccagaaaatgagctcaaaacctttacattagggttgcttgtaggaactggagcctggaggctgcatctacttcacctgtcactgctgagggagaggaggggagaaaggcccagcaacagcgtacagaggggtcagtcagcaagtccagagagcacatgcagggagatgtttggcccacaccgcacagccccgccatctccagtgggcgatgaaagatgtaggaaaggttgatttcaagatggaaatgacagcgctatccgcacagtatgaattagggatttgctgtgttagttgatttatccatccacacagaggggaggaaaaagacactcgttacttggtgggagattgagaaactgtggtacctaccacaaagtaatagctctgtttatgaagggcaagaaaggctacatttcagaatttgacacagtggagggtattagaggaaatcaaagaggagttgtgtggaaaatcaggttgtgtaaatgaaggtatgaatgctcagccagaggcaagatcagggagatggtacaaggcctgtttgttacatggatgagtcgggtgcctggttgtgtgtgtgtgtgtgtgtgtgtgtgtgtgtgtgtgaagtcagagttgaaattcagaagatcagactatggaaatcactgcccttttttttttaaaagctaatgaactacatacagacctaaaaggccttaatgaaatccgaacaattttcttttactttcaagatcaaaaacatgcacccaacccagccttggatgccaccaccaggtttttgaagcccttttgagtctaagaaggtgagaacaatgtaaccatagaaagcctttcgtgagcagagaaggcttgaatccacaatttcattcgctgaattaaaaaaaaaaggttcagacctctccttgggtgactaagttctaaagatgcaaatccatgtgcagaaagagatggcattttttagttgattatttttaaccaagtgccattaacattcatcccccacatcccttttctaaacaagcttagtgttacttggggaatgtgttgggatggacgatcacatgtaaggcaggaagaataggtcaaaggttgaaggccaaaggtaagaccagagggtttgcgaatgtgggtttgtaggatactgagaaagtgaataaagaggagaaaaaaccatggtattacacatcttgctgagaaaggaaagcattcggatctgctgcaaaaacacatatatccataaagactcatgttattcagaaaacagattgtgaacacaatcacattcgcatgaatcctttaaaaggaagaagaccttaaagtatctgcaaatctgaatttctatttattccttcactgaatatagaaacaatggttatctgattattagagatattattttggatatgttacttattaacttgctatggctggtaaccatgataaagtctgttattaataacaacataattctttttttaaagaagaaaagcttatttttcattgacagtgtatagatttatctacttagttgtgttttgctattagtgttttaattttttttttaagttgagtgtttgataaattttaagaccctgtccccaccttgttttgagtcctgtgttgactacaggtatatagctcaatttaaaaatcctaaagcaaaagaattttatttataaaagaatcaaacagttgcatgcatgaggctgtgaagtcagatatttagtaataaaagcagcagtgcctttttttgtatttacccattgacccccaccaaatgcaactgttttatattaagaaaatagtaacaattttaaaatctcagagtaaaatctatttcactacatgcttttccccccttgttctgatttaagcagtgtgtacttggcatctctacattgtcctagggacagtggtgttctacaatattatcatgtatgatgttttattggtgctttttattcatagtggcttcttaccagaaacagtaggaagaaacacatgaactgtgtacaagacatgaaacattgctgctgatatgttgttttttcacatgcttttgagttttcactttttaaacgagagccagcaagcaaaatagatgtggctgggtctgcctgtccgggcggctctttgcaccgagctctcaaatcctgtgtattgagggttcctttttggtactcaggattggagctacagctgggcccccctctctcccattcgtttgaagagacactgagggaaacaagggtttcttttgaggtgtccttggctgccttttacgggatgggagccttctccggatcttttgttcttctgcacctcttgtagctactgccggtgcaaggttgtagatgttattccccaggagcctgggcttgggggctgagctgggctgaatgcaaaagcatgcaaccagaaggcgggcaaggggaggaaaagcaggcctggcctcattggtcccctggagatgtctgtagcagtcagctccagcttgggcctggggaagcagcctgaccaaggcgctcaggtgtgcctgttacaagaagaacctgcagaaggataatttgcacatggagctgtgataacactaatgttgattttttttttttttacaagtcatcagagatgtttgcaaagtgagttttatttttttgtaattcctttatctttacttaaaggtgaatgtgtattcctctgggaggaataggaagaaaacaggaatgttaataatgtcgaacagaaaacttcctcccttattaatatataatcctcatgtatttatgcctaatgtaagctgacttttaaaaagctttcttttgttgcatgccctgtgcaggcatctgtattgtacatgcatgcctttcgtcctgttttcctgtataaagttagtgaacaaagaaatatttttgcctagttcatgttgccaagcaatgcatattttttaaatttgtcatatatggaaagagcatgtttgttacatgtaaaagctttactgatatacagatatactaatgtttgaagatgctgttctttgcaagtgtacagttttcaaatgttgttaccagtgaaacacccttgtggtttaaacttgctacaatgtatttattattcatttcctcccatgtaactaagaatcatggctatatttcatatcaacgttatattgaaagtgaagggaaatgattaatacaaggttttgtaacactgaaaaaa

SEQ ID NO: 648 - DNA, 1736 bp, HOMO SAPIENS
cggcggcggcggcggcggtggtggctcgcgcagcttgttggctcgctatataaaggagagaagcgggcggaccggacggctggagctgcagccggtggcggcagcggcggcgcagggagcggtgaccggtggtggtttccctccttggcgcggggtggggagcgggcaacgccccccggacccctgaagggtcgtggctttttttttttttttaaggcgattctcgaggttttcagctgcgggaggagtgcccccctcctcctcctctctccgctctcccctactccttcaggattgattttgtttaaaattttttccccaatcttgcggtgatttgggtcaccctccgggtgttatagtttttttttttttggttttgtttttatcttgttttcttggggttgccccctcttgtttgtgttgtgtgtggaaatggcgaactcggcaaatacaaacaccgtgcctaaattatacagatctgtgattgaagatgtcattaatgatgtgagagacatctttctggatgatggagtggatgaacaagtactgatggaactaaaaactttatgggaaaacaaactaatgcagtccagggcagtagatggatttcattcagaagagcagcagcttctactgcaagttcaacagcagcatcaaccccagcagcagcagcatcaccaccatcaccatcatcagcaagctcagcctcagcagacagtacctcagcaagcgcagacccagcaggttcttattcctgcatcacagcaagccacagcaccacaagttattgttccagattctaagttgatacagcatatgaatgcatcaaacatgagtgctgctgctacagctgctaccttagcactccctgcaggtgtgactcctgttcagcagatattaacaaattcaggccagcttcttcaggtggtcagagcagccaatggtgcccaatatatctttcagcctcagcagtcagtggttctacaacaacaggttataccacaaatgcagcctggtggagtacaagctcctgttatacagcaggtgctggctcctcttcctggagggatttcaccacagacaggtgtcatcatccagcctcagcaaatcttatttacaggaaataagactcaagttatacctacgacagtggcagcacctacaccagcccaagcacagataactgcaactggccagcagcaaccgcaggcccagcctgctcaaacacaagctccattggtcttacaagttgatggaactggggatacatcatctgaagaagatgaagatgaagaagaagactatgatgatgatgaggaggaagacaaagagaaagatggagctgaagatgggcaggtggaagaagagcccctcaatagtgaagatgatgtgagtgatgaggaaggacaggaactctttgacacagaaaatgttgttgtatgccaatatgataagatacacagaagtaaaaacaaatggaaatttcatctcaaggatggcattatgaatcttaatggaagagattatatattttccaaagccattggagatgcagaatggtgaagagttgctttttttcttttataaataaaagaaacttaaaaaaaatgtaaagcggacagtttgaaacttggggcatatgccaaccaaaacttcgtttctgcatgtcagaaaagtgcagtagaagcaaagctactggaacaaagatagaccttgacaacatagacactacttac

SEQ ID NO: 649 - DNA, 8568 bp, HOMO SAPIENS
gcgccggggtcgccagctcctcgcccacctccctccctgtgggagaagaggaggaggggaagtgactgcggagttgatgaactttgcacatccagaaacgccattttgattccttttccggaacaagtttgcatctctcctcggtctctccctgaagcccaccggtccccaacgcatcatgccagggagccaagcgtcctgcccggccgttgctccgactgtgtgttccaggagtggtggctctgaggtgtgaccctgcccacgtttgggcccagccaggttcagccccccaataaggagggcagcttgataacacaaagaaaacagtgtcaacgagtactaccaagagaagaagacaagaggtcaacacagactcattttctactccgtgtgaatgatagctacagcaggggaaagtttcatagtctatcagtgggtcagaaaatggagttttatagcagaggcttcttagaagcttaaacccctgtcccaatgacgtcaagttcgcccgctggcttggaaggttcagacctatcttccatcaacaccatgatgtcggcggtcatgagtgtagggaaggtcacagagaatggcgggagcccccaggggatcaagtccccctcgaagcctccaggaccaaatcggattggcagaaggaaccaggaaacgaaagaggagaagtcttcctataactgccccctgtgtgagaagatttgcactacccagcaccagctgaccatgcacattcgccagcacaacacagacactggaggagccgaccactcatgcagcatctgcggaaagtcactgagctcggccagctccctcgatcgccacatgctggtgcactctggcgagaggccttacaagtgcactgtgtgtggccagtcatttaccaccaatgggaacatgcacagacatatgaagatccatgagaaggaccctaacagtgccacagccacagcccctccatctcctctgaaacgtaggcgattgtcctccaagaggaaactgagtcacgatgccgagtcagagagagaagacccagcaccagctaaaaagatggtagaagacgggcagtcaggtgacttggagaagaaagctgatgaagtctttcactgcccagtatgtttcaaggagtttgtttgcaagtatggactggagacccacatggagacccattcagataacccactaagatgtgacatttgttgtgtcacctttcgaacacatcgaggactgctgcgtcacaacgcgcttgtccacaaacaacttcccagggatgcaatgggcagacctttcatacagaacaacccttcaattcctgctggcttccacgacttaggattcacggacttctcctgtaggaagtttcctcgcatttctcaggcctggtgcgaaacaaacctgcggaggtgcatcagcgagcaacaccgttttgtctgcgacacctgtgacaaggcgttccccatgctctgctcactggctctgcacaagcagacccatgtggcggcagaccagggtcaagaaaagccgcaggccacgcccctgcctggtgacgccctggaccagaagggcttcctggccttgcttggcctgcagcacaccaaagacgtcaggcctgcccccgccgaggagcccctgccggatgacaaccaggcaattcagctccagacactcaagtgtcagctacctcaggaccccggctgcaccaacctgctgagcctgtcacctttcgaagctgcttccctaggcggttctctcacagttctccccgcgaccaaggacagcataaagcacctgtccctgcagcccttccagaagggcttcatcatccagcctgacagcagcattgtggtcaagcccatctctggcgagtcggccatcgagctggcagacatccagcaaattctgaagatggcagcctcggctccccctcagatcagtcttccgcccttctccaaggcccctgccgccccactgcaggcgatcttcaagcacatgccccctctgaagccaaagcccctggtcacaccacggacggtggtggccacctccacgcccccgcctctcatcaacgcccagcaggcttccccgggctgtatcagccccagcctgccgccaccgcccctgaagctcctcaaaggctcagtggaggcggcctccaacgcccacctgctgcagtccaagtccgggacccagccccacgcggccacgcggctctccctgcagcagccgcgggcggagctgccgggccagcctgagatgaagacgcagctggagcaggacagcatcatcgaggccctgctgccgctgagcatggaggccaagatcaagcaggagatcacagagggggaactcaaggccttcatgacagcgcccggcggcaagaagacgcccgccatgcgcaaggtgctctacccctgccgcttctgcaaccaggtgtttgccttctcgggggtcttgcgtgcccacgtgcgctcccacctgggcatctcgccataccagtgcaacatctgcgactacatcgccgccgacaaggccgcgctcatccgccacctgcgcacgcacagtggggagcggccctacatttgcaagatctgccactaccccttcactgtcaaagccaactgcgagcggcacctgcgcaagaagcacctcaaggccacccgcaaggatatcgagaagaacatcgagtatgtgagtagcagcgcggccgagctggtggacgccttctgcgccccggacaccgtgtgccggctgtgcggcgaggacctcaagcactatcgtgccctgcgcatccacatgcgcacgcactgcggccgcggcctgggcgggggccacaagggccgcaagcccttcgagtgcaaggagtgcagcgccgcgttcgcggccaagcgcaactgcatccaccacatcctcaagcagcacctgcacgtgcccgagcaggacatcgagagctacgtgctggccgccgacggcctgggccccgcagaggcgccggccgctgaggcgtcggggcgcggggaggacagtggctgcgctgcccttggtgactgcaagcccctcactgccttcctggaaccccagaacggctttcttcacaggggccccacccagcctccacctccccatgtctcgatcaagttggagcccgccagtagctttgcggtggacttcaatgagcccctggacttctcgcagaagggcctggccctggtccaagtgaagcaggaaaacatctcctttctgagcccttcttccctggtcccctatgactgctccatggagcccatcgacctgtccatccccaagaacttcaggaaaggggacaaggatttggccactcccagcgaagccaagaagcctgaggaggaggcggggagcagcgagcagccctctccctgcccagcacccggcccttctcttcctgtaactttggggcccagcggaatcctggaaagccccatggcccctgctccggcggccaccccggaacccccagcacagcccctgcagggccctgttcagctggcggtcccaatctactcctcagccctggtcagcagccctccactcgtgggcagctcagccctcctgagtggcacagccttgctgcgtccactgcggcccaagcccccgctgcttttgccaaagccccccgtgacagaagagctgcccccgctggcctccattgcccagatcatctcatctgtatcctcggcccccaccctgctgaaaaccaaggtggcggacccagggcccgcaagcactggcagtaacaccacggcttcagacagcttaggaggttctgtccccaaagccgccaccaccgccacccccgctgccaccaccagcccaaaagagtctagtgagcctcccgctccagccagcagcccagaggctgcctctcccaccgagcagggcccagcgggcacgtcgaagaagaggggccggaaaagggggatgaggagccgaccccgcgccaacagcggcggggtggacctggactccagcggggagtttgccagcatcgagaagatgctggccaccacagacaccaacaagttcagtccgtttctgcagacagcggaggacaacactcaggatgaggtggccggagcccctgccgaccaccatgggcccagtgatgaagagcagggcagtcccccagaagacaagctgctgagggccaagcggaactcgtacaccaactgcctgcagaagatcacctgtccccactgtccccgggttttcccttgggccagctccctacagaggcacatgctcacacacactgacagtcagtcggatgcggagactgcagccgccgcgggcgaagtgctagacctcacctcacgggacagagagcagccgtcggagggcgccactgagctccgccaggtcgcaggggatgcgcctgtggagcaggccacggcggaaacggcctcgccggtgcaccgggaagagcacgggcgtggggagagccatgagccggaggaggagcatggcactgaggagagcactggggacgccgacggcgcggaagaggacgcgtcgagcaaccagagcctggacctggacttcgccaccaagctcatggacttcaagctggcggagggcgacggcgaggcaggcgccgggggcgcggcctcgcaggagcagaagctcgcctgcgacacctgtgggaagagcttcaagttcctgggcaccctgagccgccaccggaaggcgcacggccgccaggagcccaaggacgagaagggagatggcgccagcactgcagaggaggggccccagcccgcccctgaacaggaggagaagccccccgagaccccggcagaggtggtggagtcggccccgggtgccggggaggccccggcggaaaagctcgcggaggagacggagggcccctccgacggggagagcgcggccgagaaaaggtcctcagagaagagcgacgatgacaagaaaccaaagacagactcccccaaaagcgtggccagcaaggcagacaagaggaagaaggtctgcagcgtgtgcaacaagcggttctggtcgctgcaggacctgacccggcacatgcgctcccacacaggggaaaggccatacaaatgtcagacctgcgagcgaaccttcaccttgaagcacagcctggttcgccaccagcggatccaccagaaagccaggcatgccaaacaccacgggaaggacagcgacaaggaagagcggggtgaggaggacagcgagaatgagtccacccacagcggcaacaacgccgtctcagagaacgaggctgagctggctcccaatgccagcaaccacatggctgtcacccggagccggaaggagggcttggccagtgccaccaaggactgcagccacagggaggagaaggtcacggcagggtggccgtctgagcctggccagggtgaccttaacccagagagcccggcggccctggggcaggacctgctggagccgcgcagcaagaggcctgcccacccaatcctggccacagctgatggcgcctcccagctcgtggggatggagtgacagcctcagtccccctcagcacagacaaaagccagcagagcaaagcgtctatacttcatggggtttcctcagtgccctttggctgttgaggagtgagagagagagagagagagagagagagagagagagagagagacaagcaggagcgtggctgctcgctcagtgccatagccttaccgcagcctgcgcgggaggccacagcccgtgccgattccagtgccttaactacttaccggatccctccatattatcatgggtgttgtatttttccaaaatgacttcttaaacaaaacaaatattataatgaattgtctggagaggacctcttcatttgagcattagcgttattttgtattggtgtgtgtgagcttgttcttgtgaatctgtgatagcaccgtttgttctgtgagctggaaacagaaggaaaaaacatacccttgggtacccatagccaataactggaagaaaatgatgtgaatttcatgtaaatgaccagaggaaagatggataagatgataatttcttaaatagacattttccttttttctttgtgcttcatggtggagctgtcatctggtccttggtattacaggatgtggttgatgaaggtttccaatatggtttcaggccaaaaccagggaagattctagcttcagcctcatgtccatttccagtctgtcagcattagacatggtcactgttcaagtttcaagacatccattcttaactatagagaagagttactcccctggcgtcttaacctatggaaaacatgcacggataggatatatttgattgcctcctcttccctttcagtatatgtattattaatattattattattattattattattagttcatcagtttgctgttctctgcagtgagcagaatcaaatgggcaatatttgtcctgggagacctgtgccgcacccaggtccccgtgttaacgtgtgcctgcggttgtggttggcaccctcgggtggtagctcttctactgtaatgagacaagcctttcttctgtcactgcagaatttagaaggggccgtgagcagtcttcccaagcatggtccaggagcagctcagagagggtggagtgaggatgcatgcatccagggaacaggcatcaagaagccagggccgtgcctggagcactgcagagatgactttggagaaagcaaagcagtgacccagtgaccaggcacattactcgtgagcgaggtattcccagtcttcctgctaagcctaatccaagccttacccagctgtgctactgtcatttgcaaagcaaggaaatactactactggtaataaaactacacatgcaagatgtcagataagaaataggtttatatttaccttcctgcgatgtggggttggtgcttgaagataaatgtgctgtttctagtttcttaaatagcccacacccctggatgcaaaaaggcagggttatttttacccatgagcatcctgtgcaggcaatagacttccctcactgtctccgcctgcagggaggagaatgtaccccactgcacctgagctcctggtccctcagccaagacctcaggggtccccagccagcctgctgctggggacccctgtgcttgctgcagtgtatggagcctcttgccttcccctggggaggcacccctgtaccccagcttccttcccctggccttttctggccccagtgctcctcctttacatagacttgttcacacagaaacgtgcacgcccccttttctccgccacttcaccagtttctgaaatccaacctcccagacttcacaggaagatagatattcttgagataatgaaaagtgatatcttcgcatacgaaaggaaaaaaggttgaggtatatatgatttttaactgtattaggggtgtatgaaccagtttaaaaacgaggttttatttactgtagagatgaatgcaaatcagaaccaatgatcccttggcctacttagttaaaaccagttcatacatcccttagggtttttattattattattattattattacagttgttattgttgtttttgttgttattattatttggggtttcttgtgttttttctttgcgactctccacactaaacttgcaatattgtggggagaagctgtgactaaactctacgctgcggtgagatgtagcagtaatcagctcccagcgacgtgtgtagctggggctgccgctcgcaataatcactattgatttaaagctttacttagccttgatctgtaccctcgtagtcaataaggtcttgccacattttattagtgaggtggagaaacgtattatttgtttgttgtttttgcccttcccccaccccccaatattaaactgtgaaatttgtgatttgtttaaactctgggtgaatcatagcttagtttgcatgtccagctaatttgtttctatacattttgtttgattctctttctccttctctcagggcttttacaaaaaaatatatatatatggatcttctgaaaagttttttgaggtgcaagttttttctcttttttttttttttttttttttctcattgattaatggacatgatgctgagattcaatcactacatgaaacacctggctgtgaaaacaaaacaacccagagggctgtgttccaagcagcgctggggaagctacgtaacagtcggatgccagttttggaagattcaccatgcgttctgaccctctgttcgtctctttcctctcctctttcttcaagaaggaaattgatcctagtgatttcagcccatgcattaaacaggaaacaataataaatttgtagaattcatatttttctaaagggaacttaaaaactgctgctacatgttatgtacaaaactggtttatgccacatgaacagagaatcacaagtttggttttggtactttttgttcctctttgtattcagttgtatagaacttccaaattcagaatgagaagaaagctgttctgtatcaaaccatttaagcaataaatgttatattttaaaagctgca

SEQ ID NO: 650 - DNA, 1736 bp, HOMO SAPIENS
agggacttcagagctgggcctgcgcctgcggggccgtacgagttggcccggagcaaggcggcccaggacaggcaggggctgcacgcggtgaagaaaccaagacgcagagaggccaagccccttgccttgggtcacacagccaaaggaggcagagccagaactcacaaccagatccagaggcaacagggacatggccacctgggacgaaaaggcagtcacccgcagggccaaggtggctcccgctgagaggatgagcaagttcttaaggcacttcacggtcgtgggagacgactaccatgcctggaacatcaactacaagaaatgggagaatgaagaggaggaggaggaggaggagcagccaccacccacaccagtctcaggcgaggaaggcagagctgcagcccctgacgttgcccctgcccctggccccgcacccagggccccccttgacttcaggggcatgttgaggaaactgttcagctcccacaggtttcaggtcatcatcatctgcttggtggttctggatgccctcctggtgcttgctgagctcatcctggacctgaagatcatccagcccgacaagaataactatgctgccatggtattccactacatgagcatcaccatcttggtcttttttatgatggagatcatctttaaattatttgtcttccgcctggagttctttcaccacaagtttgagatcctggatgccgtcgtggtggtggtctcattcatcctcgacattgtcctcctgttccaggagcaccagtttgaggctctgggcctgctgattctgctccggctgtggcgggtggcccggatcatcaatgggattatcatctcagttaagacacgttcagaacggcaactcttaaggttaaaacagatgaatgtacaattggccgccaagattcaacaccttgagttcagctgctctgagaaggaacaagaaattgaaagacttaacaaactattgcgacagcatggacttcttggtgaagtgaactagacccggaccagctcccctcaaaaagaagacactgtctcatgggcctgtgctgtcacgagaggaacagctgcccctcctgggccgcttggtgagaggtttggtttgatacctctgcctccctcctgccagcatggattctgggtggacacagccttgtggaaggtccagtaccaccaagagctgcccatccactcccaccccacactgtatcaaatgtatcacattttctcatgttgaacactttagccttaattgaaaatgagcaacaaagctggacaattgctagttgtatataaaatttaatctcaccgaatgtacagttttcaaatttcacgtgtatattaaggaactgatgcatctgagcattctgaaagaaagaaaaagaagctactttagctgccaccccattctagaaaagtctcttattttcaagctgttctaaatagcttcgtctcagtttccccaaaaggggtacccaggcccctcctctgtgtgccccagctgcatcagccagcttctaggtggctccattgttttctgccacctgacaacatttttcctcaattactgtacaactactgtataaaataaaacaactactgtataaaataaactctctcttttccctggaccctcctactgtattctttcctctgtggcacccataccagcctgccagtcggagagcaagctagctacagtgcctggtgcagaaatggcaatt

SEQ ID NO: 651 - DNA, 496 bp, HOMO SAPIENS
ctcgcttttcggttgccgttgtcttttttccttgactcggaaatgtccggtcgtggtaagcagggtggcaaggcgcgcgccaaggctaagtcgcgctcgtcgcgcgcggggctgcagttccccgtgggccgcgtgcaccggttgctccgcaagggcaactattcggagcgcgtgggcgccggcgccccggtctatctggccgcggtgctcgagtacttgactgccgagatcctggagcttgccggcaacgcggcgcgcgacaacaagaagacgcgcatcatcccgcgccacctgcagctggccatccgcaacgacgaggagctcaacaagctgctgggccgcgtgaccatcgcgcagggtggcgtcctgcccaacatccaggccgtactgctgcccaagaagacggagagccaccacaaggccaagggcaagtgaggccgcccgccgcccccggggcccctttgatggacataaaggctcttttcagagccaccta

SEQ ID NO: 652 - DNA, 7166 bp, HOMO SAPIENS
gggaggagatccgctcacacacacgaggaggagggttgagctgccgccgccgccgcctctgtcgtcgtcgcgagtgtggagtcgggactggagctgctgccgcggcgacgccggggatctttgtcgctagctcccggcccttctgccccgccgccttccctcagtcagcgttgcccactcctctccggccgggcgcccctgcctccatttcccgctctctgtccaccacacacacggcccccccgatcatggatccgggcagtggcggcggcggcggcggcggcggcggcggcgggagcagcagcggcagcagcagcagcgactcggcgcctgactgctgggaccaggcggacatggaagcccccgggccgggcccttgcggcggcggcggctccctggcggcggcggccgaggcccagcgggagaacctcagcgcggccttcagccggcaactcaacgtcaacgccaagcccttcgtgcccaacgtccacgccgccgagttcgtgccgtccttcctgcggggcccggcagcgccgccacccccagctggcggcgccgccaataaccacggagccggcagcggcgcgggaggccgtgcggcacctgtggaatcctctcaagaggaacagtcattgtgtgaaggttcaaattcagctgttagcatggaactttcagaacctattgaaaatggagagacagaaatgtctccagaagaatcatgggagcacaaagaagaaataagtgaagcagagccagggggtggttccttgggagatggaaggccgccagaggaaagtgcccatgaaatgatggaggaggaagaggaaatcccaaaacctaagtctgtggttgcaccgccaggtgctcctaagaaagagcatgtaaatgtagtattcattgggcacgtagatgctggcaagtcaaccattggaggacaaataatgtatttgactggaatggttgacaaaaggacgcttgaaaagtatgaaagagaagctaaagagaaaaacagagaaacttggtacttgtcttgggccttagacacaaatcaggaagaacgagacaagggtaaaacagtagaagtgggtcgtgcctattttgaaaccgaaaagaagcatttcacaattctagatgcccctggccacaagagttttgtcccaaatatgattggtggtgcctctcaagctgatttggctgtgctggtaatctcagccaggaaaggagagtttgaaactggatttgaaaaaggaggacagacaagagaacatgcaatgttggcaaagacagcaggtgtaaaacacctaattgtgctaattaataagatggatgatccaacagtaaattggagcaatgagagatatgaagaatgtaaggagaaactagtgccatttttgaaaaaagttggcttcaatcccaaaaaggacattcactttatgccctgctcaggacttactggagcaaatctcaaagagcagtcggatttctgtccttggtacattggattaccgtttattccatatctggataatttgccgaacttcaatagatcagttgatggaccaatcaggctgccaattgtggataagtacaaggatatgggcactgtggtcctgggaaagctggaatcaggatctatttgtaaaggccagcagcttgtgatgatgccaaacaagcacaacgtggaagttcttggaatactttccgatgatgtagagactgataccgtagccccaggtgaaaacctcaaaatcagactgaaaggaattgaagaagaggagattcttccagggtttatactttgtgatcctaataatctttgtcattctggacgcacatttgatgcccagatagtgattatagagcacaaatccatcatctgcccaggctataatgcggtgctgcatattcatacctgtattgaggaggtggaaataacagccttaatctgcttggtagacaaaaaatcaggagaaaaaagtaagacccgaccccgttttgtcaaacaagatcaagtatgcattgctcgcttaaggacagcaggaaccatctgccttgagacctttaaagacttccctcagatgggtcgtttcaccttaagagatgagggtaagaccattgcaattggaaaagttctgaaactggttccagagaaagactaagcattttcttgatgaccctgcacaatactgtgaggaaaattgactgcagaagcctacttcacaccgccttctcttattttctgcccattgataaacctctccccatattttgcaaagaggaaattcacagcaaaagtccacattatgtcagctttctcatattgagagctctgctatgccactgttgaatttttcccaagattcctgtccctagccctcacttcaaactctgcttccttggacagatttggcaatagctttgtaagtgatgtggacataattgcctacaataatgaaaacctacaggaatttttttatttttcattttccccttaggcatatttagtatttttcccccaggcagatcattctgagtgtgcgagtgtgtgtgcacatgttacaaaggcaactaccatgttaataaaatattcaatttgaaatccttttcggtatttgaattgcttttgaataatgttttttatctggatgtaacattgttgcattagctttttaactttcccaagtaattgaatacattttattacttggacttttataaactctttccctacccactataaatgagacattcacagcgttcaagtttgtattaaaggaaaggattagtttgaccccttcttttgatggttaatgcatacatgcagttaaatccctttatgcaaatgtgacactgctttactaggtcttttagttatttatttattttttttttttttgccaatttatattgtaacatgatttcttgaacacagtaagttgttttaaaataaaagaacagcatactgtagtttttataagtaaagcgtaatgaaattgtacccctagagaaaattccattaacttgttaaattagtggaattaacaacaaataaagcatgtttgagacctggcaaaaattcctctggtagtatttataaatagagctgcatgcctctagtatgaaaaccgtatcagttgcaagtgccacttctacaagttactcagtttactctttgtatcagtaactttaaaggttggatgatccttgctggttaaagctaaatctcaacctagcaactaaatgaaaatatttagaatcatcagaatctgaacagactaaaattatcagcgataagcagaatcaagcagggtataagttttatctcaattatttgaaattgactgagttttcttaagtgtaaagctgaaatttgctaaccatgtttttgatgaaccacagtgcagcattgtgtgggttttagattgaatgactctctgctataattatcatgactttgaaatttttcatgagaataaatgaggaatggaggcaatttgtgggtttatccaaagcccccttgatgttgagtgttgccattgatcaaagatagcctcttttagattgtgatttctctctaaataagatactttgtatatttaatgacaagtctcttccctataattttgctcctcagaaaagaaaagcctagacagactgtatttccagtcacagaacataaaacttaatctaatgggtgttttgttttgttttgagacagaggctcactctgtcacctaggctggagtgcagtggctcgatctcagctcactgcagcctccacctcccggattcaagcaatttcctgcctcagcctcttgagtagctgggattacaggagccctccacgaggcccagttaatttttgtatctttagtggagacgaggtttccccctattggtcaggctggtctcaaacttctgacctcaagtgatccactcgcctcagcctctcaaaagtgctgggattacaggcatgaggcgccgcacttggcctagtgttttcttaactgtgaaattcccattcatttcttgaatgaggctacatcttatggacagagcaaagttattgtcctacagattcttaaaactataattatggctattgcatgaaatttaaatagattttattatgtctgcaaatctctgggcttttatttttctggaaaatataggagctttaatcaaaacataatagttctttttgtaattccatgttaataaaaacaaatactagcaattgcttgaattttaatgaatatttaaaagttcaagagccacggaaatcacttccagagataagagttccctttctaaatagaacacatttttaaaaaataagttatgtttgctactaaaacatttacactgttagactattatgtgcatgttgccaagactcttaagtaacttggatatcaactgtgaagggcctacctctaaaaagtaacaggtcatacaaatacaaatgtaactgtaaaaattccactggattcttgcatatttgcaagattagattattcaaaagaaatttcagtgctaaaattaaccagcaacataagttctatgggctttgaaaattgttctcatctttttaaagttgatgcattttcaatcctgcttacacaggctgttcatttggataagtaaataaaatgtctaaggtgaacttggcattatgtggagatgttggaccgttatagagcaatacaaattcctatgctgtcattctgttttctgcaaatgcaaacgtgcttatatggtcaacagtgcaaaaatagggtagttggctgcatatttagggtattacctaagcatttgttctctaacgttgctctactagaatgatttttttcttgcatcttttcacattaatgatgttctttatataactttcatgcgattatttagttttttaaattaataaagtgaatttaagaaatattgaaataaacatctaagtaattgccattttaaacccttgtttcttactgtgggagagggggaaatacagcactcatttcttgtttttaatttgcagaagtaagtgaaaatctatgtaaaatcaaaccaaaagagttggactgagtgtgtattgtcttgagattaagtgacaaatagtaaagtgttactgagtaattaagcccatgtattttttttttgtgagttgaaaatctttgaaatatgtgataaccgaatgtcaaaagttcctaaactctaacagtgcaggttgttcactgtaacgaggtaactcatatttgctggttacataaactacaagtactgctctcacaatatgggactttgaactgtgatgtagttcaacagttgccggcatcctctcagctgatacgctgcgaatattttgggttagacttgcagccagatgcagttttgcaacccaagaaaaaagttgaacctatgatcaaaaactgctcccaagatgaacctggaaaaaaatcagctaagctcccttggcgatctgcaggaacactagtaatgactggaattactccgtgatctttgatgactattacacataacagcactctagcaccttttcttactggcatggacttcctcatggactgctacttcatggatgatagcttcattgctttgggtagggatttaaggtagtcaaggggaaaatacgcagttttattacaggtcttaacatcaggcaactttcaactttaaaaccctttgtgaaaaatgtggttatagcactatagctctgattttaggatggttaaatgttatattcattgttggcttaccttatcaaactgtgccattaatcctttcacagacataggtaaggaagagaacaaccagtggattcaggggacaattatctatctccaaataataggcttttatttcttgcagctaactttttcagtgattctagcagatgccatctagtacatccttgatcttgtttctttcgtgagagatctcgccatggcagcatcttgttaagtaagtgtaattgcacatgcacaaaagacttaactagctttacatttagcagtcagttggttagattaggtttcatagtaaatgaataggaatagaaagaataggaagtgtttttattttccagtagtaattccgtggattccatttgacccagtttactatcagttcagttcaggtagatttggttcaacttttggtggtttttggctctaggatattcttgactttaatatcctagaacttactgagtcttcccttcaataaatacacttctcacatacctctaatcctatgcttccttgaaacaataatgctagctgagttgtttactaaggattattataagggcctgaaggtgtgggagtggagattaattaaaacctttatgttctccaatataagggaaaagcaggttggtactacttctgattaggcagaaaacaccaggattccttaagtgatccttgaaatggttattgttttctgccttgtcacatttgccactgtgccctttaaaacgatgtggaaacctcaggtttgtggacagcacaggtggaatgacatcttgtgcttcctgaggctcccctctaccaggcacattagcttagtgcttcagatgtcagcccaagtccttgttacctccttttcctgctgcccagggaagagtgtgtgtgctggagctggagcgcttgcactcttcaggtgactattctcacctccatttcctccacatgcattaggtgaaactgaggtctaagcctcctgcaaggtctacattttaaggactcacacatcaggctctcagaaatgtacacaggtattagttctgtttgttctaaaggaaatgtgggtatctctcaggccaggacttagtgactagttttcgctagacagcaggttaatacctagatctcatttaaaaaaaaaaaaaaaaaacaggattaaagggaactgatcaggtttgttgagttttttagcctaattccaaagcatggaagagtgctctaggtaggaaagaaagctttttcttacgatttgtagctacctactgtgcctgacttggtgcctgtgtgaggattaagcccttagtctgctcttgcaattattcaaatgacaaattaaatttgcttttgtaataacaataaaagttgtcatcttcccttttgaaaaaaaaaaaaaaaaaa

SEQ ID NO: 653 - DNA, 373 bp, HOMO SAPIENS
ggactttgatgttgctactgacctcagcatgccccagtccaaacctaccttcttcctcctgggcccacatccgcttctgctccccacttccccagtgtcttcattcttttcatcacatgctgaccaaagactcatctttaggcactctctatgtcccttctgctacatccactctgttgccacatctcctgaattcttctgtctgatttcttctcactcttcctttccaccctggatcagtccattggggccgcatgtcaggacaccggatgacactgtttggacacctggaaggatcgggtaaaagatacagagaagtctaaggagggatagggtgagtctgggatgggctgtggattaggcaccaggtaaa

SEQ ID NO: 654 - DNA, 12152 bp, HOMO SAPIENS
aagcctggcagaggcgcgaggccctcctcccgcctctccgcctactccagcctccgccgcctcagcttcccgagcgagccctgcggccgccggagcagctcccgcggcggagcaggagccggatggtcagaggagcccggcagccccagcagccgcggagtcgcctggcccccagactgactggcacagtggagaaaccgcctcgaaaacggagaagcaggactgaatttgctcttaaagaaatcatgtcctctggaggtgctgaagatgatatcccacagggagagaggaaaacagttacagatttttgttatcttctggataaatctaagcaactgttcaatgggttaagagatttgccacaatatggacagaagcagtggcagtcctattttggaagaacttttgatgtttacaccaaactctggaagttccagcagcagcatcgacaagtcttggataatcggtatggcttgaagcgctggcaaataggagaaattgcttccaagattgggcagctatactatcattattacttacgcacatcggaaaccagctatctgaatgaggctttttccttctattctgcaatcagacagagatcatattattctcaagtcaataaagaggacagacctgaattggtagttaagaagttacgatattatgcaagatttatagtagtttgtcttcttctcaacaaaatggatgttgtaaaggatctggtaaaggaattgtcagatgaaattgaagattatactcaccgatttaatactgaagatcaagtggaatggaacttggtgcttcaagaagtagcagctttcattgaggcggatcctgtaatggtattaaatgatgataataccattgttatcacatcgaatcgccttgctgaaacaggagccccattgctggaacagggcatgattgtgggacagttgtctctggctgacgcactcattattggtaattgtaataatcaggttaagttcagtgaactaactgttgacatgttccggatgttacaagctctggaaagggagccaatgaatttagcttcccagatgaataaaccaggaatgcaggaatcagctgacaagcctactagacgagaaaacccccacaagtatctgctctacaaaccaaccttcagccagctatataccttcttagcagcgtcttttaaggagctgcctgccaatagcgtgcttctgatttacctgtcggccactggcgttttccccacaggtcgttctgatagtgaaggtccttatgattttggaggtgtacttactaatagtaaccgggatattattaatggagatgccatccacaaacgaaatcagtcccacaaggaaatgcactgccttcatcccggggatctctatcctttcaccaggaagccactgttcatcattgtggattcgtctaatagtgttgcgtataagaatttcacaaacttgtttggacagccactagtctgcttgctttctcctacagcatatccaaaagctttacaagatcaatctcagcgaggtagcctcttcactctctttttgaacaatcctctaatggccttcctatttgtctctggattgtcaagcatgcgcagaggcctatgggaaaagtgtcaagaatatcttcgaaaaatcaaccgtgatattgcccagctactgactcattcacgttcaatagatcaggcatttctccagttttttggagatgaatttcttcgcttgctcctcacaagatttatcttttgttcagccaccatgaggatgcacaagatttttcgggaaacacgaaattatccagaatcatatccacaactgccaagggatgaaacagtggagaatcctcatctccagaagcacattttggaattagcatccattctggatgttcgaaacgtgttctttgagaataccattgatgactattaaaacaaaaaccctgttgtcgaaacaagttttcattttccacaaattttaaatggtgcagttttctaacgtgataagacacatagtggtgttacttagtttttattttttaatttagggccaccattttaaaaacaaacaaaaaaatgttcacacttttagggtaactgttttaaaatgcaacctttcaggtcttttaaaatcttaaccttggaatttttattttttgattttgagggatggatatttacctccaacttctaatcctacactcaaatagtcactattctcaccctgagaagagtaaatcatttatttttgtataatgaggtaaatccaactcttatacttggacctaagttaaatgtctggatttggaaatatgtaatggttcataatgatgaagctagccaccatggactactgaaaatcaagaacagagtccctccataatatattttttctcattccaacttagctggtagaaaaatgtttgatcctttgaaacatgatcaagccagttttttgaaatcatttaatttctttcaatactgtcataatttcagaaattggattgaattgcatctgaaagctacatcttgattgaggacttgaggtggtaatattacttggaatgtatgagtattatgagatttatttgcatattttctttgtagtctgtgaatgctggaaatgaaaaaggaaacaactttgaaatattttagtcaaaaaaccatgtcattggtttcataatacaatgtctccaataggaattctatttaaactcttggtttatgagatcacatttaaagactggattgatgtctgtgacataaagttttaattttttgcctcattcaaatttatgagacttcaaagtcatagatgttttaaattttggtaaggggtaactgggtgttatgaaacctaaaatgtaagttgattttgcattggtaatttggaaataagatttattaacattccctgtatttagtattttatattcatgcacaaaatttttattatcttaaataggactcagtgtatattataaagatttttcttttttgtgttttccttccctgtcattccctttataatttcacagtcacttgctatgaagtcctccctcctttttgattatgcagcattcaatttcagaaatctatgaatgagaaggccttatacctaattttctgtacaggatcacatctggcagtcccaggagaagtgagctgattgcttttgatatctctttcccatggccctaggtaaattatactctaaatttatttattttttttgaaacagagtcttgcttttgttgcccaggttggagtgcagtggggctatctcggctcactgcaacctccgcctcccaggttcaagcaattttcctgcctcagcctcccgagtagctgggattacaggtgcccgccaccatgcctggctaatttttgtatttttagtagagacggggtttcaccatgttggtcaggctggtctcaaactcctgaccttgtgatctgcctgcctcagcctcccaaagtgctgggattacaggcgtgagccaccgcacctggctattatttttaacttggttttcatttctggcatagagactaatttgggtctaagttattcccattcctgctttgatttgctgatttttcaaacctgaagtccaaagttactgtttttggggtttggggacttggggagtattttacttttttttttttttttttttaagagacagagtcttgctttgttgcccaggttggggtgcagcggtacattcatggctcactgcagcctcaaattcctggattcaggcaatcttctcacctcagcctcccaagtagctgggactacaggcatgcgccaccatgcctggctaattttctttattttttaattttttgtagagacatggtctcactttgttgagcaggctggcctcaaactcctgggctcaagtgatcctcctgcctcaacctcccaaagtgctaggattacaggtgtgagccactgtacctggcctgtttactttttaaaaatttttttgtttgttctttcaaacagtatttcagaaagcttgggaaaagttaccctggaaagatttcctttgctagtgggttttcattttcaggtaaagactgctttccttttttttcagtatcttaataaacttcatagctttcctttagtaacagtgttcattgaactacagcaatagactatcttcggttttctgacctcttgtttcaattccccttaagtcctgtgccagttatgctcctaccaacacagagtttcctgtcctctaatgtttaaaatagtatttactgttctgagctttatcctcccccgttaagcataaagaacactggtctgagaactaggagacctaagttctagtcctggctttcctggtaacttaagcgttatgccctttgacaactgtcttcatgtctctgcttgttagcactctcatctgtaaaatgaagaggttggcccaggtcttctccaactctgattctgtaatttggactcttggttccaaaaatattgatttccccactccaaccaccaagagaactatttaccctgtttgtagtgtacacaaccttttcttttgtaagtcatatttacctagattttgttcaagaaaatctgggtcccacttagctgttttagaaactagtacagacagagactctcctgaggaaattagagcttttatgattagaaacatgcttgtctaaaaatgagggtcttagaaatcacaacattgacccttatgatgttgccccttaagctaatagtgtaattccttactggtagttaaaaatctaaagtggactgaagtgatcttgaatcttcaaagagaggaaaactgtgctggaaaatgttattgtttcattgatgccttcaaaaaaatgcgtattaaacaaagactatactccagattttcttctgggcattggggaagcaaacaaaatagacttaaaaatcctcatgttcatgaagcttacattctagtagaaggagtaaggcaataaacataagtaatttatgttagaaaatgttaagtaggatggaaaagtgtagattatggtaaggtaaatcttttgtttgttttcttaagagaagaacaatgtttaaaagagtgatcaagcagggcatggtggcatgaccctattagtcccagctacctgggaggccgaggtgggagggtcacttgagcccaggagtttgtggctgcagtgagctgtgattgcaccactgcactccagcctggatggcaaagcaagacctcgtctctggaaaaaaagaaaagaaaaagtgatgatcagggtaggcttcattaggaaggtcacatttgcatgaacactttgccttttctttctttttatgaaagttttaaacatagtttttttgttttttgtttttgagacggagtttcactcttgttactcaggctgcagtgtggtggcaggatctcagctcactgcaacctccaccttccagtttcaagtgattctcctgcctcagcctccccagtagctgggattacaggcatgtgccaccacacccagctaattttgtgttttgagatggggtttcaccatgttggtcaggctggtctcgaactcctgatttgaggtgatccgttggcctcggcctcccaaagtgctgggattacaggcatgagccaccacgcccagcctaaacatacagtttaataaatcctccttgtaccttacccagcttctgtatttctttaatcaagggagaagaattatctaaaaggacagttgcccaatgggcttgagctgatgatagtggcaaagaatttcattttttaaaaatgcataccacctgccctttataaaaaaatttaaaccctaatgtatttaattttataattcataaaaatttaaatattggaactaagaacagagcaaagcaaagggaaaaagcactcctttgttttcaaattgcacaaactgtccctggagattctgatagtctctcatctctcttaactatcactgtaaacaacatagaaagcataagactgcaagaagtcagttatacacaaaacaaaatgaagcacagtggaattttctctttctttatctgtatatttctgaagttggtaaagcaactatcttctctattttacagaagagaaagctgagacccaaaaagctattcatagtgatagagctagaactaaaactcagatctcctcatctcagcccagtcttctcagtagctcagactgctttctataatgaacaagaaagaataattagggatttgtattttggcacaaaacagtatcaaatttttattgtaaaaatccacaaatctgacattttatcttttattctagccaggatgtattcttcatttgcatgtgtgtgtttctcttagaaagtggtgctctcaaacctttcaaagcacagaatttattgtaccctctttatttttaccaaattgaaacgtttcaggatttcagaagcaaagtgcaatccaattgtggctggagttttcctgatagaggatccgggtggttccctcccctccaacttctggctactgccctttatttcctttgtgcaatagaattccctgaaacagattatgtcgtaattatactgatttagtcaggataatgggaaaagcgacaaatcggatttatgtattaggtattatggagctttctttagcactctcctccaagtttaatctctgacatgtgtgatatagtaactttctgtctctgagaagcagtttggacccagctgaaaaattttatttatggagacttgtaatcagcctgatatacagagaacactctggactggaaatatagtcaggtaccaaggtctgctaatttggccattgccagtgattcaaaaccacctccccaccctgagtaaaagatttgatatgaatatgaatgctatgagtctcctggtgatgttttgggtgtatatgttcctgtgtgtgtttggaaatcatagagggtatttaccttgagggctcttttgttgaccttatttatttgaaattcttattttatttgtaatggcatatgtatatttttgtgatgctacatgcaatctctgtgtatactttttgtatatatgtatacatatttgtaaatatattggtatgcagtgatacagtatgtgtatattatgtacccatacccattgtgggctgaatttatttaagttctgtgaggacatcctagtggcattgttcatgctgctgtaattaggttgtggctgtatctcattcataagcctctattttgagaggcttgtgtttggataaaatgggctaatttggagttgaaattaggatatgaagatcttaacagaaagctagatatttattcttagctttaaaatcacctgcaaatttttatttaaactgatgataaattagtgatataacctgaaaaacctaagtatgtgaaactgagacaccagcagattcttaggctgtagtagtcctttattttcttgatccatatttaagtattattactgagtagtaaattatgtatattggggcttaatagagaggctgtggaaaaaaattgctttaatcacatttaaaaacataggaaaatgtccattaaataggggaaatatattcccagttgtcatttttatgcctcatactgaattttgattttggaacaattcttttttcatcagtgttttatgtgtctctatgaggcagaaaagggggcattagctaagggatggcctaacctaagtaggataggatttagtgaggaacgggaggttgttaatttgtatatttgcagcagctatgattaatttagtcctgtcttggcatttccggctacagattttttcttactggacttgcatatcaaaggtgagtaggctcatctgagaaaatgcttccactgaataaaatgccttcactcgtattgctgtgtctctatgagaccacttgtgttctgcaagttgatgatatattcgcacatgaagtagagtttttaatattagatgcatggtgtgctataaaaatctgggccttcaaacctctcccaaggatgatagggttggggaggataagaggatagtaaatacgtgcaatgccaatttgtgaacctatagaatgttgccaagtatcaatgtttggttacttcagttgacatatttatttgcatgaaagagtgtaggagatgtttaatatacacttaaatacattcactgcagaaattaagtagaggttatttttgcatgataaaatataactgcaaagcaactttttacaccgtattctttggaagattaaatctatctgatccaatattatcttaaaatagagaaattatctcaggagtctgttttaccacccaaaaaaatgttacatttgctgattcattatattttaaataaaacagccaactattcataagacttttcaattatagtattaaattcagaaataattataacagcatttttcttgaataaatattaaaatttggtaatttattatttctgaaaaatcagtgaaaacatccataggatctgatggtttgttgtttgaataaccaaatcattgtttttgcactggagagtagtagagcagatattataccatttaaaattcatggaactgactcaggctccttgtggatattaatttgaggacagtagtggtaatcaaaagtacagtagaaaacacttgacattgtgaatgtgacctctgaccccaaccgttgtaaagccaataactttgagggtgaataaggtaacacttgcttagaaaacccagccctttcccccagtctcctgcgctcttatacattgatactttacaactatttttgctgtacctctcagtctttcctggataatgggaccacttaaaaaaaaaagtgattcatcttcctcaaactagaatttcaaagcctaatactacactatgttccagcttcactgagttttgaacaaaaagacttaagcatgccttgtgtttaaggaaaaataattgatgtgtgaatggaatcaatcacctattgacgggaagggtgtcaggatgatgtagggtgatatgcctttaattggataaagagaactgtattaagtataactaatttaataactgattgaagcaccattcttaattttaaaatatttttgttaatttcttttgtggttttaaaaattaataatttttttttttttgagatggagttttgctcgttgcccaggctggaatgcaatggcgcgatctcagctcactgcaacctccgcctcctgggttcaagagattctcctgcctcagcctcccaagtagctgggattacaggcgtgtgccaccacgaccagctaattttgtatttttagtagagatggggtttcaccatgttggccaggttggtctcgaactcctgacctcaagtgatccacccgcctcggcctcccaaagtgctgggattacaggtgtgagccactgtggccggcctaaaaaaaattctttttaatagttatcagactactttaaccagtgccatgtttaaacatacttggacaatagactcagtttttttaatagtttgaagtacattatattaaaactacaaactcacttattcaagcctaaatttcatcatagactataaattgggtatcaatttcctattttggtggacaattccagtctgtctactacgacaatcatctttttaggtgtaatattgtttaagacataggtaattttaggttttatacttttctcctaggcttatggaatgaaagctaataggatatcactttcagaatgaaatagggaattatggctagccttcttatagggctgccgtaaatgatacttaaatgtttgttatatcactgattttcttttctcttctgaagctgttgtgaatgtccactttgccatgattaaaagttgagatttgtaaacattacaatttgaaccataaattttctcaaacatgaaatcagtatgaataagtataaaatttgaaatgatcatacatgagaatcccaaaagtaaatacttccaaaccatagagggataaccactgtatttttaaaaagcttatttccacccttaaagaagcatgctactaattgctttttttctaaattaaaactatgtactgtggtaaattaaaaatctgcaggaaaaattgcttagtgttttagcacaataagaatttttattactcaggagttggagaccagtctgggcaatacagtgaaaccctgtcgctactaaaatacaaaaaaaaaaaaaaaaaaaaaaaaattagccaggcatggtggtgtgcgcctgtaatcccagctacttgggaggctgaggcaggagaactgcttgtaacctgggaggcggaggttgcagtgagccgagatcgtgccattgcactccagtctgggtgacagagcaagactcattctcaaaaaaaaaaaaaaaaggaatttttattactatttcctgaagaatggtttttgttaacttgttactgtatcattaaaaagaccttctaatggttcagtacaataatctagaacttgatttatgtggctttttatagttatctgaatgcattccttttgccacatagaccatatggctagttctccaacttttttgcttatttttaataaaccttgctgttcaacaatcagagaaacctttagattttggatgattcttccagttgaggtagaaacatcttagataataggaaaggcaaatacaaagtcctaacattttcatagtagagtttacaagtaaaataacttatccatataggttatcttcgttgtgtagcaccagtataaatagtgatttcattaatcattgaatcagatgaagcagttataaatcactttttactttgtgctaagaattattgtaatttcaggacactttattatttcctctgagcagtttccattggaaggttgagtttcccttttttaagttctaatcatcactaaaggttaagataatcaaataggagttaaaataagttatgtttgatctttttcccttgaaaataatgctgaacttattgtctacattctgattattaggcagaaatgcacttgtttaaatcatagaagtaattcatttggaggatataattactcgattttctagtggtgtgaaatactttttaacaattgtgcttgtctgtaactgaaatgttatagaattttaacactatagggattatagagttatattagctctcctcaagagactgaagcacaatatttttcatgtaacaattcttatccaagtgctgctaatctgtcgtgcaaataatgaagctatttggttgcctatttagctattcacaaatcactgtaatctttgaaacaatcttgtcgttcatttgtattaatatttggatattgtgagttaatactttagaaaaaaatccatcaactcagccccgttagcaaaactgtttggattcatagtttttatatgtgttaacagtagaataaattttgaaggggctatttactaccaatgactaaggggaaaattatactgtcactatcatttgacttgaacatttgtggtattgtaaaagtcttgtcagttgtgttctaaattgcttaagccatacgttctcttaaacaggatgtttttttcttcctttccagcagcctttttcttctttgtctgttatggttaatactccatagattttagaaattgagaagttcttgaaacattttattttcttgagttcatcacttttgactcttgtatgagatgtgatttgtcataaaagatagccttccactacttcactaaatgaatttcagagtaaacactgtgattctgcagagcggattcagtaggctttccaatgttttctcctgctatacagtgcctaccaccttgagggcacttcagtactagaggatgaaaactgaaacgttgttttgatgtttattgaataacgagattagagaatatttgatttttgttgtcagtgtattaaagaaattttcacattgataaatgttctctaggaatgtgtctacattcatcaggtgtgaactcttgtacatgaattttgtaccttgaatccacatatatattaagtgtatcatcaatataaaaataaacattatttgcttaaaaaaaaaaaaa

SEQ ID NO: 655 - DNA, 5213 bp, HOMO SAPIENS
gtggtttctaacgctgaacttaaaaagtgttgagatgaataatgaagaggaccttctgcaggaggactcaacaagagatgaaggcaatgagactgaagccaacagcatgaacacattaagaaggacaaggaagaaagtcactaaaccatatgtttgttcaactgaagtgggagaaacggatatgtccaattcaaatgattgcatgagggacagcagtcaaattttgaccccacctcaactctcttctagaatgaaacacattagacaagccatggccaaaaatcgcctccagtttgtacgatttgaagcaacagacctccacggcgtgtccaggtctaagactatccctgcacacttttttcaagagaaagtgagccatggtgtttgcatgccccgaggttatcttgaagtgataccaaatccaaaggacaatgaaatgaataacataagagccacatgttttaatagcgacatagtcctaatgccagagttatcaacctttagagttttgccatgggctgacagaactgcaagagtgatatgtgataccttcactgtgactgtctctgggatgtcgataggaagaaaaacatgttctgcagcacttctggaactgagcagctcacgatcactgggaaaaaatggttggcaggactcttgaagcactctgctgcgctcagctgcctgatggcgccttctgttagctgccgaaagcgttattccaaggacaggaaagacctgaagaagagtgtgcctacaacatggggatacaatgacaacagctgtatatttaatatcaaatgtcatggagagaaaggcacccggatagaaaataaactaggctcagcaacagcaaacccttacttggtgctggctgcaactgttgctgccggcttagatggacttcatagcagtaatgaggtcttggctggtccagatgagagcacagacttttaccaagtggaaccttctgagatccctttaaaactagaagatgcccttgtggcactggaagaagatcaatgcctgagacaggctctaggagaaacctttattcgatattttgttgccatgaagaaatatgagttggagaatgaagaaatagctgcagagagaaataaattcttagagtattttatttagaatagagctcacaactactcctttagacatgtaattgttacttaaagctaatctaccaaaacaaaaagactgaacttttgtaattaacaacagcaacaataacaagattacgaatgcttttgacttttttttttgtccatggaatatttgacagatgaagtaggactgctgagaagattctgataacagaaacaaacaacaaagttgtggtgaagctataatatgcaaacttaccagatcttgtcagtcatttcctatgtgtatgttgacctggataagaatatccaattttgggtggcaataaatatattcgcacattaagaaaaaaaagacttaagcattagaaagcaaaatttaaatgactaaaaaagaaaaaaaagaaaaggagaaaaaattttaatggtacacataggttatgatttccagggagacaaatatactaatatagtctcgctaatcaaataatattgtgaatccaggttgtatgcaccattatggtctttctaaacaagttaaataaacttttgccaaaatataatgacaggtaggcagttttcccctaagtctcttctcttttcacccttctccactagctcctgaaaagcttatgaacttcaaggttataatgtcctcaagaaacaaatccctaaggaatagaattggagctgagaacaacgaggtcagattttaaaagtagttaaagcctttcttttaacaatgcctcatatagaagttcaatacacaaagtatagatagaaagatgtttgtgtgtgagggtaggtgggctctgtctactctgcttcattctttgaaactagatgttcctctgaaacctctagtgctctgtggagtgtgagaacaactgcctggctagccagggctatgtttggagtttaagtttgttattcaaattactgaatctgctgctcacagaggttggtacctccccagagaatattacctgttccaggcctttgtttgaatgagataatattgtaactatcacaaaagtttagctgcttttgggaagaagtccaaaatccacttactagcaaatgaaacattattctactgcttaggatcaaacagcagattttatgttcaattaaaactgactgtagtctcaatttagatagcaattgcacaagcagaggattagaatttggctcagatcctcttattaaaattcatattactcagtagcttaaatagtgaaagtcagtctatccttcactaattactcccttcttttttcctttgagcaggagaagtgtgtttggatacataagaagaaagttcccagcactttgggaggccaaggcaggaggattgcttgaggccaggagtttgagtccagcctggaccacatagtgagacccctgtttctacaaaaaaaaaaaaaaaaatgcctcgcatggtggcacatgcctgtagtcccagctacgtgggaggctgagaagggaggatcgcttgagcctgggagtttcaggctgcagtgagccataatcacaccactgcactccagcttgggtgacagagtgagacactgtcttaaaaaaaagagaagaataaaattcatggatgcatatggggtagagagaaagatagtgtagggtagctgggggaaggaagggaacctgtcctgaaacctccagaatgaaatcccacacattacatcatgggagggataaggaagactctcatgccaattttctagctgtctgctagaaaattcccctctgttcattttcccctctgttctcagtaataaaacctcaatatgttctttgaaagcaatgaaaaatgaaatgatatttctgagccttcattaaggttggatgtggtcatgttattaggttcagtgcaaagaggtgaaagtagaagtgttgcatataagttctttaggacattttcttttcttttcttgtattttttttttttttccgagatggagtctcgctttgtcacccaggctgaagtgcaatgtgggggggtcttggctcactgcaacctctgccccctgggttcaagtaattctcctgcctcagcctcccaagtagctgggatcccaggtgcctgctaccatgcctggccttttagtagagatggggtttcaccatattggccagtctggtcttgaactcctgaactcaggtgatcagcctgccttggcctcccaaagtgctaggattacaggcatgagccaccatgccctaccacactttagaacatttttttaaatgacggatgctgtgtgctctgccctttctttctcttgctgccttcacccttcctgctgagtggcctacagataatgtggctaggattatgtccttgggaagggaggtttgctccacagggtacagtaataaggtggaatctctgctttgtagagcagtttgacttgcctacatccagatgtttacctgagagagaaccaaacttctatcttctttaagccacaatgattttgattctttgttagttgcaatgaaatttattttctcttttccatgtgtgtgttgtatgtgtgtttgtgtgtgagtgtgtgcatatgagtggggaatttgagggatttggggatgaaagaacaaaggtataagaaccagtgaaagacgacttcctcaatattcccacttctagagaggataatctgagttaatcaaagggatccacacatccaaaaaatgggattggctctaacccatccctataaagtggcatatccctttatagtccacgggccttaatgaaacatgtctaatgcattgacttcattttaccataatgagtaaagatgctgtaaaaagtctgataatcacagtgtttgaagccgttttttcccctttcgcattattagcataacttaaaaacacagtactcaggatgccatgtgaaggaattatataactaggaatattatcttcagtattaagtgtacagtcgtgagtcaaagaaaatattcagccatagattacaaatcagttgataacgtaagttggtgtggcagtttccaccaagatttcagttaggtgtgtgctgatgtatattcttgttctttaaggcaacccaaaaagaggcattggccagcagagttcagggccaaagacaaattggggtaggtacatgtaaaaatcagttatctatttttctatttctttcatctgttcataggctttctattgttgaaaggactttctgctgatgcttctaccttcttggtctgggttaagagggtcagacattcattcagcagcacttattgagcaccatttgtgtgctaagccttcagctgggagccatcatactaggggagaccaaaacaaagatgagcagacaatgaaagagttttggatctgtgtatcttaagcagaacataaataattttttttgtagacctaatgctgaaaaaagctatttggaaagcttctttatggctcgaaaagggtgccttataaatagctttacaaaaattgctttcttattttcatttactataattgttctaatcaaagcttaggggaaaaatgtgattactgaatttaaagttggtaattaaatgagtatacataagaaatgtaaattaaaagcgataatattttaagactagaaattaaaacattagtattgtagtaacaagtttctattttcaaggacattctataatctaaaatttcattttacagtgtgtgaataacaacaacgcttgaaatgattatttgaaggcaatgaaagatcaaaaaactttaatctgaataaaaattgaaagcatacagtgaagtctgagcttatcagtaaaacagaacagtctattgacatatctccagtcacctgtttgacaaaatacactcaccaatatgtttatgatataggtatgactggacaatacctttaaccttgggttttctatgacaggggtaagaatttgtgtctttaaacattacctatgtgcacagtgccttccctgttaaagctcttctcatgctgcctataattaggggtttacatgatacttcctaattgctaattaggatgtgaattctcagaataaaaggtacagatcttactta

SEQ ID NO: 656 - DNA, 1628 bp, HOMO SAPIENS
tcaaaaaaaaaaaaaaatccagccacgtagagatttgggaaaagagtatttccaatagagtgaacagatttcaaatatgcgtgcattagagaatgattttttcaattctcccccaagaaaaactgttcggtttggtggaactgtgacagaagtcttgctgaagtacaaaaagggtgaaacaaatgactttgagttgttgaagaaccagctgttagatccagacataaaggatgaccagatcatcaactggctgctagaattccgttcttctgtcatgtacttgacaaaagactttgagcaacttatcagtattatattgagattgccttggttgaatagaagtcaaacagtagtggaagagtatttggcttttcttggtaatcttgtatcagcatagactgttttcctcagaccgtgtctcagcatgattgcttcccattttgtgcctccctgagtgatcattaaggaaggcgatgtagatgtttcagattctgatgatgaagatgatagaatgttacgttcataacttactaaggattagtgtatattttccaaccttgaggcatgaaattctggagcttattattgaaaaactactcaagctggatgtgaatgcatcccggcagggtattgaagatgctgaagaaacagcaaatcaaacttgtggtgggacagattccacggaaggattgtttaatatgggattcgcagaggcatttttggaacatctttggaaaaacttgcaggatccaagtaatcctgccatcatcaggcaggctgctggaaattatattggaagctttttggcaagagctaaatttatttctcttattactgtaaaaccatgcctagatcttttggttaactggctgcacatataccttaataaccaggattcgggaacaaaggcattctgcgatgttgctctccatggaccattttactcagcctgccaagctgtgttctacacctttgtttttagacacaagcagcttttgagcggaaacctgaaagaaggtttgcagtatcctcagagtctgaattttgagcggatagtgatgagccagctaaatcccctgaagatttgcctgccctcagtggttaacttttttgctgcaatcacaaagatgaagacttgtggatatggatggtggtgatggttgcacaacaatatcaatttattttataccactgaaccgtgcacttcaaaatggttaagatggtaagttttatgttgtgtattttaccataataaaaaaaattgtagagggaaaaacagtctgcctccacttttgatatgggactgctaacatcttccaccctccctctccccctctgccccacatctgggcaagctaagaaagcctgctgctctctcctctggcaccagctggaaattcatacccaacaagccctagccctcccaccagacccacatttcatccccatccccatcgcatccccatccccatccccatccctaaccaccataaatgctaagggagtttccttgcctggttttctgaaaccatttttggacctgcttgggaatctgccctgctctctcagaaagcttcattatatgagcaataaaccttttcctaccctcaaaaaaaaaaaaaaaaaaa

SEQ ID NO: 657 - DNA, 2718 bp, HOMO SAPIENS
cagggtaacgctgtcttgtggacccgcacttcccacccgagacctctcactgagcccgagccgcgcgcgacatgagccacgggaagggaaccgacatgctcccggagatcgccgccgccgtgggcttcctctccagcctcctgaggacccggggctgcgtgagcgagcagaggcttaaggtcttcagcggggcgctccaggaggcactcacagagcactacaaacaccactggtttcccgaaaagccgtccaagggctccggctaccgctgcattcgcatcaaccacaagatggaccccatcatcagcagggtggccagccagatcggactcagccagccccagctgcaccagctgctgcccagcgagctgaccctgtgggtggacccctatgaggtgtcctaccgcattggggaggacggctccatctgcgtcttgtacgaggaggccccactggccgcctcctgtgggctcctcacctgcaagaaccaagtgctgctgggccggagcagcccctccaagaactacgtgatggcagtctccagctaggcccttccgcccccgccctgggcgccgccgtgctcatgctgccgtgacaacaggccaccacatacctcaacctggggaactgtatttttaaatgaagagctatttatatatattatttttttttaagaaaggaggaaaagaaaccaaaagttttttttaagaaaaaaaatccttcaagggagctgcttggaagtggcctccccaggtgcctttggagagaactgttgcgtgcttgagtctgtgagccagtgtctgcctataggagggggagctgttagggggtagacctagccaaggagaagtgggagacgtttggctagcaccccaggaagatgtgagagggagcaagcaaggttagcaactgtgaacagagaggtcgggatttgccctgggggaggaagagaggccaagttcagagctctctgtctcccccagccagacacctgcatccctggctcctctattactcaggggcattcatgcctggacttaaacaatactatgttatcttttcttttatttttctaatgaggtcctgggcagagagtgaaaaggcctctcctgattcctactgtcctaagctgcttttcttgaaatcatgacttgtttctaattctaccctcaggggcctgtagatgttgctttccagccaggaatctaaagctttgggttttctgaggggggggaggagggaactggaggttattggggttaggatggaagggaactctgcacaaaacctttgctttgctagtgctgctttgtgtgtatgtgtggcaaataatttgggggtgatttgcaatgaaattttgggacccaaagagtatccactggggatgttttttggccaaaactcttccttttggaaccacatgaaagtcttgatgctgctgccatgatccctttgagaggtggctcaaaagctacagggaactccaggtcctttattactgccttcttttcaaaagcacaactctcctctaaccctcccctcccccttcccttctggtcgggtcatagagctaccgtattttctaggacaagagttctcagtcactgtgcaatatgccccctgggtcccaggagggtctggaggaaaactggctatcagaacctcctgatgccctggtgggcttagggaaccatctctcctgctctccttgggatgatggctggctagtcagccttgcatgtattccttggctgaatgggagagtgccccatgttctgcaagactacttggtattcttgtagggccgacactaaataaaagccaaaccttgggcactgttttttctccctggtgctcagagcacctgtgggaaaggttgctgtctgtctcagtacaatccaaatttgtcgtagacttgtgcaatatatactgttgtgggttggagaaaagtggaaagctacactgggaagaaactcccttccttcaatttctcagtgacattgatgaggggtcctcaaaagacctcgagtttcccaaaccgaatcaccttaagaaggacagggctagggcatttggccaggatggccaccctcctgctgttgccccttagtgaggaatcttcaccccacttcctctacccccaggttctcctccccacagccagtcccctttcctggatttctaaactgctcaattttgactcaaaggtgctatttaccaaacactctccctacccattcctgccagctctgcctccttttcaactctccacattttgtattgccttcccagacctgcttccagtctttattgctttaaagttcactttgggcccacagacccaagagctaattttctggtttgtgggttgaaacaaagctgtgaatcactgcaggctgtgttcttgcatcttgtctgcaaacaggtccctgcctttttagaagcagcctcatggtctcatgcttaatcttgtctctcttctcttctttatgatgttcactttaaaaacaacaaaacccctgagctggactgttgagcaggcctgtctctcctattaagtaaaaataaatagtagtagtatgtttgtaagctattctgacagaaaagacaaaggttactaattgtatgatagtgtttttatatggaagaatgtacagcttatggacaaatgtacacctttttgttactttaataaaaatgtagtaggataaaaaaaaa

SEQ ID NO: 658 - DNA, 453 bp, HOMO SAPIENS
  misc_feature (297)..(297): n is a, c, g, or t
  misc_feature (301)..(301): n is a, c, g, or t
  misc_feature (415)..(415): n is a, c, g, or t
caggccctccaaatgattttgctgcatggtaaaatttaagaattactgctttagaattttgtcatctaaggaaagctttgctttttgtatgtaatgacaaagttctcagtgtgatttctgctataagctatttatgctttggaaatattaatagttcatcagctgggaagactaggactacggttacctaacatcctgagatgtgattcaaaacttgaatttccctctggtcagagtttttgactctgtggtttctgagaatggctgtttaaaaaaaggtggggagaagtagcttanctancctctttcagttaaaatgtcttctagattatacttagactatcagcttggactgcttgtgttcattgtcatattcatgcgatatatgatgatggaagaatgagatgaattttgntatcttaacatttaagtcctgattgttactgtgttgtc

SEQ ID NO: 659 - DNA, 3372 bp, HOMO SAPIENS
taaaaccaggaagtgaagtccccgagcacgttagaaagcctgacatggcctgactcgggacagctcagagcagggcagaactggggacactctgggccggccttctgcctgcatggacgctctgaagccaccctgtctctggaggaaccacgagcgagggaagaaggacagggactcgtgtggcaggaagaactcagagccgggaagcccccattcactagaagcactgagagatgcggccccctcgcagggtctgaatttcctgctgctgttcacaaagatgctttttatctttaactttttgttttccccacttccgaccccggcgttgatctgcatcctgacatttggagctgccatcttcttgtggctgatcaccagacctcaacccgtcttacctcttcttgacctgaacaatcagtctgtgggaattgagggaggagcacggaagggggtttcccagaagaacaatgacctaacaagttgctgcttctcagatgccaagactatgtatgaggttttccaaagaggactcgctgtgtctgacaatgggccctgcttgggatatagaaaaccaaaccagccctacagatggctatcttacaaacaggtgtctgatagagcagagtacctgggttcctgtctcttgcataaaggttataaatcatcaccagaccagtttgtcggcatctttgctcagaataggccagagtggatcatctccgaattggcttgttacacgtactctatggtagctgtacctctgtatgacaccttgggaccagaagccatcgtacatattgtcaacaaggctgatatcgccatggtgatctgtgacacaccccaaaaggcattggtgctgatagggaatgtagagaaaggcttcaccccgagcctgaaggtgatcatccttatggacccctttgatgatgacctgaagcaaagaggggagaagagtggaattgagatcttatccctatatgatgctgagaacctaggcaaagagcacttcagaaaacctgtgcctcctagcccagaagacctgagcgtcatctgcttcaccagtgggaccacaggtgaccccaaaggagccatgataacccatcaaaatattgtttcaaatgctgctgcctttctcaaatgtgtggagcatgcttatgagcccactcctgatgatgtggccatatcctacctccctctggctcatatgtttgagaggattgtacaggctgttgtgtacagctgtggagccagagttggattcttccaaggggatattcggttgctggctgacgacatgaagactttgaagcccacattgtttcccgcggtgcctcgactccttaacaggatctacgataaggtacaaaatgaggccaagacacccttgaagaagttcttgttgaagctggctgtttccagtaaattcaaagagcttcaaaagggtatcatcaggcatgatagtttctgggacaagctcatctttgcaaagatccaggacagcctgggcggaagggttcgtgtaattgtcactggagctgcccccatgtccacttcagtcatgacattcttccgggcagcaatgggatgtcaggtgtatgaagcttatggtcaaacagaatgcacaggtggctgtacatttacattacctggggactggacatcaggtcacgttggggtgcccctggcttgcaattacgtgaagctggaagatgtggctgacatgaactactttacagtgaataatgaaggagaggtctgcatcaagggtacaaacgtgttcaaaggatacctgaaggaccctgagaagacacaggaagccctggacagtgatggctggcttcacacaggagacattggtcgctggctcccgaatggaactctgaagatcatcgaccgtaaaaagaacattttcaagctggcccaaggagaatacattgcaccagagaagatagaaaatatctacaacaggagtcaaccagtgttacaaatttttgtacacggggagagcttacggtcatccttagtaggagtggtggttcctgacacagatgtacttccctcatttgcagccaagcttggggtgaagggctcctttgaggaactgtgccaaaaccaagttgtaagggaagccattttagaagacttgcagaaaattgggaaagaaagtggccttaaaacttttgaacaggtcaaagccatttttcttcatccagagccattttccattgaaaatgggctcttgacaccaacattgaaagcaaagcgaggagagctttccaaatactttcggacccaaattgacagcctgtatgagcacatccaggattaggataaggtacttaagtacctgccggcccactgtgcactgcttgtgagaaaatggattaaaaactattcttacatttgttttgcctttcctcctatttttttttaacctgttaaactctaaagccatagcttttgttttatattgagacatataatgtgtaaacttagttcccaaataaatcaatcctgtctttcccatcttcgatgttgctaatattaaggcttcagggctacttttatcaacatgcctgtcttcaagatcccagtttatgttctgtgtccttcctcatgatttccaaccttaatactattagtaaccacaagttcaagggtcaaagggaccctctgtgccttcttctttgttttgtgataaacataacttgccaacagtctctatgcttatttacatcttctactgttcaaactaagagatttttaaattctgaaaaactgcttacaattcatgttttctagccactccacaaaccactaaaattttagttttagcctatcactcatgtcaatcatatctatgagacaaatgtctccgatgctcttctgcgtaaattaaattgtgtactgaagggaaaagtttgatcataccaaacatttcctaaactctctagttagatatctgacttgggagtattaaaaattgggtctatgacatattgtccaaaaggaatgctgttcttaaagcattatttacagtaggaactggggagtaaatctgttccctacagtttgctgctgagctggaagctgtgggggaaggagttgacaggtgggcccagtgaacttttccagtaaatgaagcaagcactgaataaaaacctcctgaactgggaacaaagatctacaggcaagcaagatgcccacacaacaggcttattttctgtgaaggaaccaactgatctcccccacccttggattagagttcctgctctaccttacccacagataacacatgttgtttctacttgtaaatgtaaagtctttaaaataaactattacagatacttaaaaaaaaaaaaaaaaaaa

SEQ ID NO: 660 - DNA, 3352 bp, HOMO SAPIENS
ggggcgtggcgccggggattgggagggcttcttgcaggctgctgggctggggctaagggctgctcagtttccttcagcggggcactgggaagcgccatggcactgcagggcatctcggtcgtggagctgtccggcctggccccgggcccgttctgtgctatggtcctggctgacttcggggcgcgtgtggtacgcgtggaccggcccggctcccgctacgacgtgagccgcttgggccggggcaagcgctcgctagtgctggacctgaagcagccgcggggagccgccgtgctgcggcgtctgtgcaagcggtcggatgtgctgctggagcccttccgccgcggtgtcatggagaaactccagctgggcccagagattctgcagcgggaaaatccaaggcttatttatgccaggctgagtggatttggccagtcaggaagcttctgccggttagctggccacgatatcaactatttggctttgtcaggtgttctctcaaaaattggcagaagtggtgagaatccgtatgccccgctgaatctcctggctgactttgctggtggtggccttatgtgtgcactgggcattataatggctctttttgaccgcacacgcactggcaagggtcaggtcattgatgcaaatatggtggaaggaacagcatatttaagttcttttctgtggaaaactcagaaattgagtctgtgggaagcacctcgaggacagaacatgttggatggtggagcacctttctatacgacttacaggacagcagatggggaattcatggctgttggagcaatagaaccccagttctacgagctgctgatcaaaggacttggactaaagtctgatgaacttcccaatcagatgagcatggatgattggccagaaatgaagaagaagtttgcagatgtatttgcagagaagacgaaggcagagtggtgtcaaatctttgacggcacagatgcctgtgtgactccggttctgacttttgaggaggttgttcatcatgatcacaacaaggaacggggctcgtttatcaccagtgaggagcaggacgtgagcccccgccctgcacctctgctgttaaacaccccagccatcccttctttcaaaagggatcctttcataggagaacacactgaggagatacttgaagaatttggattcagccgcgaagagatttatcagcttaactcagataaaatcattgaaagtaataaggtaaaagctagtctctaacttccaggcccacggctcaagtgaatttgaatactgcatttacagtgtagagtaacacataacattgtatgcatggaaacatggaggaacagtattacagtgtcctaccactctaatcaagaaaagaattacagactctgattctacagtgatgattgaattctaaaaatggttatcattagggcttttgatttataaaactttgggtacttatactaaattatggtagttattctgccttccagtttgcttgatatatttgttgatattaagattcttgacttatattttgaatgggttctagtgaaaaaggaatgatatattcttgaagacatcgatatacatttatttacactcttgattctacaatgtagaaaatgaggaaatgccacaaattgtatggtgataaaagtcacgtgaaacagagtgattggttgcatccaggccttttgtcttggtgttcatgatctccctctaagcacattccaaactttagcaacagttatcacactttgtaatttgcaaagaaaagtttcacctgtattgaatcagaatgccttcaactgaaaaaaacatatccaaaataatgaggaaatgtgttggctcactacgtagagtccagagggacagtcagttttagggttgcctgtatccagtaactcggggcctgtttccccgtgggtctctgggctgtcagctttcctttctccatgtgtttgatttctcctcaggctggtagcaagttctggatcttatacccaacacacagcaacatccagaaataaagatctcaggaccccccagcaagtcgttttgtgtctccttggactgagttaagttacaagcctttcttatacctgtctttgacaaagaagacgggattgtctttacataaaaccagcctgctcctggagcttccctggactcaacttcctaaaggcatgtgaggaaggggtagattccacaatctaatccgggtgccatcagagtagagggagtagagaatggatgttgggtaggccatcaataaggtccattctgcgcagtatctcaactgccgttcaacaatcgcaagaggaaggtggagcaggtttcttcatcttacagttgagaaaacagagactcagaagggcttcttagttcatgtttcccttagcgcctcagtgattttttcatggtggcttaggccaaaagaaatatctaaccattcaatttataaataattaggtccccaacgaattaaatattatgtcctaccaacttattagctgcttgaaaaatataatacacataaataaaaaaatatatttttcatttctatttcattgttaatcacaactacttactaaggagatgtatgcacctattggacactgtgcaacttctcacctggaatgagattggacactgctgccctcattttctgctccatgttggtgtccatatagtacttgattttttatcagatggcctggaaaacccagtctcacaaaaatatgaaattatcagaaggattatagtgcaatcttatgttgaaagaatgaactacctcactagtagttcacgtgatgtctgacagatgttgagtttcattgtgtttgtgtgttcaaatttttaaatattctgagatactcttgtgaggtcactctaatgccctgggtgccttggcacagttttagaaataccagttgaaaatatttgctcaggaatatgcaactaggaaggggcagaatcagaatttaagctttcatattctagccttcagtcttgttcttcaaccatttttaggaactttcccataaggttatgttttccagcccaggcatggaggatcacttgaggccaagagttcgagaccagcctggggaacttggctggacctccgtttctacgaaataaaaataaaaaaattatccaggtatggtggtgtgtgcctgtagtcctatctactcaagggtggggcaggaggatcacttgagcccaggaatttgaggccacagtgaattaggattgcaccactgcactctagcccaggcaacagaacaagaacctgtctctaaataaataaataaaaataataataataaaaaagatgttttccctacaa

SEQ ID NO: 661 - DNA, 4336 bp, HOMO SAPIENS; identical to SEQ ID NO: 166

SEQ ID NO: 662 - DNA, 3340 bp, HOMO SAPIENS
gccatcttgcccgcgtccgggctcctgcggcgggcggggcggtgtcccggccggaagcggctgtgcggcggccgcgctgccacctcagggaaatttggatatgtgcagtgcatctcctcgaagatgctgatggtggaaatttcttgaaaccgctctcgtaatttgccacgtgctgttgcaaatattctggtgaatgaacacagaatcagcatggctttcctttgctgagaaatcactgatgggaagtgagacttgttaaacttgaaagtgaatggacctgagtggaccctttgatcacatcagtaaacatgagcggtaccaaacctgatattttatgggcaccacaccatgttgatagatttgttgtgtgtgactcagaactaagtctttatcatgtggaatctactgtgaattcagaactcaaagctggatctttacgtttatctgaagactctgcagctacattactgtcaataaattcagatacaccctatatgaaatgtgttgcctggtatcttaattatgatcctgaatgtctgctggcagttggacaagcaaatggtcgagttgtacttacaagccttggtcaagatcataactcaaagttcaaagatttgataggaaaagagtttgttccaaaacatgcacgacaatgtaatacccttgcctggaatccactggatagtaactggctagctgctggtttagataagcacagagctgacttttcagtgctaatatgggatatctgcagcaaatatactcctgatatagttcccatggaaaaagtgaaactttcagcaggtgaaactgaaacaacattattagtaacaaaaccactttatgagttaggacagaatgatgcttgtctgtctctttgttggcttccacgagaccagaaacttctccttgctggtatgcatcgtaacctagctatatttgatcttcggaatacaagccaaaagatgttcgtaaatacaaaagctgttcagggtgtgacggtagacccatatttccacgatcgtgttgcttccttctatgaaggtcaggttgcaatatgggatcttagaaaatttgagaagccagttttgacattgactgagcaaccaaaacccttaacaaaagtagcatggtgtcccactaggactggtctacttgccactttaacaagggatagtaatattattagattgtatgatatgcagcatacacccactcccattggggatgaaactgaacccacaataattgaaagaagtgtgcaaccttgtgacaattacattgcttcctttgcgtggcatccaacaagtcaaaatcgaatgatagttgtaactcccaaccgaacaatgtcagacttcactgtttttgaaaggatatctcttgcctggagcccaattacatctttaatgtgggcttgtggtcgtcatttatatgaatgtacggaagaagaaaatgataattctttagaaaaagatatagcaacgaagatgcgtcttcgggctttatcaaggtatggacttgatacagagcaggtgtggaggaaccacattttagctggaaatgaagatccacagctcaagtcactctggtatactctgcactttatgaagcaatacacagaagatatggatcagaaatctccaggcaacaaaggatcattggtttatgcaggaattaaatcaattgtaaagtcatcgttgggaatggtggaaagcagcagacataattggagtgggttggataagcaaagtgatattcaaaatttaaatgaagagagaatcttagctttacagctttgtgggtggataaagaaaggaacggatgtagacgtggggccatttttgaactcccttgtacaagaaggggaatgggaaagagctgctgctgtggcattgttcaacttggatattcgccgagcaatccaaatcctgaatgaaggggcatcttctgaaaaaggagatctgaatctcaatgtggtagcaatggctttatcgggttatacggatgagaagaactccctttggagagaaatgtgtagcacactgcgattacagctaaataacccgtatttgtgtgtcatgtttgcatttctgacaagtgaaacaggatcttacgatggagttttgtatgaaaacaaagttgcagtacgtgacagagtggcatttgcttgtaaattccttagtgatactcagttaaatagatacatcgaaaagttgaccaatgaaatgaaagaggctggaaatttggaaggaattttgcttacaggccttactaaagatggagtggacttaatggagagttatgttgatagaactggagatgttcaaacagcaagttactgtatgttacagggttcacctttagatgttcttaaagatgaaagggttcagtactggattgagaattatagaaatttattagatgcctggaggttttggcataaacgagctgaatttgatattcacaggagtaagttggatcccagttccaagcctttagcacaagtttttgtgagttgcaatttctgtggcaagtcaatctcctacagctgttcagctgtgcctcatcagggcagaggttttagtcagtatggtgtgagtggctcaccaacgaaatctaaagtcacaagttgtcctggctgtcgaaaaccacttcctcgatgtgcgctttgtctcattaatatgggaacaccagtttctagctgtcctggaggaaccaaatcagatgaaaaagtggacttgagcaaggacaaaaaattagcccaatttaacaactggtttacatggtgtcataattgcaggcacggtggacatgctggacatatgcttagttggttcagggaccatgcagagtgccctgtgtcggcatgcacgtgtaaatgtatgcagttggatacaacagggaatctggtacctgcagagactgtccagccataaaatgttaccaccttaagagaacccttcaagtgtggagctttctagtaggtgtccttcatagctcagaaacatacctcagaacaagccattcatgacttacctgtaatgggaaaataaatcattctatcagatcagcagttttgatgtttgagtgattttgatatgcttcacagagacaaatgctgccaaaataaacatcgaagtatagacatgagttctgttcagcaggttgaaaagtctgatttagaaaaactttctaagttttggttgaaattatgaacactctagaagcagaatttctggaagagccaagaacagactttgagcctatatcttcaaagctgaaactggatatctttcaataaaatatgtgcacttttaaaataaaaaaaaaaaaaaaaaaa

SEQ ID NO: 663 - DNA, 1561 bp, HOMO SAPIENS
gggcttatcccgcctgtcccgccattctcgctagttcgatcggtagcgggagcggagagcggaccccagagagccctgagcagccccaccgccgccgccggcctagttaccatcacaccccgggaggagccgcagctgccgcagccggccccagtcaccatcaccgcaaccatgagcagcgaggccgagacccagcagccgcccgccgccccccccgccgcccccgccctcagcgccgccgacaccaagcccggcactacgggcagcggcgcagggagcggtggcccgggcggcctcacatcggcggcgcctgccggcggggacaagaaggtcatcgcaacgaaggttttgggaacagtaaaatggttcaatgtaaggaacggatatggtttcatcaacaggaatgacaccaaggaagatgtatttgtacaccagactgccataaagaagaataaccccaggaagtaccttcgcagtgtaggagatggagagactgtggagtttgatgttgttgaaggagaaaagggtgcggaggcagcaaatgttacaggtcctggtggtgttccagttcaaggcagtaaatatgcagcagaccgtaaccattatagacgctatccacgtcgtaggggtcctccacgcaattaccagcaaaattaccagaatagtgagagtggggaaaagaacgagggatcggagagtgctcccgaaggccaggcccaacaacgccggccctaccgcaggcgaaggttcccaccttactacatgcggagaccctatgggcgtcgaccacagtattccaaccctcctgtgcagggagaagtgatggagggtgctgacaaccagggtgcaggagaacaaggtagaccagtgaggcagaatatgtatcggggatatagaccacgattccgcaggggccctcctcgccaaagacagcctagagaggacggcaatgaagaagataaagaaaatcaaggagatgagacccaaggtcagcagccacctcaacgtcggtaccgccgcaacttcaattaccgacgcagacgcccagaaaaccctaaaccacaagatggcaaagagacaaaagcagccgatccaccagctgagaattcgtccgctcccgaggctgagcagggcggggctgagtaaatgccggcttaccatctctaccatcatccggtttagtcatccaacaagaagaaatatgaaattccagcaataagaaatgaacaaaagattggagctgaagacctaaagtgcttgctttttgcccgttgaccagataaatagaactatctgcattatctatgcagcatggggtttttattatttttacctaaagacgtctctttttggtaataacaaacgtgttttttaaaaaagcctggtttttctcaatacgcctttaaaggtttttaaattgtttcatatctggtcaagttgagatttttaagaacttcatttttaatttgtaataaaagtttacaacttgattttttcaaaaaagtcaacaaactgcaagcacctgttaataaaggtcttaaataataaaaaaaaaaaaaaa

SEQ ID NO: 664 - DNA, 3307 bp, HOMO SAPIENS
agaccaaaaccacaagcagaacaagcaggcgtgagacactcacaggttgggtttgatcgcatgcgtgtcggagaggagagagcagagagagacacaggaacaagaacagcaaagggtagagcagacctgcgccaggggcgcacaacggccgtgtccacctcccggccccaagatggtgcttcccacaggcagccacgcgtagcagccagagacagctccagacatgtggctcttcttcgggatcactggattgctgacggcagccctctcaggtcatccatctccagccccacctgaccagctcaacaccagcagtgcagagagtgagctctgggagccaggggagcggcttccggtccgtctgacaaacgggagcagcagctgcagcgggacggtggaggtgcggctcgaggcgtcctgggagcccgcgtgcggggcgctctgggacagccgcgccgccgaggccgtgtgccgagcactgggctgcggcggggcggaggccgcctctcagctcgccccgccgacccctgagctgccgcccccgcctgcagccgggaacaccagcgtagcagctaatgccactctggccggggcgcccgccctcctgtgcagcggcgccgagtggcggctctgcgaggtggtggagcacgcgtgccgcagcgacgggaggcgggcccgtgtcacctgtgcagagaaccgcgcgctgcgcctggtggacggtggcggcgcctgcgccggccgcgtggagatgctggagcatggcgagtggggatcagtgtgcgatgacacttgggacctggaggacgcccacgtggtgtgcaggcaactgggctgcggctgggcagtccaggccctgcccggcttgcacttcacgcccggccgcgggcctatccaccgggaccaggtgaactgctcgggggccgaagcttacctgtgggactgcccggggctgccaggacagcactactgcggccacaaagaggacgcgggcgcggtgtgctcagagcaccagtcctggcgcctgacagggggcgctgaccgctgcgaggggcaggtggaggtacacttccgaggggtctggaacacagtgtgtgacagtgagtggtacccatcggaggccaaggtgctctgccagtccttgggctgtggaactgcggttgagaggcccaaggggctgccccactccttgtccggcaggatgtactactcatgcaatggggaggagctcaccctctccaactgctcctggcggttcaacaactccaacctctgcagccagtcgctggcagccagggtcctctgctcagcttcccggagtttgcacaatctgtccactcccgaagtccctgcaagtgttcagacagtcactatagaatcttctgtgacagtgaaaatagagaacaaggaatctcgggagctaatgctcctcatcccctccatcgttctgggaattctcctccttggctccctcatcttcatagccttcatcctcttgagaattaaaggaaaatatgccctccccgtaatggtgaaccaccagcacctacccaccaccatcccggcagggagcaatagctatcaaccggtccccatcaccatccccaaagaagttttcatgctgcccatccaggtccaggccccgccccctgaggactcagactctggctcggactcagactatgagcactatgacttcagcgcccagcctcctgtggccctgaccaccttctacaattcccagcggcatcgggtcacagatgaggaggtccagcaaagcaggttccagatgccacccttggaggaaggacttgaagagttgcatgcctcccacatcccaactgccaaccctggacactgcattacagacccgccatccctgggccctcagtatcacccgaggagcaacagtgagtcgagcacctcttcaggggaggattactgcaatagtcccaaaagcaagctgcctccatggaacccccaggtgttttcttcagagaggagttccttcctggagcagcccccaaacttggagctggccggcacccagccagccttttcagcagggcccccggctgatgacagctccagcacctcatccggggagtggtaccagaacttccagccaccaccccagcccccttcggaggagcagtttggctgtccagggtcccccagccctcagcctgactccaccgacaacgatgactacgatgacatcagcgcagcctaggccggggccagccgaggctcctggggtggctctgaccctctggcctcctgctctacctactccctttcccctttcccaccctcccagctcacctccccatggagctgagaggcctcccttggagagatggaaggaaacgttataccttgtacccctcggtctccatccatcaagccaaacctgctgccacagccctcccccggccccagatagcagccccagggaggatgctgcctccaagaggtgtgagccctctgtctcggggatgaacaagcagagtctgggctacctcttgacagctggtggaggggagttggggagctggactggatgactctggaggccccttccaaacctcaagtgtccggcgctttgattgcctgagtttctgacacttcagggcccagaggtcctgcgaggggcagaactggacccccatgccagtgctgctgcaggagggcccatatactagggtctgctgagctgttgtcactgatcggtgggcgctgggggggtagggtagcacaccagctgtcccaggctttgctccgggcggtaactgcacttgggcagggaatatagccttcctgggcacaactagctgacaatgacaggttgactgtgtacccccaaccaaggagctggggcccaaggccagtcctgccccagagacactccaagtccgccaggggcacagaccagttctgcagtgactgtccctggacaatgggtctttattctgagtttcctatggtttacaaagagggccccagcccagccccaccacagatcccagagataggggcccagtctccatgggggcaaggagcatagagatgttttccaggaaggggctcagaagctgcactaggccccgagtccccatgtgtctccttgaattgatgaggatgctcctgggagggatgcgtgactatgtggtgttgcacccggggctgcaaacgtctccgtgcagcccccagagagaggcccatgggctcagaccaggctttgttgtcctgctctgagtatcctgagattaaactgaattgctgaatgaaaaaaaaaaaaaaaaaaaaa

SEQ ID NO: 665 - DNA, 1679 bp, HOMO SAPIENS; identical to SEQ ID NO: 76

SEQ ID NO: 666 - DNA, 5455 bp, HOMO SAPIENS
atttgggcggagccctttctgagtcagtctgtcggccgacttcctgcttggggcctgggcagccacactgcacgcaggctgggccgactgaggggctcagaggccaggctctgaggcccacgcagggcctagggtgggaagatggcaggtgggggcggcgacctgagcaccaggaggctgaatgaatgtatttcaccagtagcaaatgagatgaaccatcttcctgcacacagccacgatttgcaaaggatgttcacggaagaccagggtgtagatgacaggctgctctatgacattgtattcaagcacttcaaaagaaataaggtggagatttcaaatgcaataaaaaagacatttccattcctcgagggcctccgtgatcgtgatctcatcacaaataaaatgtttgaagattctcaagattcttgtagaaacctggtccctgtacagagagtggtgtacaatgttcttagtgaactggagaagacatttaacctgccagttctggaagcactgttcagcgatgtcaacatgcaggaataccccgatttaattcacatttataaaggctttgaaaatgtaatccatgacaaattgcctctccaagaaagtgaagaagaagagagggaggagaggtctggcctccaactaagtcttgaacaaggaactggtgaaaactcttttcgaagcctgacttggccaccttcgggttccccatctcatgctggtacaaccccacctgaaaatggactctcagagcacccctgtgaaacagaacagataaatgcaaagagaaaagatacaaccagtgacaaagatgattcgctaggaagccaacaaacaaatgaacaatgtgctcaaaaggctgagccaacagagtcctgcgaacaaattgctgtccaagtgaataatggggatgctggaagggagatgccctgcccgttgccctgtgatgaagaaagcccagaggcagagctacacaaccatggaatccaaattaattcctgttctgtgcgactggtggatataaaaaaggaaaagccattttctaattcaaaagttgagtgccaagcccaagcaagaactcatcataaccaggcatctgacataatagtcatcagcagtgaggactctgaaggatccactgacgttgatgagcccttagaagtcttcatctcagcaccgagaagtgagcctgtgatcaataatgacaaccctttagaatcaaatgatgaaaaggagggccaagaagccacttgctcacgaccccagattgtaccagagcccatggatttcagaaaattatctacattcagagaaagttttaagaaaagagtgataggacaagaccacgacttttcagaatccagtgaggaggaggcgcccgcagaagcctcgagcggggcactgagaagcaagcatggtgagaaggctcctatgacttctagaagtacatctacttggagaatacccagcaggaagagacgtttcagcagtagtgacttttcagacctgagtaatggagaagagcttcaggaaacctgcagctcatccctaagaagagggtcaggatcacagccacaagaacctgaaaataagaagtgctcctgtgtcatgtgttttccaaaaggtgtgccaagaagccaagaagcaaggactgaaagtagtcaagcatctgacatgatggataccatggatgttgaaaacaattctactttggaaaaacacagtgggaaaagaagaaaaaagagaaggcatagatctaaagtaaatggtctccaaagagggagaaagaaagacagacctagaaaacatttaactctgaataacaaagtccaaaagaaaagatggcaacaaagaggaagaaaagccaacactagacctttgaaaagaagaagaaaaagaggtccaagaattcccaaagatgaaaatattaattttaaacaatctgaacttcctgtgacctgtggtgaggtgaagggcactctatataaggagcgattcaaacaaggaacctcaaagaagtgtatacagagtgaggataaaaagtggttcactcccagggaatttgaaattgaaggagaccgcggagcatccaagaactggaagctaagtatacgctgcggtggatataccctgaaagtcctgatggagaacaaatttctgccagaaccaccaagcacaagaaaaaagagaatactggaatctcacaacaataccttagttgacccttgtccggaaaactcaaatatatgtgaggtgtgcaacaaatggggacggctgttctgctgcgacacttgtccaagatcctttcatgagcactgccacatcccatccgtggaagctaacaagaacccgtggagttgcatcttctgcaggataaagactattcaggaaagatgcccagaaagccaatcaggtcatcaggaatctgaagtcctgatgaggcagatgctgcctgaggagcagttgaaatgtgaattcctcctcttgaaggtctactgtgattcgaaaagctgctttttcgcctcagaaccgtattataacagagaggggtctcagggcccacagaagcccatgtggttaaacaaagtcaagacaagtttgaatgagcagatgtacacccgagtagaagggtttgtgcaggacatgcgtctcatctttcataaccacaaggaattttacagggaagataaattcaccagactgggaattcaagtacaggacatctttgagaagaatttcagaaacatttttgcaattcaggaaacaagcaagaacattataatgtttatttagccattcttatctcctcccttcagatcctctggcagctagctacgcaatgtgcctgtggtcccactaatctgtgactgctcctgtggaaactccacatcacaattctccaaaatttatcattgccattttaaaaccgtcttttcagctttcaataaaattcaacaccccttcatgttaaaaattctcaataagctaggtattgaggaacatatcccaaaataataagagccatttatgacaaacccacagacaacattatatggaatgcgcaaaagaagcattccccttgaaaacaagcacaagacaaggattccctctctcaccactcctattcaacaaagtattggaagtcctggtcagagcagtcaggaagcagaaaaaaataaagggtatctaaataggcaaagaggaagtcaaactatccctgtttgcacacaacattgattctatatctagaaaaccccctagtctcagcccagaagctccttctgctgataaacaatttcagagatgtttcagaatacaaaattagtatatgaaaattactagtattcctatacaccagcaatagccaagccaagagccaaatcaggaaggcaatctcattcacaattgccactaaaagaataaaatacctaggaatacagctaatcagggaggtgagagagttctacaatgagaattacgaaacactgctcaaagagattggagatgacacaaacaaatggaaaaacatcccatgctcctgtgtagaaacagtcaatatcattaaaatgaccatactgcccaaagcagtttacaggttcaatgttattcctatcaaaccaccaatgacattcttcacagaactagataaaactattttaaaattcatacagaaccaaaaaagagcccaaatagccaaggcaatcctaagcaaaaagaacaaagctgaaggcatcacgttaccccacttcaaactatattacagggcttcagtaaccaaaacagcatggtactggtaccaaaaaaaaagccacatagaccaatggaacagaacgaagagcacagaataagaccacactcctatgaccatctgatcgtcgataaaaacaagcaatgggaaaaagactccctattttataaatggtgctgggataactgggatagaagattgaagctagacctcttccttacaccatatacaaaaatcaactcaagatcaattaaagacttaatgtaaaatcaaaaactatgaagactctggaagacaacctaggcaataccatcctggacataggaacaggcaaagatttcatgataaagacaaaagcaatagcaacaaaagcaaaatttgacaaatgggatctaattaaacttaagagattctgcacagcaaaagaaacaatcaacagagtaaacagacaacctacaaaatgggagaaaatatttgcacactatgcatctgacaaaggtctaatagccagcttctatagggaacttaaacaaatttacaagacaaaaagaaataaccccattaaaaagtgggcaaaggacatgaaagacactttttttttttaagatggagtttcactcttgttgcccaggccagagtgcaatggcgtgatcttggctcaccacaacctctgcctcccgggttcaagcaattctcctgcctcagcctcccaggtggctgggattacaggcatgcaccacctgactgattttgtattttagtagagacggggtttctccacattggtcaggctggtcttgaactcccgacctcaggtgatccacccacctcggcctcccaaagtgctgggattacaggcatcagccaccatgcccggatgaaaagacactttccaaaagaagatacacatgcggccaacaagcatgttttaaaagctcaatatcactgatcgttagagacatgcaaattaaaactacaatgagacaccatctcacaccagtcaaaatgcctctttctaaaaagtcaaaaaataacagctagtaaggttgtggagaaaagggaacatttatacactattgatgggagtgtaaattagttcaaccactgtggaaagcagtgtggcaactcctcatagtgctaaaagcagaactgccattccacccagcaatcccattactgggtacatacccagaggaatataaatcattctaccataaagacacatgcatgcaaatgtccactgcagcactattcacaatagcaaagatacagaatcaacctaagtgcccatcagtaacagattggataaagaaaatatggtacacatacaccatggaatagtatgcagccataagaaacaatgagatcatgtctcaggaacatggatagagctggaggctattatccttagcaaactaattcaggaacagaaaaccaaataccacaggttctcagttgtgagtgggagctaaatgatgagaactcatgaacacaatgaagggaacagacactagggtctacttgagggtggaggatgggaagagggagaggagcagaaaaagtacctattggtgatgaagtactctgtacaacaaacccgtgacaagagtttccctatataacaaaccttcacatatacccctgaacctaaaagtttttttaattgtaaataaatggatcattaaaaaaaattttaataat

SEQ ID NO: 667 - DNA, 18702 bp, HOMO SAPIENS; identical to SEQ ID NO: 567

SEQ ID NO: 668 - DNA, 3670 bp, HOMO SAPIENS
agactacatttcccgacaggcctcccggctctcccgccctccctcccgagacacgagccgaactgggcgtcaggtcggggagccggtcgggttcccgctcaccgccgccgccgccgccccctgcagccactctcccgcctctaccgccgcgggagctgcatcgtccactccggtcggcggtggaaccgccagtccggggtcacagagcttgagaagcgacgcgctgagccccccatcacctccagcccgggcgacccctcccgggtccgccctcgccctgcgcagccgcccgagcccccagccccgggcggccccgctccagcatcccagctcctgcactctcgcagccgccgccgccccccgcccggaacatggactctgactcttgcgccgccgccttccacccggaggaatactcccccagttgcaagaggcgcaggaccgtggaagacttcaacaaattctgcacctttgtcttggcctatgctggctacatcccttatccgaaggaggaactccctttaaggagcagccccagccctgctaacagcactgctggtaccattgacagcgacggctgggacgcgggtttctcagacatcgcgtcctcagtgcccttgccagtctctgaccgctgctttagccacctgcagcctactctcttgcagcgagccaagcccagtaacttcctgctggacagaaagaaaacggacaagctgaagaagaagaagaagaggaagcgcagggacagtgatgcgcctgggaaagaggggtacagggggggcttgctgaagctggaagccgctgacccctacgtggagacccccacgagtcccaccttgcaggatatcccccaggctcccagcgacccctgctcgggctgggactccgatactccctcgagtggatcttgtgccactgtgtcacctgatcaggtcaaagaaataaaaactgaaggcaaacggactatcgtccggcagggaaagcaggtggtgttccgagatgaggacagcactggcaatgatgaggacatcatggtggactcagatgacgattcctgggacctcgtgacctgcttctgcatgaagccatttgccggccgccccatgatcgagtgtaatgagtgccacacctggattcacctgtcctgtgcgaaaatccggaaatccaatgttccagaagtgtttgtctgccaaaagtgccgggactccaagtttgacatccgccgttccaaccgctcgcggacgggctcccggaagctgttcctggactgactgctggctggcgaggaggctgcgagcgtggaatcggaagcgaccgcgggcttttttgcccttctcttagttgagcacagaaccctcagctctggtgcgggcagatccctgccatttaggtgcctaagcaaaaggacaggctgtccaaggtagaaactgtacatagccggtgaccgaatgcgacctttgccagccagagctgctgccagagctgcgttccctgcagtggaggtggactggacacccacgtgcagcgggtttggctcatttgaaaatgagggtccgtggtagctgtgcgttttgctatcattgctaagagattcccgctgattgggctcagtgccagctgttattctgcttccactgtgttggggagaggtgttcggtttccccagcctgttaatgaacagccatacgtgtaagctttttcttgagtgttaagtcttttaccaaaagtgtctgtacagcagccatccaagttgcccctacttagtggcttgccctctgcctgcctcagctgctgcctgaccggctgggggaggcactggcgggaggcctcgggctcccctggaagggcgctgggctggcgggtcagctggtggttcttaggtttccttctgtttgttaaaagggacaatgtggccacttctctgtggaaagggagttggttggggggttgagatggcccgtgttcataactcagtttcctgttttgcacgatgtaaaaaccctgtctttttgcacgatacagccaaaagtattggctgatttcttgctgagtgccctcttagttggtgtgtgaggtcttggtgggctcaggccagctgtttgcgagtgtgggaactcataggttctgtctttgtctcttcctttcacctcattctggtagcagcataaaggttaggcaatcactgggacccgcatggtgttcctccaaagaatagggtaaaggagagctgggagggagccctctccgttgggtgactcttgtgtgccctttagacaggctggcctgccggttccacagggtacagttaggacttgagtctttctttttctgttttgagttggtgagtgagtgatagggtaacatgggccttcaggatgaccccttggaactgtgccgagttccttaaatctcagctgggatcctggacctgggaggcccctgtgagggccagctctggaaaaacctgggagttgatgccggaggctgtggaagaactctgctcgagggcagggtgccctggaacactggtagttctggggctgggagggagaggggctccggctttctctgaaatgaacactgctcttcagcagttcaagtacttgttctcaaaacattttctaattgattggtaggttttcataagcattgtttctttaaggcatggaaagggaagaatgctcaagcaagtcatgtttgttttcagtgggatgggcccgcgttctcactgctgggggcttccccttcatgtggcacctttgtgccaggccaccaggcagactcttcccaccttctcccactgaagcaccaaggggcttgaaccgtaatttggctaatcagaggcattttttttgtcctagtatctttcacacttgtccaaccgtcttatttttttaaaagttctgttgcttgtattaacacgaaactagagagaaatagtttctgaagccagtttattgtgaagatccccaagggggaggttcggtagagaaaaatagtaagctggtttagaaactgacgagggcaaacagccaggacgcattggagaggaatttgccaaagatctaccctgagataacgcctgtccagtgtcttcaccacgtgaataaccagcgctccaaagtgtttttctgctttgaaaaaaaaaaattccacaagcttttaaaggtgcatttaagaatccatgtgactttagaatggaactgccggccctggcaactgtcacgtgtgctagaaggttcgatgcctctggaatgcatgtgatactcatctccattttgtttccttgattgcatttttgttcttttagcagatctgtccctgtgggtggtgtctaagaagtcggacaccttggtttttgtgttagattgagctgggcagctgcaatcagcttctttatatgcaaattaggcacgacccatctgtggttcctggttggtggctaatgaagtgaggggagggagggatgtcaccccaaaagtaggccctcccattggctttggccaggccagacacttcacatcgtttacatggttctgtgtaattttaaagtttatgtgtataaagcgaagctgtttctgtgaaactgtatattttgtaaataaatatattgctactttgaggttcatgattcaaggttcaggcgattgcgttctgtgctgaagga

SEQ ID NO: 669 - DNA, 3885 bp, HOMO SAPIENS
agagccggacggggtaaactgagcggcggcggcggggcgctggggcggagactgcgacccggagccgcccggactgacggagcccactgcggtgcgggcgttggcgcgggcacggaggacccgggcaggcatcgcaagcgaccccgagcggagccccggagccatggccctgagcgagctggcgctggtccgctggctgcaggagagccgccgctcgcggaagctcatcctgttcatcgtgttcctggcgctgctgctggacaacatgctgctcactgtcgtggtccccatcatcccaagttatctgtacagcattaagcatgagaagaatgctacagaaatccagacggccaggccagtgcacactgcctccatctcagacagcttccagagcatcttctcctattatgataactcgactatggtcaccgggaatgctaccagagacctgacacttcatcagaccgccacacagcacatggtgaccaacgcgtccgctgttccttccgactgtcccagtgaagacaaagacctcctgaatgaaaacgtgcaagttggtctgttgtttgcctcgaaagccaccgtccagctcatcaccaaccctttcataggactactgaccaacagaattggctatccaattcccatatttgcgggattctgcatcatgtttgtctcaacaattatgtttgccttctccagcagctatgccttcctgctgattgccaggtcgctgcagggcatcggctcgtcctgctcctctgtggctgggatgggcatgcttgccagtgtctacacagatgatgaagagagaggcaacgtcatgggaatcgccttgggaggcctggccatgggggtcttagtgggcccccccttcgggagtgtgctctatgagtttgtggggaagacggctccgttcctggtgctggccgccctggtactcttggatggagctattcagctctttgtgctccagccgtcccgggtgcagccagagagtcagaaggggacacccctaaccacgctgctgaaggacccgtacatcctcattgctgcaggctccatctgctttgcaaacatgggcatcgccatgctggagccagccctgcccatctggatgatggagaccatgtgttcccgaaagtggcagctgggcgttgccttcttgccagctagtatctcttatctcattggaaccaatatttttgggatacttgcacacaaaatggggaggtggctttgtgctcttctgggaatgataattgttggagtcagcattttatgtattccatttgcaaaaaacatttatggactcatagctccgaactttggagttggttttgcaattggaatggtggattcgtcaatgatgcctatcatgggctacctcgtagacctgcggcacgtgtccgtctatgggagtgtgtacgccattgcggatgtggcattttgtatggggtatgctataggtccttctgctggtggtgctattgcaaaggcaattggatttccatggctcatgacaattattgggataattgatattctttttgcccctctctgcttttttcttcgaagtccacctgccaaagaagaaaaaatggctattctcatggatcacaactgccctattaaaacaaaaatgtacactcagaataatatccagtcatatccgataggtgaagatgaagaatctgaaagtgactgagatgagatcctcaaaaatcatcaaagtgtttaattgtataaaacagtgtttccagtgacacaactcatccagaactgtcttagtcataccatccatccctggtgaaagagtaaaaccaaaggttattatttcctttccatggttatggtcgattgccaacagccttataaagaaaaagaagcttttctaggggtttgtataaatagtgttgaaactttattttatgtatttaattttattaaatatcatacaatatattttgatgaaataggtattgtgtaaatctataaatatttgaatccaaaccaaatataattttttaacttacattaacaaacatttgggcaaaaatcatattggtaatgagtgtttaaaattaaagcacacattatctctgagactcttccaacaaagagaaactagaatgaagtctgaaaaacagaatcaagtaagacagcatgttatatagtgacactgaatgttatttaacttgtagttactatcaatatatttatgcgttaaacagctagttctctcaagtgtagaggacaagaacttgtgtcagttatcttttgaatccataaatcttagctggcattagttttctatgtaatcacctacctagagagagttgtaaattatatgttaacatgttatctggttggcagcaaacactaaagccaataaaggaaaaacagtaaatgttccgaaagcagagaaaagcaaccaaacatattgttatgaactaaaagctttccctttaagatgcatacttgtcttactggatgaagaaaattgagggtacatgtaccttatactgtcaaggttgtttaaacatgataaggttaatcgccatctacttcaagttttagaaaaggaaacaagaagctgaaaacagctgctctgactttaatatctgactatatctttgatctgtttgcaggtcatccaagtgttttctaggaatatatttattttaggttgtctgaaactactattttttagactcctgaaagttgttcacatcaatgtgaagacaaattttaaatgaaaatgaagaatgaaattatgtcttgaatcatatattaagaagtaaaaataatagtgatcaggcagaaaagaaaaatggaacatctaaaaatgtatgtgctaactatatcatccagtgtgcagtgttgtgtatttttctaagcatgacaacattgatgtgccttttcagtgtaacagcaaatactgttagtgaacattgtcaatttatgtcattttgttaagagatatgactggagtgtgcagtgtggaatgtctctaatactacttgtgaatcctgcagttctataatcataaacaaaaattacttagtttcgttaagctaagattgtgtttgtgttaacttcgacatcaaggagcaaagaactttagaacagactcctcaatcttgtgactttcttattctctaggaaagtaacacttcgtttcatgaagcttttctgtggggcttcgattatttcaagtctggtttctaagtgcagtgtgtttgaagcaaacgaacttccaactcacttatttggcattgggcaacttggccaagtctgccactttggaagatggctctggaggaaactctcatatggctaaaaaggcaggctagtttcttacttctacaggggtagagccttaaaaaagaacgtgctacaaattggttctctttgagggtttctggttctccctgcccccaataccatatactttattgcaattttatttttgcctttacggctctgtgtctttctgcaagaaggcctggcaaaggtatgcctgctgttggtccctcgggataagataaaatataaataaaaccttcagaactgttttggagcaaaagatagcttgtacttggggaaaaaaattctaagttcttttatatgactaatattcttggttagcaagactggaaagaggtgtttttttaaaatgtacataccagaacaaagaacatacagctctctgaacatttattttttgaacagaggtggtttttatgtttggacctggtaatacagatacaaaaactttaatgaggtagcaatgaatattcaactgtttgactgctaagtgtatctgtccatattttagcaagtttacttaataaatcttctgaaccatgaaaaaaaaaaaaa

SEQ ID NO: 670 - DNA, 9159 bp, HOMO SAPIENS
agccctcctcccctttccccgcccactccgggctggccttatccagtagcgtctgggtccctggactaaagccgtcaaatgtaaccaattgctgaggagctctcccctaagaatcccgcctccactctgaggaacagcttcgctgatcaatggatcccctcctagacgcaatgagcgcgcggggcaagtggagaagcggctgaactgcccaatgaacaagcggtttccgtggttaggggcgtggcagaagcggtcgtcaggggcgtggcggcagttacttgggcggggccggtagcggcgggagctgcactggccaggggttccggctgtatatccatgagcgccgctggcagccggggagctgcaggaaccagactgggggcgagctgagcacctgtagtcaatcacacgcagaaataataatgatacttatgttagaagattgttttgagaagtgcatggagttactacatctgaagcatttagaacagtacctggcacagggttctgtcctcttcatttgcaagccactgctttatccacgagggtgctccctacttatgccagtgaattaatttttggcacagatgaatccttcatatttatctggatttagctggtagcatttgtctcctaagacttggtcacagaggaatccatgtgaccttcaggccttctgctctaaactggcaggagatcctgtttctactcacagcgtccgagggtctggtggccgagccctgaggggcgctgttgctcccaggtggcagaattcagcatcagagagccacacagctgaaagagatggatggcttttaggtttgtttgaataagagatctgacctgaccggcccaactgtacaactcttcaaggaaaattcgtatttgcagtgggaagaataagtaacattgatcaagatgaatgccatgctggagactcccgaactcccagccgtgtttgatggagtgaagctggctgcagtggctgctgtgctgtacgtgatcgtccggtgtttgaacctgaagagccccacagccccacctgacctctacttccaggactcggggctctcacgctttctgctcaagtcctgtcctcttctgaccaaagaatacattccaccgttgatctgggggaaaagtggacacatccagacagccttgtatgggaagatgggaagggtgaggtcgccacatccttatgggcaccggaagttcatcactatgtctgatggagccacttctacattcgacctcttcgagcccttggctgagcactgtgttggagatgatatcaccatggtcatctgccctggaattgccaatcacagcgagaagcaatacatccgcactttcgttgactacgcccagaaaaatggctatcggtgcgccgtgctgaaccacctgggtgccctgcccaacattgaattgacctcgccacgcatgttcacctatggctgcacgtgggaatttggagccatggtgaactacatcaagaagacatatcccctgacccagctggtcgtcgtgggcttcagcctgggtggtaacattgtgtgcaaatacttgggggagactcaggcaaaccaagagaaggtcctgtgctgcgtcagcgtgtgccaggggtacagtgcactgagggcccaggaaaccttcatgcaatgggatcagtgccggcggttctacaacttcctcatggctgacaacatgaagaagatcatcctctcgcacaggcaagctctttttggagaccatgttaagaaaccccagagcctggaagacacggacttgagccggctctacacagcaacatccctgatgcagattgatgacaatgtgatgaggaagtttcacggctataactccctgaaggaatactatgaggaagaaagttgcatgcggtacctgcacaggatttatgttcctctcatgctggttaatgcagctgacgatccgttggtgcatgaaagtcttctaaccattccaaaatctctttcagagaaacgagagaacgtcatgtttgtgctgcctctgcatgggggccacttgggcttctttgagggctctgtgctgttccccgagcccctgacatggatggataagctggtggtggagtacgccaacgccatttgccaatgggagcgtaacaagttgcagtgctctgacacggagcaggtggaggccgacctggagtgaggcctccggactctggcacgctccagcagccctcctctggaagctgcgtcccctcaccccctgtttcaggtctcccatctccctcagtgacctggatctgacctcacaccatcagcagggggcacccaccatgcacacctgtctcggagtaggcagctcttcctgggagctccaggctatttttgtgcttagttactggttttctccattgcattgttaggcatggtgacaagtgacagagttcttgccctctgtccagtttcagcatctggttgcttttaagccaagtacatctagtttccctattaaaaatgtgtctgaatagcgattttgctttgccaccaaaaggcttttccctgagaacagtgaaggatgtatgtcattttgtggtggttgtatgtgtccttacatagaccttaaaaagagctcacccttccaggccaatgctgaagacacagctccgcttgggagcctgagaacccaggcttcccaggccagagtgtggcttcttaaacggcaaaggaaattcctttgagtcacaagccaagttttcgccctgtctcctgagaccatttccctacgctttgctgctgctgagagttacgtgaggcacttgttaaaaattcagcctcccaggtccctcccctcggagaggctgattcactgggtctgggaaggagcctggggattttaatttttcacaagtgccccagatgattctcatcaccaagcaaattttggaaatgctgttcaacagcgcccttaaattggaaacatctttgcagctcgttttattgaaattcataatcaggggtgtcctctagctcccacggtctccagagcagcaaggccggctatggagctgccgtcgtgtgaccacagtgtgatgtctcagaagggctctgggtgggctgagcatctgggctgtgccctggctctgcttttcaccctggacaaagtcgctgtggacttcaatttcttcacctctaaaatgggggacttggaccaggtagattgctgagctcactaccaggttcaaagttcaatgacaaactcagtttactgaggtttgagagaacatccctccaggggagcctgggagctgctctcccagtctaagcatgtagatatcatcgtttgccttttgtgtgtgtgtgtcccttatttgataaaaagatgttttgagttgttttttttttaagcactcacttgtaattttagtttttaaacccaagtccctctaactttgcctttgataccaaacaattcaaaagttggatctgagtttggagaaagatatttccaacctaagtgggtattattttgaaaccagatttttaatttaatagcctatatttgtagtctgttggataggtgtttccaaagtgtgtcttctcaagtgaaaacgcaactctaggtttcaagtactccttttctccgatcctgtggtacttgaatatccaaaaaccctgcactttgaacaatcagctgttgctatctggaactaaacagaactatgagtaaaattgcctggatactttaaaaagatatttttcctccttcatctcctttgactccaggacagactggaatataagtagtgggtctgcatggatgtttcagggatcaaaggagccacctgggcgcctgagtgccaaccctcagggccacaggtgggtgtggtttgggcacgggtccaagtgactgtgacgggacccgtgggcatgggtccaggtctgtaacctgaagaagttgttttctgacaatcaccaaatcatccgaatgacatcaaaagcagcccttatctcagagactgagatttctgtggtctcaacttcgctttggtataatttctggcactcaccagcctctatcattatgactttccccccagtgtattatttctctaataggtttccttttcacgttcttttagcacagactggcactttaccctctcagtttggaagttagcccctctcctctgttacttttcccttcacccaactacagctgtgatctagaacattcatagtcatatttctgctactactaccttcatttatcaagactttttatgagaataggtaaaccaagcaataacttcctaggactgaatcaccaccccagaagagcgagaggctcctttcatatgcctgaggccacaccccttaacctgttctgacaaaatagtggctggcccatgtaccagctccattcagaaattcaggaagagaaaagacagccctgttgtcacacaaaccggtgtgggggagggtggagcctggtctgcacggcagtcctggtggcccctgtggaggacaggcagggctggcagcatagcctttgttgccacacaaccggaatttgctcccccaggactgtgggagccagtgtcccagctgaaatctttttagtgtgtggctctgaatggcactcacattccattttggctcacatgaaactaactgaagccctttgttcaagcttcaggctcttaggcatggaaatgagaatgtgactgtggctgtcttacaggaaaattcttgtttgtccctgaatgagagcacagaggcattgaattcacagagctgcaaacttgcctgataaatgagggagtggcagtttatagataggtcatcttttttccttcctccaggtgtccttgcctttcttcccaaagtcattcatttctgatgagtatatgaatccccctcttgctagtaaggttctatttgggctaaaacaaggctgaatttttaaagagtatttgaatatattttagaatcaaattgaggctataaattgcatcaatctggacaattccattgcaggaataatatgttaaaaaccaatggggagaagcacccacatctctcctgtagcactccgtgtctcataagcaatttgaagacacttacaagtaactgattccagtcaaattaggattaactgactcaaaaaatggtgtcaagtttctttaatgtttttatgttagaagtgagtttaacagacttgaagaaaactgttatcttttcctgctgtgagtttacacaaatgattccagagcagaatgaaagcagaaagctgttggttacaatattcttttaacctctctgcagcattttacacttactgggaaccttatgattcaccgtaagagtggaaatatacctgagttcgtgtcctaatggtctctaattcacattggatcgtgggcaaatcacctcacctctctgagcctgttccctcctcttagaccatctctaagaccacttcatctatttacacatcatttgcttgaacattgctgaacatctgcgtgaacttggcctctccagcccttgcaggtggaaacagctgtgtcaaggctcaaggctcacgctgaggggacttggagggagggggcttctgcattaagctttcctggtgaagacccttgatcttgtccaaagccctgtgtctttgactggcttctcttcagagtccccgttgtcatcgtaagacccttgctgtttggagggtggtcttgtgactgtggcagctgctggccgctggaatgaggagcctatctccatcctccagtgtgactcaggcagagcattgagaattcccagggcagaaatccttcctgctcaggctttcattctaaaactacagtcttcattaaagctgaactttctgggtagctgagcttatatgcccggcatctgaatgagagctctctttgtaactgtgtgacttgagatctagtttgccagctcctgggaaacaatacatgtgttcttgtttgtgtttgctcagcaagcagatgtctgagatgtaagaagcttttcttttcctgtggcattgattctgacttagagctgaagtaaaagatcactgaaacatcacgtcaagttgaagtcactcataggtctttgtcctttaggcaggacaggagagtcattaagaagcatttcactgtagcattctatcacaatatcatctggaattgttttctttgcccagaaagccttaacttgcctctagagaatccctggtattacaacgatattgcggcattagaattccaactcttctgctgtggaagtttgaagcgaagctgcagcaaaaccagagaatttcctcaagtggcctgtaggctccttgttatcttatgcccccacccctccctcaacaatatgagtgatccagaactggcccaaacacctcagctctggtccctttttgcccttcttggccttactctgttgttcaaagccactttggattgcttggatgcttcgaacagccatgaaaagtagcctgcctgtggcatttagaggccaagcaattgacagaaagggtttcttctacctctgttatctaagcagagggaagtaaacctctcaccgccccccacccctcactgcccccgattaccctagaattgctttcgccaaattgtagttgaagctaaggaaggggaatctggcccctgctgggagagggaactggaatgccacacaaggcaaggcctgcttccttccttcccctctgctgctgctgcctcggaacgctgcagcccaggcttcctcccacagtggcccttggaagcaggccgcagagtagacagctgctccttttggaagagtcagtcccctgtgttttctgaactgtttttcctagcatgtatgtgggtagagctttcatgcatctctagtaataataagctgaaattagttttttttttaattctccaatttaaaacttttaattaaaaagtaaattttaatgtcgaaaatgcaaacttggggagggcagaaagatcacacacaaggctgtcacttcatacttgcaggattgcacagcagccgggcagaggcgctcctcacttcccagatggggcggcgggcagcagagacgcacctcacttcctagacagtgcggcagccaggcacaggcacacctcacttcccagacagttgggcggccaggcaagcgctcctcacttcccagatggggcggctcccgggaagcggggctcctcacttcccagacagggtggccaggcagaggtgctcctcacttcccagaacaattctttatgaatttgataaaggactgaagtgcaactgaaagctgctagtgatgatctggtaatatacaatttgtccagtagccagtttgtttttattgtgttttctaaccataagagatcattaaaggcaaagcctgtatgacgctgtacacacacaaaaaaatggtcaccgcaggccatactaccaatgaaatggtaggtaaacaaatcttctggtcaagagaaaaaaaaaagaaatagcactctgcatgctttgctctacaagacgaatttccctagaaagaatccaatgaaggccgggcatagtggctcactcctgtaatcccagcactttggaggccgaggcgggtagatcacctgaggttaggagttcaagaccagcctggccaacatggtgaaaccccttctctactaaaaatgcaaaaattagctgggtgtggtggcgggcgcctgtaatcccagctactcgggaggctgaggtgggagaattgcttgaacccaggagacggaggttgcagtgagccgagatcacgcctctgcactccagcctgggcaacaagagtgagactccgtctccaaaaaaagaaaaggaatccagtgaaaatggctgcaattacaacaagaagtgaaggaagaagactggtgacatctctgaaggatgcagttgaggttgatccaggtttatccgaatatgctacctttctgagccttaaaccttcatctctcaggtgttgatttgcttctgatagcttcatcatttctccctgaagtcttttacactcttctgttagtttccttgtttcagtatcatgaagtgaagcactgtgtggttgtggcgtgggcccgtcttgcttagatgcattcagtgggacagctttgctgggttccatgtcattcaatttatcattttcattggggatctccatttggaatccattaattcatgaggttttgcctcattccacacagcttccatatctgaagtgtttagtggagcaaaaattgtaccataaacttgtgtttactcttttcattcggatcatagtcaaagggctgtagcattactgaaacagtcacagttgaccctgggtcaataattccactgttgggcctcacacagtaccggtgaggcacggtagtcttcactttgaaacacacttttctatccgatggatttcgcaatttaagatttgtagtgactacatctgtgaaggggcctttgaatttgaggtctatgggcgggtcgaggaccaggatctgctcgtgcttcgccgtggccccggaggcagacgccattggagagacagcgcagagcagggggcggcttgctcgctgggggcgggggacgatggcgagaggggagggggagcgagttcgcatctctccttttcctggttagactctgttcaaccacattcttatgttggcagatctgcttccagattgatttttagagcaccatcactttcacattcctgattctgattttgttttgttttgtttgggttttctgaaacttaaaatgctgccccgaaaatactatatttttgagtttgtgttctgaaagcctccgtgctgctggatctttggggggaaatacaggatccttcagcactgaggtgtttaagatttgcaactagcaatgcaattttttctaaatatggggatatttacctttattaagaaattatactaaacattgatgtccttgatcattttatgttctcatattacttttgattctactatgattgtgtggtggtgaacaaagatcattacaaacaaaaactgtaattttgttatatttgattcaatggaatttacctaaaaaataaagactaaaaatgtggtgtgaaaaaaaaaaaaaaaaaaaaaaaaaa

SEQ ID NO: 671 - DNA, 4561 bp, HOMO SAPIENS
gggtacagggaagtctcgcctgttggaactggctgtggggctgcggcggtggggacgggccacggcgttctgtgacatccccccgcctcccctcgtcttctcccggctggcggcgaccggcctcagctgcagcgggcccggggcgtggggcctgggttttttgtgacatcgtaaacatgagccccacacagtgggacttccctgtggaattatgttgccggcctatggcctttgttactctaacgggcctggatgtagtttataatgcagtccatcgagctgtctgggacgccttctgtgcaaatcggagagctgatcgagtaccaatttctttcaaggtgctcccaggtgaccatgagtatcccaaatgtagacccaagagaacttcatatgagtggtacattcctaaagggatcttaaagactggctggatgaataagcatctgaatctggtgccagccctggtggttgtgttctatgaactggactgggatgagcctcagtggaaagaaaagcagtctgagtgcgccaccagagtggaaatagtcaggcaaagtttacaaggaagaaacacaaaagttgcagtggttctgattcagaagaaaacccctttgcccccaggagaagatgtcattgcttcagaaagggctgcagctttatgcaatgcatgtgaactctcaggaaagtctttgtttgtactgccgcacactgaccaccttgtgggttatattataagattggaaaatgccttttatgaacatgcacagacttattactacactgagatcagaagagtgaaatctcataaagaatttttgaataaaacaacacaccagcttttatttgttaggcatcagttcaaaatagctttcttcagtgagttgaaacaagatacacaaaatgcgctgaagaattataggaccgcctataatcttgtacacgaattgagagcccatgaaactaatattctggaaattaagactatggcaggatttataaactacaagatctgtaggctgtgttttcaacacaacaccccattggatgcaattgctcagttccgaaaacacatcgacttgtgtaagaaaaagattggaagtgcagagctgtcttttgagcatgatgcatggatgtctaaacaattccaggcctttggagatttatttgatgaagctattaagttagggttaacagctattcaaactcagaatcctggtttctattaccagcaggcagcatactatgcccaggagcggaaacagcttgcaaaaaccctctgtaaccacgaagcttctgtaatgtatcccaatcctgatcccttagaaacacaaacaggcgttcttgacttttatggacaaagatcatggcgacaaggaatactaagttttgatctttctgatcctgaaaaagaaaaggtgggaattcttgccattcagctgaaggagagaaatgttgttcactctgagataatcataactcttctgagcaatgctgttgcacagttcaagaagtataagtgcccgcgaatgaaaagtcacctaatggttcagatgggagaggaatattattacgcaaaggattataccaaagctttgaagttgctggattatgtgatgtgtgattatcggagtgaaggatggtggactctgctcacttctgtattaactacagctctgaagtgctcctacctcatggcccaattaaaggattacattacttactccctagaactccttggtagagcttcaactctgaaagatgaccagaagtctcggatagaaaagaacctcataaatgttttaatgaatgaaagtcctgatccagaacccgactgtgatatcttagctgtgaaaactgctcagaagctgtgggcagaccgaatttctctggctggcagcaatattttcacaataggagtacaggactttgtgccatttgtgcagtgcaaagccaagtttcatgccccaagttttcatgttgatgttcctgttcagtttgatatttatctgaaggctgattgtccacatcccattaggttttccaagctctgtgtcagctttaataatcaggaatacaaccagttctgtgtaatagaagaagcatccaaagcaaatgaagttttagaaaatctgactcaaggaaagatgtgcctagttcctggcaaaacaagaaaactgttatttaagtttgttgcaaaaactgaagatgtgggaaagaaaattgagattacttcagtggatcttgctctgggcaatgagacgggaagatgtgtggttttaaattggcagggaggaggaggagatgctgcttcctcccaagaagccttacaggcagctcggtctttcaaaaggcgacctaagctacctgacaatgaagttcactgggacagcattataattcaggcaagcacaatgatcatatccagagtcccaaacatttctgtacatctgctacatgaaccccctgcactgactaatgaaatgtattgtttggttgtgactgttcagtcccatgaaaagacccaaatcagagatgtgaagctcaccgctggcttaaaaccaggacaggatgccaatttaactcagaagactcacgtgactcttcatggaacagaactgtgtgatgaatcctacccggctttactcactgacattcctgttggagacttacatccaggggaacagctggaaaaaatgttgtatgttcgctgtggaacagtgggttccagaatgtttcttgtatatgtttcttacctgataaatacaaccgttgaagaaaaagaaattgtttgcaagtgtcacaaggatgaaactgtaacaattgaaacagtctttccatttgatgttgcggttaaatttgtttctaccaagtttgagcacctggaaagggtttatgctgacatcccctttctgttgatgacggacctcttaagtgcctcaccctgggccctcactattgtttccagtgagctccagcttgctccatccatgaccacagtggaccagctcgagtctcaagtggacaatgttatcttacagactggagagagtgctagtgaatgcttttgtcttcaatgcccatctcttggaaatattgaaggtggagtagcaaccgggcattatattatctcttggaaaaggacctcagcaatggagaatatccccatcatcacaactgtcatcactctgccgcacgtgattgtggagaatatccctctccatgtgaatgcagatctgccgtcatttgggcgtgtcagagagtcgttacctgtcaagtatcacctacagaataagaccgacttagttcaagatgtagaaatttctgtggagcccagtgatgccttcatgttctcaggtctcaaacagattcgattacgtatcctccctggcacggagcaggaaatgctatataatttctatcctctgatggctggataccagcagctgccatctctcaacatcaacttgcttagatttcctaacttcacaaatcagctgctcaggcgttttatacctaccagtatttttgtcaagccacagggtcgactcatggatgatacctctattgctgctgcatgatgttcaagaccggcccttggctgttgttacagagatgttgggcagagctatgcaggtgtttcattgtgaactctagctttgatcatggtaaaaagttaaccttttctattttttaatggatgttataccaactattcagaggaactcatacttcaaaaatattaggaaaatctgtcttatagtttctctaataaatatctgaaatctcagtacgacatgaaagaatgtcagaccattgttattgttgaaagtcatttgatgaatggtaaattctatgaaaagtaagtgatttgcatgtataatatcaggaaaattaagcatcccaagtgtgactggacaaagagagcagatgcaccagtgcctgtgccataaagttccgaatcccccatgtgtctctttcagagctggccagaccggaaataaatcattctcataaattcagtgtgtactcagaacacatacacaacaacatagggagttgtatgactgatacggaaaacttccagaaagttttaatcaaagcagtttaattaaggtatcaaaaatatctttgcttactatcaagaagtgtcaaataggttcagcttgctgccaaaatatggatcatttatgaagcaggttcatattttagaggtgttaataaaatcctcatcggaaaagatccaaagtgcaaggatttgattataaacataatttcctagactgaaagtttttggaaaagatgcagggtctgagtcaggccttctggttatattgtgcagtttcaaaagaactatttaaaactcttgaaaactcatgtaaataaaaatcatagggtgaaaattgtatttgttaaaataccttaataatttaaaatgacctgatttcctggaaaattttattattcaaaaggtggaggcattgtaaaaaggaaatagtgatgtaaataaacatgttctctttcaagtaaaaaaaaaaaaaaaaaaaaaaaaaaaaaaaaaaaa

SEQ ID NO: 672 - DNA, 548 bp, HOMO SAPIENS
  misc_feature (297)..(297): n is a, c, g, or t
gagggagcttgtgagcttgatcttgaaagatgagcagaattttaagaataagcaaaagggaaccacataactgacaaagcaggtgtgagtgagcatgacttacttggagagtggttaggtcagggttgttgggggagtggtggcagataagggaaataagagagggcatgataatgggaagatgaagtctaatttgggaccagattataaaaggcctttattttatgcttagtatcttgggttttattttgtaggcaatggggattctataactttttaagaaaaatctttttattntaaaacacagatattgaaaaccacataaaataaatgtatagcttaatgaactcttataggcttaactcttgtgcaaccccgcccaagttgagaagtagttctttccagccatcccagaagtccatccaggtgttttgtcctaattacaacttccttccacaaaagcaaacactatcctgacttttatagtgtttcttcatagtttatctaccacatgtgcagcccctagataccctagttttgctcattaa

SEQ ID NO: 673 - DNA, 1930 bp, HOMO SAPIENS
acagctcattgttggcagctgccgggcggtcctgccgagctgtgagggcaacggaggggaaataaaagggaacggctccgaatctgccccagcggccgctgcgagacctcggcgccgacatcgcgacagcgaagcgctttgcacgccaggaaggtcccctctatgtgctgctgagccggtcctggacgcgacgagcccgccctcggtcttcggagcagaaatcgcaaaaacggaaggactggaaatggcagaccatatgatggccatgaaccacgggcgcttccccgacggcaccaatgggctgcaccatcaccctgcccaccgcatgggcatggggcagttcccgagcccccatcaccaccagcagcagcagccccagcacgccttcaacgccctaatgggcgagcacatacactacggcgcgggcaacatgaatgccacgagcggcatcaggcatgcgatggggccggggactgtgaacggagggcaccccccgagcgcgctggcccccgcggccaggtttaacaactcccagttcatgggtcccccggtggccagccagggaggctccctgccggccagcatgcagctgcagaagctcaacaaccagtatttcaaccatcacccctacccccacaaccactacatgccggatttgcaccctgctgcaggccaccagatgaacgggacaaaccagcacttccgagattgcaaccccaagcacagcggcggcagcagcacccccggcggctcgggcggcagcagcacccccggcggctctggcagcagctcgggcggcggcgcgggcagcagcaacagcggcggcggcagcggcagcggcaacatgcccgcctccgtggcccacgtccccgctgcaatgctgccgcccaatgtcatagacactgatttcatcgacgaggaagttcttatgtccttggtgatagaaatgggtttggaccgcatcaaggagctgcccgaactctggctggggcaaaacgagtttgattttatgacggacttcgtgtgcaaacagcagcccagcagagtgagctgttgactcgatcgaaaccccggcgaaagaaatcaaacccccaacttcttcggcgtgaattaaaagaaacattcccttagacacagtatctcacttttcagatcttgaaaggtttgagaacttggaaacaaagtaaactataaacttgtacaaattggttttaaaaaaaattgctgccacttttttttcctgtttttgtttcgtttttgtagccttgacattcacccacctcccttatgtagttgaaatatctagctaacttggtctttttcgttgtttgtttttactcctttccctcactttctccagtgctcaactgttagatattaatcttggcaaactgcttaatcttgtggattttgtagatggtttcaaatgactgaactgcattcagatttacgagtgaaaggaaaaattgcattagttggttgcatgaacttcgaagggcagatattactgcacaaactgccatctcgcttcatttttttaactatgcatttgagtacagactaatttttaaaatatgctaaactggaagattaaacagatgtgggccaaactgttctggatcaggaaagtcatactgttcactttcaagttggctgtcccccccgccgccccccccacccccatatgtacagatgataatagggtgtggaatgtcgtcagtggcaaacatttcacagatttttattttgtttctgtcttcaacatttttgacactgtgctaatagttatattcagtacatgaaaagatactactgtgttgaaagctttttaggaaattttgacagtatttttgtacaaaacatttttttgaaaaaatacttgttaatttattctattttaatttgccaatgtcaataaaaagttaagaaa

SEQ ID NO: 674 - DNA, 3871 bp, HOMO SAPIENS
gaaaggcctcgcgcgtcgcgcctgcgcctgcgtccctgcggccgccagagggagggttaaggcgcctgggcgcacagcgagccggctgagggggctgtggcggccgcggcgggcgacatggacaacgcggggaaggagcgtgaggcagtacagctgatggcggaggccgagaagcgagtcaaggcctcccactccttcctccgagggctgtttggaggaaacacaagaatagaagaggcttgtgaaatgtataccagagctgcaaatatgttcaagatggctaaaaattggagtgctgcaggaaacgcattttgtcaggcagccaagctccacatgcagcttcagagcaaacatgactctgctaccagctttgtggatgctggaaatgcttacaaaaaggcagatccccaagaggctatcaactgcttaaatgcagccatcgacatttacacagacatgggaaggtttacaattgcagccaagcaccacattactattgcagagatctatgagactgaacttgtagacattgagaaggctattgcacattatgaacaatctgctgattattacaaaggagaagaatccaacagctcagcaaacaagtgtctgctgaaggtggcagcatatgctgcccagcttgagcagtaccagaaagccattgagatctatgagcaggttggggcaaacacaatggataatcctttgttgaaatacagtgcaaaggattacttcttcaaagctgccctctgccacttcatagtagacgagttgaatgccaagcttgctcttgagaaatatgaggaaatgtttccagcatttactgattcaagagaatgtaaattattgaaaaaactcctagaagctcatgaagaacagaacagtgaagcttacactgaagcagtgaaggaatttgactcaatatctcgcttggatcagtggctgaccaccatgttgcttcgcatcaaaaagtccatccaaggggatggagaaggagatggagacctaaaatgaaatgtttttgtctttgtggcatgcagctaactcctctttagttttgtcttagggtcaagtgatctttatgggatgcctatttaatggcttaattttgttgcatatgagccagacggcctgtgtattgtttaagctcgccaagtctgtgttgctgtgaaatgaatgaaggagaggctcctgttcatcttgtggtaatgatgggttgtttcatgcttatcagaacccccagcgttttctgagaagtacttcagaatctcattcctcatatttcattggtatttgtggagcctatgtttaatgttgccacgtgtttttatgtcctttttgttggacttgagtactcagcccagttgttctcatagatgctttgcattttctctgtgctttggcatctgaatatgttctttaaatgtgtgtttagtttaggacagttactaggaatgagtttataacttcattagaaatcatttctatttttgttatcctgtgattattttgatggtgctagtgactagtttctttgctttttgtgttgttccgtatgctaacatgtgcatggcaaaaatttagaatagccagggtctgtaggcatcacattgtgaggaagggagctttctggaagtacttgcttcatgtatggatgagtgtcaaagtgaatttgatttgtacttagacacacgcgtttacacacacacacatatcacaagatctgttagaaatggaatttttctctttttctggagatagttttcacttttagttggagtggaaatccctttatatttacattgaagtattttaattggcatagcctgctcattattttcatgtttatacactttcccacgttgaggtggtgtgttctgtgctgtgactatagaaatcttggtcagggctggatagattatctaagtcaagcttgagaatgaatgtatgtaattttcctgtttattgtacatgatgggttaggtggggtgaatgtggtacaggaatgtcctgtatgcccaagtgggcaagaaccccaacttgtttctcaggggacttgattgttctcttagctggtggaatatgttggcttatgtgtttgaactctgtcgtgtttaattggtttatataatatatgtatgctatcttgattcatgaacttgatcctattaatttatatgctgatattgtactttagacatacgcttgtctcctgaatgtcctctgaatatttatagttaaatgatttatatttgaaatgtgttgccagacttaacccagcagacactctgacatcacggagcttcactgatgacaggtaacgaaacttcctatgttatgtcaggtagtagtaagtagtattggaatgatgttttcatttttggtggctctcaactggaattggtagtgtttccaggccaagggtcgactgcaggttgtttgagaaatgatgagtaggtcagtctaggaagaaagagaaagtagcaggaaaggaagtgggaagggccagccaaggacagactgtagaggatccacatcaggtggccacgaggacttgcaggctatagttatggtggtgacatgcatgaggtgggctggtagagcaggaagctctgtgatgtcagagcatctactgggactacaggtgcactgtagtccccactactgggggtggcaatgaagacactctgtctgttgggccctagaatttaatgtggatttcctccttccttccaagttctgagattcttaaatgagagctggctgtcttctagaggtaagacctggaatggagtccagttggtactttttcactccctcttagaatctcttatgaaaaaatgatcagagagaaaagtggggttttgtttccccacctaataatatatcctacaaccagccaaatgcacttttgtgaaaatggggtgtgaggagtggttctgcagcttgagtcctctggttttaagtagtttgtttctacttgtttaaagaatcttctggtctgaccacttaaagtaaaaactacatgatttattttcgggcaattatgtttagctttcatcattatactccaacagacccgtctgaaggggtatttttttttaacaataatgtttgtaacattttgttgtgtcaattagagggtcacttgtttgtattgcaataaacactgggaccagttccggggttaagaattaatttttgtttttaatatttcacatgaaaagaatcaaagtaattgtaatggctagaagagacctgccagaagattaaaaaaaagaatgagagaaaagcccagttagtggtgtgcaaacttacttcctttaaatgtcccatggatgtaggacagtgccatgtttcaagatgcctgtgagctaggtcttcaagatttatagaatgttacttatgaacaaaatataattatttatggtacaattcttgtactttagcaaatctggagttagttcatagtcaaagtcagttaatatttcttagaggaaagttttgctttttgtggcaacatttttatagcttgtgtgagttcttttttatttaatgatttgaaagcagtatttttgcacagtcgtgaccgtgtgtggtggcgtcactgtaaccaaagtatatgcaccagcccttgtgcatttattgtttctcctgattttgtggatttaaatgtccaaatgcaaacctttgtgacttcctttggaggacttggcagcacagcatgcccccgtgacctgcctgctgtggtatgagctatgaccaagagcaggcttcctgctccatggagtcctgagttgctctggggcaggggattacgttatgaaaactaaccatgtgtaacaataaatctaccttagcagaaaaagta

SEQ ID NO: 675 - DNA, 4458 bp, HOMO SAPIENS
gaggtgccggcggctggcggccgcggagtcttcggcgagacctaccgggccctgtctgtgccggccgtgagctgcggcaggacggctggagattacttctctaacaggatcaccagtttgctccacaaagcacaatgtctcgatcacgacaacccccccttgtgaccggcatctctccaaatgaagggataccatggacgaaggtcacaatcaggggagaaaatctggggactggccccaccgacctcataggcttgaccatttgtggacataattgcctcctgacggcagaatggatgtctgcaagtaaaatagtatgtcgagtgggacaagccaaaaatgacaaaggagacattattgtcaccactaagtcaggtggcagaggaacctcaacagtctctttcaagctactcaaacctgagaaaataggcattttggatcagtctgctgtgtgggttgatgaaatgaattattatgatatgcgcactgacaggaacaaaggaattccgcccttgtccttacgtcctgctaacccgcttggcattgagattgaaaaaagtaaattttcgcagaaggacttagaaatgctattccatggaatgagtgctgattttacaagtgagaatttctcagcagcctggtatcttatagagaatcactcaaacaccagttttgagcagctcaaaatggcagtcaccaacctaaagagacaggctaacaagaagagtgagggcagcctggcctatgtgaaaggcggtctcagtacattcttcgaagcacaggatgccctctcagccatccatcaaaaactagaagcagatggaacggaaaaagtagaaggatccatgacgcagaaactggagaatgttctgaacagagcaagtaatactgcagacacattgtttcaagaagtattaggtcggaaagacaaggcagattccactagaaatgcactcaatgtgcttcagcgatttaagtttcttttcaaccttcctctaaatattgaaaggaatattcaaaagggtgattatgatgtggttattaatgattatgaaaaggccaagtcactttttgggaaaacggaggtgcaagttttcaagaaatattatgctgaagtagaaacaaggattgaagctttaagagaattacttctggataaattgcttgagacaccatcaactttacatgaccaaaaacgttacataaggtacctgtctgaccttcatgcgtctggtgaccctgcttggcaatgcattggagcccaacacaagtggatccttcagctcatgcacagttgcaaagagggctacgtgaaagatctgaaaggtaacccaggcctgcacagtcccatgttggatcttgataatgatacacgtccctcagtgttgggccatctcagtcagacagcgtccctgaagaggggcagcagctttcagtctggtcgagacgacacgtggagatacaaaactccccacagggtggcctttgttgaaaaattgacaaaactcgtcttgagccagctgcctaacttctggaaactctggatctcctacgttaatggaagcctcttcagtgagactgctgagaagtcaggccagattgaaagatcaaagaatgtaaggcaaagacaaaatgattttaagaaaatgattcaggaagtaatgcactccctggtgaagcttacccgcggagccctgcttcccctcagcatccgggatggggaagccaagcagtacggaggctgggaggtgaagtgcgagctctccggacagtggctcgctcacgccatccagactgtaagacttactcatgaatcgttgactgcccttgaaattcctaatgacctgttacagactatccaggatctcatcttggatctccgagtacgttgcgtaatggccacgttgcagcacacggcggaagaaataaagagattagctgaaaaagaagactggattgttgacaatgaaggactgacttctctaccatgtcagtttgaacagtgcatcgtgtgttctctgcagtcactgaagggggttctggagtgcaagccgggagaggccagtgtcttccaacaacctaaaacacaggaggaggtttgccagctaagcatcaatataatgcaggtttttatatactgtctggaacagttgagcaccaagcctgatgcagatatagatactacacatctctctgttgatgtttcttcccctgacttgtttggaagtatccatgaagacttcagcttgacctcagaacagcgccttttgatagtcctaagtaattgctgctatctagaacgtcacaccttcctaaatatcgcagaacattttgaaaagcacaacttccagggaatagaaaaaatcacacaggttagcatggcctcattgaaagaactagatcaaagactctttgaaaattacatcgagttgaaagcagatcccatcgttggctccttagaacctggaatttatgcaggatattttgattggaaggactgcctgcctccaacaggtgtcagaaactatttaaaagaagcactggtgaatataattgccgtgcatgcagaggtgttcaccatttccaaagaactggtccctcgggtactatccaaggtgatagaagcagtttctgaagagctcagtcgactgatgcagtgtgtttcatccttcagcaaaaatggagctttacaggcgagacttgaaatctgtgctttgagggacactgtggctgtttacctgacacccgaaagcaagtcaagttttaagcaggctttggaagccctgccccagctttccagtggagcagataaaaagttactggaagagctcctgaacaagttcaagagtagcatgcacttgcagctcacctgtttccaagcagcttcttcaaccatgatgaaaacataaatatctgccacataaaagaagtccaggaaaataacacgtaataagactgttcactctctaagtaccctaaaggtatttggtgtattaaacattgggtttgccatttttctcttttttcttcctctgacttcgaaaattgttggtatacatttcaaccaaaatgacctcatttgaaatgcccaggaagtatttgttttgccattcttactagatcagatcctgtatgactttaaaatacattttaaaatatattttgcatctcagcagaaggttgagtgctgcaggaagagctgcttctgcagggagttttctggaatggcgtggcacatattgaagcatttctcagtgtcccgttcacggaagcgcaggcagctcccacgacacacggagagactgactgatacgagatttggaaagctatgtagacatctttggagctcttactgtcctaaactgtacagctgtgcttaaaaccctcatttcatataaatggccttaagttttctaattcaagcgggtttttggaaaaatttatggtctccattaaaatacatattacaactggggtagattatttgtggtccaggtgtctgtgatttaactttgcgttttgctatctgatttttatttttcacagggctaagcatgagctttcattctcactcactcttaatttgtcgtgcgtcactacacatgcacgtgttgcagtccctgaggccctgtgtgttatctgtgatggagtgtgaatgtgtaacgggcactgtgttacactctgaggtgttggcggggcggtcgcagacttcagggtcccctaacggaaaggccaggctccgcgtggacggccaactccctgcccgctccttcagcaggtgactgtctctgccacttcttacctgctgaaggatcttgctcagtagctggaacaatgctgctgtcacacagtctcttctctgaaacttcaggatgctccttggtcaccaggcaatgggagctgtagaccagccgcatgcacttgccccacattcactgctgactggcttcactggaataggttcaggtcaccgggacttctctcagagtcagcggcccacccaactccctcataccgtcgcatctgaaaattttcagagaggaattctctttgtagtcggcttgtcagggttttcaagtttttctatggttatttttaaatctctttttttaaatgctaaaattaatgtcctcattaatgcaagtaattttagagcacagtgtagccatgtacagtttccattatttaaaataaataaatgtgttggttcatttggtgtatggggggacatcatggtaactggaaatgaaagtttaatctttcacaaatgtgcttgataaagctgttaagaattgtctttcctaagtatgttaactgttgtatctaactcaactgtgagctaagtttaaaaactgcaatcatgaatgtttgtgatattttaaatatctactacagcacattcagccaataaagaatctgcctttaatgtaagttgtaatttaaaaaaaaaaaaaaaaa

SEQ ID NO: 676 - DNA, 13147 bp, HOMO SAPIENS
ccggagcccgagccgaagggcgagccgcaaacgctaagtcgctggccattggtggacatggcgcaggcgcgtttgctccgacgggccgaatgttttggggcagtgttttgagcgcggagaccgcgtgatactggatgcgcatgggcataccgtgctctgcggctgcttggcgttgcttcttcctccagaagtgggcgctgggcagtcacgcagggtttgaaccggaagcgggagtaggtagctgcgtggctaacggagaaaagaagccgtggccgcgggaggaggcgagaggagtcgggatctgcgctgcagccaccgccgcggttgatactactttgaccttccgagtgcagtgacagtgatgtgtgttctgaaattgtgaaccatgagtctagtacttaatgatctgcttatctgctgccgtcaactagaacatgatagagctacagaacgaaagaaagaagttgagaaatttaagcgcctgattcgagatcctgaaacaattaaacatctagatcggcattcagattccaaacaaggaaaatatttgaattgggatgctgtttttagatttttacagaaatatattcagaaagaaacagaatgtctgagaatagcaaaaccaaatgtatcagcctcaacacaagcctccaggcagaaaaagatgcaggaaatcagtagtttggtcaaatacttcatcaaatgtgcaaacagaagagcacctaggctaaaatgtcaagaactcttaaattatatcatggatacagtgaaagattcatctaatggtgctatttacggagctgattgtagcaacatactactcaaagacattctttctgtgagaaaatactggtgtgaaatatctcagcaacagtggttagaattgttctctgtgtacttcaggctctatctgaaaccttcacaagatgttcatagagttttagtggctagaataattcatgctgttaccaaaggatgctgttctcagactgacggattaaattccaaatttttggactttttttccaaggctattcagtgtgcgagacaagaaaagagctcttcaggtctaaatcatatcttagcagctcttactatcttcctcaagactttggctgtcaactttcgaattcgagtgtgtgaattaggagatgaaattcttcccactttgctttatatttggactcaacataggcttaatgattctttaaaagaagtcattattgaattatttcaactgcaaatttatatccatcatccgaaaggagccaaaacccaagaaaaaggtgcttatgaatcaacaaaatggagaagtattttatacaacttatatgatctgctagtgaatgagataagtcatataggaagtagaggaaagtattcttcaggatttcgtaatattgccgtcaaagaaaatttgattgaattgatggcagatatctgtcaccaggtttttaatgaagataccagatccttggagatttctcaatcttacactactacacaaagagaatctagtgattacagtgtcccttgcaaaaggaagaaaatagaactaggctgggaagtaataaaagatcaccttcagaagtcacagaatgattttgatcttgtgccttggctacagattgcaacccaattaatatcaaagtatcctgcaagtttacctaactgtgagctgtctccattactgatgatactatctcagcttctaccccaacagcgacatggggaacgtacaccatatgtgttacgatgccttacggaagttgcattgtgtcaagacaagaggtcaaacctagaaagctcacaaaagtcagatttattaaaactctggaataaaatttggtgtattacctttcgtggtataagttctgagcaaatacaagctgaaaactttggcttacttggagccataattcagggtagtttagttgaggttgacagagaattctggaagttatttactgggtcagcctgcagaccttcatgtcctgcagtatgctgtttgactttggcactgaccaccagtatagttccaggaacggtaaaaatgggaatagagcaaaatatgtgtgaagtaaatagaagcttttctttaaaggaatcaataatgaaatggctcttattctatcagttagagggtgacttagaaaatagcacagaagtgcctccaattcttcacagtaattttcctcatcttgtactggagaaaattcttgtgagtctcactatgaaaaactgtaaagctgcaatgaattttttccaaagcgtgccagaatgtgaacaccaccaaaaagataaagaagaactttcattctcagaagtagaagaactatttcttcagacaacttttgacaagatggactttttaaccattgtgagagaatgtggtatagaaaagcaccagtccagtattggcttctctgtccaccagaatctcaaggaatcactggatcgctgtcttctgggattatcagaacagcttctgaataattactcatctgagattacaaattcagaaactcttgtccggtgttcacgtcttttggtgggtgtccttggctgctactgttacatgggtgtaatagctgaagaggaagcatataagtcagaattattccagaaagccaagtctctaatgcaatgtgcaggagaaagtatcactctgtttaaaaataagacaaatgaggaattcagaattggttccttgagaaatatgatgcagctatgtacacgttgcttgagcaactgtaccaagaagagtccaaataagattgcatctggctttttcctgcgattgttaacatcaaagctaatgaatgacattgcagatatttgtaaaagtttagcatccttcatcaaaaagccatttgaccgtggagaagtagaatcaatggaagatgatactaatggaaatctaatggaggtggaggatcagtcatccatgaatctatttaacgattaccctgatagtagtgttagtgatgcaaacgaacctggagagagccaaagtaccataggtgccattaatcctttagctgaagaatatctgtcaaagcaagatctacttttcttagacatgctcaagttcttgtgtttgtgtgtaactactgctcagaccaatactgtgtcctttagggcagctgatattcggaggaaattgttaatgttaattgattctagcacgctagaacctaccaaatccctccacctgcatatgtatctaatgcttttaaaggagcttcctggagaagagtaccccttgccaatggaagatgttcttgaacttctgaaaccactatccaatgtgtgttctttgtatcgtcgtgaccaagatgtttgtaaaactattttaaaccatgtccttcatgtagtgaaaaacctaggtcaaagcaatatggactctgagaacacaagggatgctcaaggacagtttcttacagtaattggagcattttggcatctaacaaaggagaggaaatatatattctctgtaagaatggccctagtaaattgccttaaaactttgcttgaggctgatccttattcaaaatgggccattcttaatgtaatgggaaaagactttcctgtaaatgaagtatttacacaatttcttgctgacaatcatcaccaagttcgcatgttggctgcagagtcaatcaatagattgttccaggacacgaagggagattcttccaggttactgaaagcacttcctttgaagcttcagcaaacagcttttgaaaatgcatacttgaaagctcaggaaggaatgagagaaatgtcccatagtgctgagaaccctgaaactttggatgaaatttataatagaaaatctgttttactgacgttgatagctgtggttttatcctgtagccctatctgcgaaaaacaggctttgtttgccctgtgtaaatctgtgaaagagaatggattagaacctcaccttgtgaaaaaggttttagagaaagtttctgaaacttttggatatagacgtttagaagactttatggcatctcatttagattatctggttttggaatggctaaatcttcaagatactgaatacaacttatcttcttttccttttattttattaaactacacaaatattgaggatttctatagatcttgttataaggttttgattccacatctggtgattagaagtcattttgatgaggtgaagtccattgctaatcagattcaagaggactggaaaagtcttctaacagactgctttccaaagattcttgtaaatattcttccttattttgcctatgagggtaccagagacagtgggatggcacagcaaagagagactgctaccaaggtctatgatatgcttaaaagtgaaaacttattgggaaaacagattgatcacttattcattagtaatttaccagagattgtggtggagttattgatgacgttacatgagccagcaaattctagtgccagtcagagcactgacctctgtgacttttcaggggatttggatcctgctcctaatccacctcattttccatcgcatgtgattaaagcaacatttgcctatatcagcaattgtcataaaaccaagttaaaaagcattttagaaattctttccaaaagccctgattcctatcagaaaattcttcttgccatatgtgagcaagcagctgaaacaaataatgtttataagaagcacagaattcttaaaatatatcacctgtttgttagtttattactgaaagatataaaaagtggcttaggaggagcttgggcctttgttcttcgagacgttatttatactttgattcactatatcaaccaaaggccttcttgtatcatggatgtgtcattacgtagcttctccctttgttgtgacttattaagtcaggtttgccagacagccgtgacttactgtaaggatgctctagaaaaccatcttcatgttattgttggtacacttataccccttgtgtatgagcaggtggaggttcagaaacaggtattggacttgttgaaatacttagtgatagataacaaggataatgaaaacctctatatcacgattaagcttttagatccttttcctgaccatgttgtttttaaggatttgcgtattactcagcaaaaaatcaaatacagtagaggacccttttcactcttggaggaaattaaccattttctctcagtaagtgtttatgatgcacttccattgacaagacttgaaggactaaaggatcttcgaagacaactggaactacataaagatcagatggtggacattatgagagcttctcaggataatccgcaagatgggattatggtgaaactagttgtcaatttgttgcagttatccaagatggcaataaaccacactggtgaaaaagaagttctagaggctgttggaagctgcttgggagaagtgggtcctatagatttctctaccatagctatacaacatagtaaagatgcatcttataccaaggcccttaagttatttgaagataaagaacttcagtggaccttcataatgctgacctacctgaataacacactggtagaagattgtgtcaaagttcgatcagcagctgttacctgtttgaaaaacattttagccacaaagactggacatagtttctgggagatttataagatgacaacagatccaatgctggcctatctacagccttttagaacatcaagaaaaaagtttttagaagtacccagatttgacaaagaaaacccttttgaaggcctggatgatataaatctgtggattcctctaagtgaaaatcatgacatttggataaagacactgacttgtgcttttttggacagtggaggcacaaaatgtgaaattcttcaattattaaagccaatgtgtgaagtgaaaactgacttttgtcagactgtacttccatacttgattcatgatattttactccaagatacaaatgaatcatggagaaatctgctttctacacatgttcagggatttttcaccagctgtcttcgacacttctcgcaaacgagccgatccacaacccctgcaaacttggattcagagtcagagcactttttccgatgctgtttggataaaaaatcacaaagaacaatgcttgctgttgtggactacatgagaagacaaaagagaccttcttcaggaacaatttttaatgatgctttctggctggatttaaattatctagaagttgccaaggtagctcagtcttgtgctgctcactttacagctttactctatgcagaaatctatgcagataagaaaagtatggatgatcaagagaaaagaagtcttgcatttgaagaaggaagccagagtacaactatttctagcttgagtgaaaaaagtaaagaagaaactggaataagtttacaggatcttctcttagaaatctacagaagtataggggagccagatagtttgtatggctgtggtggagggaagatgttacaacccattactagactacgaacatatgaacacgaagcaatgtggggcaaagccctagtaacatatgacctcgaaacagcaatcccctcatcaacacgccaggcaggaatcattcaggccttgcagaatttgggactctgccatattctttccgtctatttaaaaggattggattatgaaaataaagactggtgtcctgaactagaagaacttcattaccaagcagcatggaggaatatgcagtgggaccattgcacttccgtcagcaaagaagtagaaggaaccagttaccatgaatcattgtacaatgctctacaatctctaagagacagagaattctctacattttatgaaagtctcaaatatgccagagtaaaagaagtggaagagatgtgtaagcgcagccttgagtctgtgtattcgctctatcccacacttagcaggttgcaggccattggagagctggaaagcattggggagcttttctcaagatcagtcacacatagacaactctctgaagtatatattaagtggcagaaacactcccagcttctcaaggacagtgattttagttttcaggagcctatcatggctctacgcacagtcattttggagatcctgatggaaaaggaaatggacaactcacaaagagaatgtattaaggacattctcaccaaacaccttgtagaactctctatactggccagaactttcaagaacactcagctccctgaaagggcaatatttcaaattaaacagtacaattcagttagctgtggagtctctgagtggcagctggaagaagcacaagtattctgggcaaaaaaggagcagagtcttgccctgagtattctcaagcaaatgatcaagaagttggatgccagctgtgcagcgaacaatcccagcctaaaacttacatacacagaatgtctgagggtttgtggcaactggttagcagaaacgtgcttagaaaatcctgcggtcatcatgcagacctatctagaaaaggcagtagaagttgctggaaattatgatggagaaagtagtgatgagctaagaaatggaaaaatgaaggcatttctctcattagcccggttttcagatactcaataccaaagaattgaaaactacatgaaatcatcggaatttgaaaacaagcaagctctcctgaaaagagccaaagaggaagtaggtctccttagggaacataaaattcagacaaacagatacacagtaaaggttcagcgagagctggagttggatgaattagccctgcgtgcactgaaagaggatcgtaaacgcttcttatgtaaagcagttgaaaattatatcaactgcttattaagtggagaagaacatgatatgtgggtattccgactttgttccctctggcttgaaaattctggagtttctgaagtcaatggcatgatgaagagagacggaatgaagattccaacatataaatttttgcctcttatgtaccaattggctgctagaatggggaccaagatgatgggaggcctaggatttcatgaagtcctcaataatctaatctctagaatttcaatggatcacccccatcacactttgtttattatactggccttagcaaatgcaaacagagatgaatttctgactaaaccagaggtagccagaagaagcagaataactaaaaatgtgcctaaacaaagctctcagcttgatgaggatcgaacagaggctgcaaatagaataatatgtactatcagaagtaggagacctcagatggtcagaagtgttgaggcactttgtgatgcttatattatattagcaaacttagatgccactcagtggaagactcagagaaaaggcataaatattccagcagaccagccaattactaaacttaagaatttagaagatgttgttgtccctactatggaaattaaggtggaccacacaggagaatatggaaatctggtgactatacagtcatttaaagcagaatttcgcttagcaggaggtgtaaatttaccaaaaataatagattgtgtaggttccgatggcaaggagaggagacagcttgttaagggccgtgatgacctgagacaagatgctgtcatgcaacaggtcttccagatgtgtaatacattactgcagagaaacacggaaactaggaagaggaaattaactatctgtacttataaggtggttcccctctctcagcgaagtggtgttcttgaatggtgcacaggaactgtccccattggtgaatttcttgttaacaatgaagatggtgctcataaaagatacaggccaaatgatttcagtgcctttcagtgccaaaagaaaatgatggaggtgcaaaaaaagtcttttgaagagaaatatgaagtcttcatggatgtttgccaaaattttcaaccagttttccgttacttctgcatggaaaaattcttggatccagctatttggtttgagaagcgattggcttatacgcgcagtgtagctacttcttctattgttggttacatacttggacttggtgatagacatgtacagaatatcttgataaatgagcagtcagcagaacttgtacatatagatctaggtgttgcttttgaacagggcaaaatccttcctactcctgagacagttccttttagactcaccagagatattgtggatggcatgggcattacgggtgttgaaggtgtcttcagaagatgctgtgagaaaaccatggaagtgatgagaaactctcaggaaactctgttaaccattgtagaggtccttctatatgatccactctttgactggaccatgaatcctttgaaagctttgtatttacagcagaggccggaagatgaaactgagcttcaccctactctgaatgcagatgaccaagaatgcaaacgaaatctcagtgatattgaccagagtttcaacaaagtagctgaacgtgtcttaatgagactacaagagaaactgaaaggagtggaagaaggcactgtgctcagtgttggtggacaagtgaatttgctcatacagcaggccatagaccccaaaaatctcagccgacttttcccaggatggaaagcttgggtgtgatcttcagtatatgaattaccctttcattcagcctttagaaattatattttagcctttatttttaacctgccaacatactttaagtagggattaatatttaagtgaactattgtgggtttttttgaatgttggttttaatacttgatttaatcaccactcaaaaatgttttgatggtcttaaggaacatctctgctttcactctttagaaataatggtcattcgggctgggcgcagcggctcacgcctgtaatcccagcactttgggaggccgaggtgagcggatcacaaggtcaggagttcgagaccagcctggccaagagaccagcctggccagtatggtgaaaccctgtctctactaaaaatacaaaaattagccgagcatggtggcgggcacctgtaatcccagctactcgagaggctgaggcaggagaatctcttgaacctgggaggtgaaggttgctgtgggccaaaatcatgccattgcactccagcctgggtgacaagagcgaaactccatctcaaaaaaaaaaaaaaaaaaacagaaacgtatttggatttttcctagtaagatcactcagtgttactaaataatgaagttgttatggagaacaaatttcaaagacacagttagtgtagttactatttttttaagtgtgtattaaaacttctcattctattctctttatcttttaagcccttctgtactgtccatgtatgttatctttctgtgataacttcatagattgccttctagttcatgaattctcttgtcagatgtatataatctcttttaccctatccattgggcttcttctttcagaaattgtttttcatttctaattatgcatcatttttcagatctctgtttcttgatgtcatttttaatgtttttttaatgttttttatgtcactaattattttaaatgtctgtacttgatagacactgtaatagttctattaaatttagttcctgctgtttatatctgttgatttttgtatttgataggctgttcatccagttttgtctttttgaaaagtgagtttattttcagcaaggctttatctatgggaatcttgagtgtctgtttatgtcatattcccagggctgttgctgcacacaagcccattcttattttaatttcttggctttagggtttccatacctgaagtgtagcataaatactgataggagatttcccaggccaaggcaaacacacttcctcctcatctccttgtgctagtgggcagaatatttgattgatgcctttttcactgagagtataagcttccatgtgtcccacctttatggcaggggtggaaggaggtacatttaattcccactgcctgcctttggcaagccctgggttctttgctccccatatagatgtctaagctaaaagccgtgggttaatgagactggcaaattgttccaggacagctacagcatcagctcacatattcacctctctggtttttcattcccctcatttttttctgagacagagtcttgctctgtcacccaggctggagtgcagtggcatgatctcagctcactgaaacctctgcctcctgggttcaagcaattctcctgcctcagcctcccgagtagctgggactacaggcgtgtgccaacacgcccggctaattttttgtatttttattagagacggagtttcaccgtgttagccaggatggtctcgatcgcttgacctcgtgatccaccctcctcggcctcccaaagtgctgggattacaggtgtgagccaccgcgcccggcctcattcccctcatttttgaccgtaaggatttcccctttcttgtaagttctgctatgtatttaaaagaatgttttctacattttatccagcatttctctgtgttctgttggaagggaagggcttaggtatctagtttgatacataggtagaagtggaacatttctctgtcccccagctgtcatcatataagataaacatcagataaaaagccacctgaaagtaaaactactgactcgtgtattagtgagtataatctcttctccatccttaggaaaatgttcatcccagctgcggagattaacaaatgggtgattgagctttctcctcgtatttggaccttgaaggttatataaatttttttcttatgaagagttggcatttctttttattgccaatggcaggcactcattcatatttgatctcctcaccttcccctcccctaaaaccaatctccagaactttttggactataaatttcttggtttgacttctggagaactgttcagaatattactttgcatttcaaattacaaacttaccttggtgtatctttttcttacaagctgcctaaatgaatatttggtatatattggtagttttattactatagtaaatcaaggaaatgcagtaaacttaaaatgtctttaagaaagccctgaaatcttcatgggtgaaattagaaattatcaactagataatagtatagataaatgaatttgtagctaattcttgctagttgttgcatccagagagctttgaataacatcattaatctactctttagccttgcatggtatgctatgaggctcctgttctgttcaagtattctaatcaatggctttgaaaagtttatcaaatttacatacagatcacaagcctaggagaaataactaattcacagatgacagaattaagattataaaagattttttttttgtaattttagtagagacagggttgccattgtattccagccttggcgacagagcaagactctgcctcaaaaaaaaaaaaaaaaaggttttggcaagctggaactctttctgcaaatgactaagatagaaaactgccaaggacaaatgaggagtagttagattttgaaaatattaatcatagaatagttgttgtatgctaagtcactgacccatattatgtacagcatttctgatctttactttgcaagattagtgatactatcccaatacactgctggagaaatcagaatttggagaaataagttgtccaaggcaagaagatagtaaattataagtacaagtgtaatatggacagtatctaacttgaaaagatttcaggcgaaaagaatctggggtttgccagtcagttgctcaaaaggtcaatgaaaaccaaatagtgaagctatcagagaagctaataaattatagactgcttgaacagttgtgtccagattaagggagataatagctttcccaccctactttgtgcaggtcatacctccccaaagtgtttacctaatcagtaggttcacaaactcttggtcattatagtatatgcctaaaatgtatgcacttaggaatgctaaaaatttaaatatggtctaaagcaaataaaagcaaagaggaaaaactttggacagcgtaaagactagaatagtcttttaaaaagaaagccagtatattggtttgaaatatagagatgtgtcccaatttcaagtattttaattgcaccttaatgaaattatctattttctatagattttagtactattgaatgtattactttactgttacctgaatttattataaagtgtttttgaataaataattctaaaagc

SEQ ID NO: 677 - DNA, 2510 bp, HOMO SAPIENS
gcacctcgctgctccagcctctggggcgcattccaaccttccagcctgcgacctgcggagaaaaaaaattacttattttcttgccccatacataccttgaggcgagcaaaaaaattaaattttaaccatgagggaaatcgtgcacatccaggctggtcagtgtggcaaccagatcggtgccaagttctgggaggtgatcagtgatgaacatggcatcgaccccaccggcacctaccacggggacagcgacctgcagctggaccgcatctctgtgtactacaatgaagccacaggtggcaaatatgttcctcgtgccatcctggtggatctagaacctgggaccatggactctgttcgctcaggtccttttggccagatctttagaccagacaactttgtatttggtcagtctggggcaggtaacaactgggccaaaggccactacacagagggcgccgagctggttgattctgtcctggatgtggtacggaaggaggcagagagctgtgactgcctgcagggcttccagctgacccactcactgggcgggggcacaggctctggaatgggcactctccttatcagcaagatccgagaagaataccctgatcgcatcatgaataccttcagtgtggtgccttcacccaaagtgtctgacaccgtggtcgagccctacaatgccaccctctccgtccatcagttggtagagaatactgatgagacctattgcattgacaacgaggccctctatgatatctgcttccgcactctgaagctgaccacaccaacctacggggatctgaaccaccttgtctcagccaccatgagtggtgtcaccacctgcctccgtttccctggccagctcaatgctgacctccgcaagttggcagtcaacatggtccccttcccacgtctccatttctttatgcctggctttgcccctctcaccagccgtggaagccagcagtatcgagctctcacagtgccggaactcacccagcaggtcttcgatgccaagaacatgatggctgcctgtgacccccgccacggccgatacctcaccgtggctgctgtcttccgtggtcggatgtccatgaaggaggtcgatgagcagatgcttaacgtgcagaacaagaacagcagctactttgtggaatggatccccaacaatgtcaagacagccgtctgtgacatcccacctcgtggcctcaagatggcagtcaccttcattggcaatagcacagccatccaggagctcttcaagcgcatctcggagcagttcactgccatgttccgccggaaggccttcctccactggtacacaggcgagggcatggacgagatggagttcaccgaggctgagagcaacatgaacgacctcgtctctgagtatcagcagtaccaggatgccaccgcagaagaggaggaggatttcggtgaggaggccgaagaggaggcctaaggcagagcccccatcacctcaggcttctcagttcccttagccgtcttactcaactgcccctttcctctccctcagaatttgtgtttgctgcctctatcttgttttttgttttttcttctggggggggtctagaacagtgcctggcacatagtaggcgctcaataaatacttgtttgttgaatgtctcctctctctttccactctgggaaacctaggtttctgccattctgggtgaccctgtatttctttctggtgcccattccatttgtccagttaatacttcctcttaaaaatctccaagaagctgggtctccagatcccatttagaaccaaccaggtgctgaaaacacatgtagataatggccatcatcctaagcccaaagtagaaaatggtagaaggtagtgggtagaagtcactatataaggaaggggatgggattttccattctaaaagttttggagagggaaatccaggctattaaagtcactaaatttctaagtatgtccatttcccatctcagcttcaagggaggtgtcagcagtattatctccactttcaatctccctccaagctctactctggaggagtctgtcccactctgtcaagtggaatccttccctttccaactctacctccctcactcagctcctttcccctgatcagagaaagggatcaagggggttgggaggggggaaagagaccagccttggtccctaagcctccagaaacgtcttcttaatccccaccttttcttactcccaaaaaagaatgaacacccctgactctggagtggtgtatactgccacatcagtgtttgagtcagtccccagaggagaggggaaccctcctccatcttttttgcaacatctcatttcttccttttgctgttgcttcccccctcacacacttggttttgttctatcctacatttgagatttctattttatgttgaacttgctgctttttttcatattgaaaagatgacatcgccccaagagccaaaaataaatgggaattgaaaaaaaaaaaaaaaaaaaaaaaaaaaaa

SEQ ID NO: 678 - DNA, 10527 bp, HOMO SAPIENS
gcggcccggtgcgggtgtcggggagaccgggctctctgcccggcgcggcgcggcgcggctcggcccacgagcgaccaccgacatggagtgggctcgggcggccaagtagccgcttctccggagcccggtgccagtgccgcccgcagcccgccttccacccccggccgcgccgccggtcaggccctagggtgaagccgggaggaaaatgaagagttttcaccggaatccgttgaaaataggactgactgcaaagccttaaagaaagaaggacctcgggaggagaaacgaaaagccgcctccgggcaagacttggcgtgctccgagccgaggggctgcttcagggacctcgccccctccctttcccgctggagaaattgccgctgatgcattatccaagtggtggttgggaggatttgcagcaacatttttggttttccctcccccttctatgcattctgtttttttcctcccttttctgtttttcttcttcccgggaagtgaattgctgatgcaaatcggactttattcattaatgatgcaaccggattcgtttcaggattacgttgcacgagttgaattttgaatgaaggagaagagtttttttttttttttttaaagaagtgttgactctctagttcgttgtacttttaattattattttatttaaatatacgacttaattgtattcttttaaaaatgcattaagtatatattttatggtaatttaccctcaaaatatatgtatatgggtgaaattgaagacgcttcagttaagtgaggttactggtgtgttggatgtttaattcagcaccagcattgcatgacagttgtttgaataacaagtggtttatttttaaaaccataccttttaaaatttaggttcagataatagtaaaagtcatcataataatttaaaggaaaaccagcagaaatcgaagcaaacatgtctggagaagtgcgtttgaggcagttggagcagtttattttggacgggcccgctcagaccaatgggcagtgcttcagtgtggagacattactggatatactcatctgcctttatgatgaatgcaataattctccattgagaagagagaagaacattctcgaatacctagaatgggctaaaccatttacttctaaagtgaaacaaatgcgattacatagagaagactttgaaatattaaaggtgattggtcgaggagcttttggggaggttgctgtagtaaaactaaaaaatgcagataaagtgtttgccatgaaaatattgaataaatgggaaatgctgaaaagagctgagacagcatgttttcgtgaagaaagggatgtattagtgaatggagacaataaatggattacaaccttgcactatgctttccaggatgacaataacttatacctggttatggattattatgttggtggggatttgcttactctactcagcaaatttgaagatagattgcctgaagatatggctagattttacttggctgagatggtgatagcaattgactcagttcatcagctacattatgtacacagagacattaaacctgacaatatactgatggatatgaatggacatattcggttagcagattttggttcttgtctgaagctgatggaagatggaacggttcagtcctcagtggctgtaggaactccagattatatctctcctgaaatccttcaagccatggaagatggaaaagggagatatggacctgaatgtgactggtggtctttgggggtctgtatgtatgaaatgctttacggagaaacaccattttatgcagaatcgctggtggagacatacggaaaaatcatgaaccacaaagagaggtttcagtttccagcccaagtgactgatgtgtctgaaaatgctaaggatcttattcgaaggctcatttgtagcagagaacatcgacttggtcaaaatggaatagaagactttaagaaacacccatttttcagtggaattgattgggataatattcggaactgtgaagcaccttatattccagaagttagtagcccaacagatacatcgaattttgatgtagatgatgattgtttaaaaaattctgaaacgatgcccccaccaacacatactgcattttctggccaccatctgccatttgttggttttacatatactagtagctgtgtactttctgatcggagctgtttaagagttacggctggtcccacctcactggatcttgatgttaatgttcagaggactctagacaacaacttagcaactgaagcttatgaaagaagaattaagcgccttgagcaagaaaaacttgaactcagtagaaaacttcaagagtcaacacagactgtccaagctctgcagtattcaactgttgatggtccactaacagcaagcaaagatttagaaataaaaaacttaaaagaagaaattgaaaaactaagaaaacaagtaacagaatcaagtcatttggaacagcaacttgaagaagctaatgctgtgaggcaagaactagatgatgcttttagacaaatcaaggcttatgaaaaacaaatcaaaacgttacaacaagaaagagaagatctaaataaggaactagtccaggctagtgagcgattaaaaaaccaatccaaagagctgaaagacgcacactgtcagaggaaactggccatgcaggaattcatggagatcaatgagcggctaacagaattgcacacccaaaaacagaaacttgctcgccatgtccgagataaggaagaagaggtggacctggtgatgcaaaaagttgaaagcttaaggcaagaactgcgcagaacagaaagagccaaaaaagagctggaagttcatacagaagctctagctgctgaagcatctaaagacaggaagctacgtgaacagagtgagcactattctaagcaactggaaaatgaattggagggactgaagcaaaaacaaattagttactcaccaggagtatgcagcatagaacatcagcaagagataaccaaactaaagactgatttggaaaagaaaagtatcttttatgaagaagaattatctaaaagagaaggaatacatgcaaatgaaataaaaaatcttaagaaagaactgcatgattcagaaggtcagcaacttgctctcaacaaagaaattatgattttaaaagacaaattggaaaaaaccagaagagaaagtcaaagtgaaagggaggaatttgaaagtgagttcaaacaacaatatgaacgagaaaaagtgttgttaactgaagaaaataaaaagctgacgagtgaacttgataagcttactactttgtatgagaacttaagtatacacaaccagcagttagaagaagaggttaaagatctagcagacaagaaagaatcagttgcacattgggaagcccaaatcacagaaataattcagtgggtcagcgatgaaaaggatgcacgagggtatcttcaggccttagcttctaaaatgactgaagaattggaggcattaagaaattccagcttgggtacacgagcaacagatatgccctggaaaatgcgtcgttttgcgaaactggatatgtcagctagactggagttgcagtcggctctggatgcagaaataagagccaaacaggccatccaagaagagttgaataaagttaaagcatctaatatcataacagaatgtaaactaaaagattcagagaagaagaacttggaactactctcagaaatcgaacagctgataaaggacactgaagagcttagatctgaaaagggtatagagcaccaagactcacagcattctttcttggcatttttgaatacgcctaccgatgctctggatcaatttgaaactgtagactccactccactttcagttcacacaccaaccttaaggaaaaaaggatgtcctggttcaactggctttccacctaagcgcaagactcaccagttttttgtaaaatcttttactactcctaccaagtgtcatcagtgtacctccttgatggtgggtttaataagacagggctgttcatgtgaagtgtgtggattctcatgccatataacttgtgtaaacaaagctccaaccacttgtccagttcctcctgaacagacaaaaggtcccctgggtatagatcctcagaaaggaataggaacagcatatgaaggtcatgtcaggattcctaagccagctggagtgaagaaagggtggcagagagcactggctatagtgtgtgacttcaaactctttctgtacgatattgctgaaggaaaagcatctcagcccagtgttgtcattagtcaagtgattgacatgagggatgaagaattttctgtgagttcagtcttggcttctgatgttatccatgcaagtcggaaagatataccctgtatatttagggtcacagcttcccagctctcagcatctaataacaaatgttcaatcctgatgctagcagacactgagaatgagaagaataagtgggtgggagtgctgagtgaattgcacaagattttgaagaaaaacaaattcagagaccgctcagtctatgttcccaaagaggcttatgacagcactctacccctcattaaaacaacccaggcagccgcaatcatagatcatgaaagaattgctttgggaaacgaagaagggttatttgttgtacatgtcaccaaagatgaaattattagagttggtgacaataagaagattcatcagattgaactcattccaaatgatcagcttgttgctgtgatctcaggacgaaatcgtcatgtacgactttttcctatgtcagcattggatgggcgagagaccgatttttacaagctgtcagaaactaaagggtgtcaaaccgtaacttctggaaaggtgcgccatggagctctcacatgcctgtgtgtggctatgaaaaggcaggtcctctgttatgaactatttcagagcaagacccgtcacagaaaatttaaagaaattcaagtcccatataatgtccagtggatggcaatcttcagtgaacaactctgtgtgggattccagtcaggatttctaagataccccttgaatggagaaggaaatccatacagtatgctccattcaaatgaccatacactatcatttattgcacatcaaccaatggatgctatctgcgcagttgagatctccagtaaagaatatctgctgtgttttaacagcattgggatatacactgactgccagggccgaagatctagacaacaggaattgatgtggccagcaaatccttcctcttgttgttacaatgcaccatatctctcggtgtacagtgaaaatgcagttgatatctttgatgtgaactccatggaatggattcagactcttcctctcaaaaaggttcgacccttaaacaatgaaggatcattaaatcttttagggttggagaccattagattaatatatttcaaaaataagatggcagaaggggacgaactggtagtacctgaaacatcagataatagtcggaaacaaatggttagaaacattaacaataagcggcgttattccttcagagtcccagaagaggaaaggatgcagcagaggagggaaatgctacgagatccagaaatgagaaataaattaatttctaatccaactaattttaatcacatagcacacatgggtcctggagatggaatacagatcctgaaagatctgcccatgaaccctcggcctcaggaaagtcggacagtattcagtggctcagtcagtattccatctatcaccaaatcccgccctgagccaggccgctccatgagtgctagcagtggcttgtcagcaaggtcatccgcacagaatggcagcgcattaaagagggaattctctggaggaagctacagtgccaagcggcagcccatgccctccccgtcagagggctctttgtcctctggaggcatggaccaaggaagtgatgccccagcgagggactttgacggagaggactctgactctccgaggcattccacagcttccaacagttccaacctaagcagccccccaagcccagcttcaccccgaaaaaccaagagcctctccctggagagcactgaccgcgggagctgggacccgtgagctgcctcagcactgggacctctcgctctccgctccctgccactcgcctcctctcactttcatctcttccctccacctcgcctgctcggcctgaaagccaccaggggctggcagcagtagcaggacagggattcaggagttctgacgacacgactctcagatccacgcccccagcctaacagcaacaacaaagacagactttccgtagcagcttagattaacgttgatttcattccatgcacttagagttgctttcagtaacattttacccctactcccaaaggtagcttaaatagacagattacacaaatgtaagtgataagaataagattagacagattttgctttcacagtagagtctcattatagtcctaaaatagctcatgggcttctccgcatccagaagggagaattggtccctggagtggctcactaagctcttaatcagcaaacgcagtgagtatcaacctgattgttgccaggaaatccttatgaattaaaacaatgcatattttactacagtacagagtttaaatgaatacataaatgtagaagtactgaatgtatatatttaaaaggagcctcttgtattcaacaaaagatggatgcatatataagagagatgatttaatttaaagaaatatgttgtttcttgtctgtaatgtaatgtaaagggtggaaaggcctcaagctcacatttgtagagagagagcgagagaaatcagagttccctttattgccctgtcctcaaactggtcataggctctagtcacctggggagctgtagaaaacacttgcagagccaggttttgctggtttggggcatgccctgggcaccagagctttaacatttgaagccacttcagcagcagcagcaaaaggcgaactcatctctacccaagatgtttcttttcctagtggtggaatttgaacacttctcactttttattgtattttatcttccgcagataaatgtagaaatacacgattctgtcacctctgatcccttccatctgaaaggttacaaggagtgttgtagcttctgaaggtgcagaaaacaatttctaaaaatgcttttattcctgggctaatcctgtccctccctaagtcacagcgaggtgtctgtcccagggctggagatgcttcccaaggaggagtctgttttgttgagagtgggcgtgggcttcttcacataagcctggggaaggaagaaaaaacggctttcattaccaaataatgtaaaacctcaaaagcaagggcttcaacagccttaaccaaatattattccccatagccagtggaaaatggatgtgacaaccccagtgcgcaggccagagtgagtgagcccagcacggcgctccgactggcttcctctctcaggtgctggattgtggggttagtggcatttccagctggattcctcctgttgtagttgccataaggaaatgagatgcagaatcagaaggatctatttctacagaatcatttcaccagttaagcacatgagtagagaaagagataaaaataaaagtatctcatgaaggaaagagattttgcctctcttttacttttcacctaagtttctctgagaaatagagacaggattctctctttaaaattcagtgaaaatgaagaaagttttcctgcagttgctaacctgagttgcagtgtttaaggccatcatttcactgctgctgtctgtgactccacgtctgtgtcactgaggtgacctgcgtgtcactgaggtggccaccatgctggcctgcggcatgtgcagggagctgaggctgtttccaggtgatgctgctgtgtggagaaggttctgagatgcagtgagggaagaaaggatcctgctggggattccattgtaagcacctataatcgggaattttcatgtaacagctttgacatttaaacattctgagtttggtgccagctcagatttgattatattttattttggatgggtgtaattcacagcacagttctaatctcccaaatctttctgctttttagaatgaagtataaaaatacttttctcacctgaataccaagggttggccctttagttggatcattgtcatatgacttggtagatccttgtcctcagcacctcacgtgagagaagggagtcagccagccggccccctgcttggtgctcgtgaccagctcgcaccccttctgtccacccttctctcctctcctccccactctccccaccctcctcactctccccaccctcctcactctccccaccctcccctcctctcctcctcactcttcccaccctccccatccccaccctccccatcctcctcttccctttccccttgccttctcctctctcccttctcttctcaggcagggaggaggccatcccaagccgagattaacaggacttgacataagccattagtttgtagctttgacaagtaattatgaatttttgttgcttataggtgcttattttgcaaaggatgcttttaagatcaaaataataaccctacctaaagtctagctccactgctatgggtcatactcttcagcctcccaacagggcagagagagagagctactgaggcttgtctaggttgccaggctaactgggcgacttgtccatattcaccccatggattgcaccatggcactctttgatttttccactgcaatggcaagtaatctcatcagtcataatagagcagtcccgaatgcgtgcagattctaaaagcagggctttaggagagaaacactgccagggggaatagttttggggagggttttcccaaaataacggtcatcctactgggtttatcccacccttaaatatgaagcctgttacctccagaagcttctgagaagaatgatgtgaaaagacagggagtgggttctaggcaaagaaaacataatgaccattcagaggagtcagtagcacagctcacagataaagtattttattactatctgaagttttcttttgttttcatgcaggacattttaaaaacgtatatggcagcagaaacctgtttctcaatagaaaaaatacattcagaggcatttctgggatagtctatctgtgttagtatttggtgctatctatgtccagccaagttatctaccctcaaattctgactaatcatgtttgtgctttgggtatttaaaattacatacatatatattctttttgccaaaaacaaaagtcttgcttcttgtcaaatgattgctaaagtagatcttacattttttgttattatgtatgtatttatacacatccccaacacacttagtgatttctgttatttcctagggagcacagctttaaggctatgagatacaactaaaaggagcccatctatttggttttccagccaattattgtactcacatttcaggggagaatctgaaattcctgtcatgtttacagcaacaatctatcattcctggctagctctcagcctctctctccttccataggttagaattatgtcattttgttacttagtggccacgtctatttctgagaaagactggttacatttatgtggcatctcaggtatcattaaggaaaagccagagcaggggtgagcagaggtcaaaaccacagacgcagcagggccatttgccgcctttggccgggatcacaaccactgcagtctcccagcaggtaggccttgccaagcctaaggctccccatccaatctagacagaggggcgctcagagcagactttgccgtagcccatgtctggtgagcacaacagggaatgaattgggcactccactcccccgtctctctggcccagccctgaactagatgagctgcatttcatggagcccattttaaaatctctttccttatgactttgttactcaagtccagagttctctgtgcacttctgctagataaggagtgtaagccctgccccccagcactggcagcacgctgggccctccccacacaggacaccgtgcagttccgggggaagctgactcaaatcaaccttgaaatctcatgaaaacaaaatgacttgtctttttatttgatagtgtaatatcattcattttataaattttttagggtttttctcgtaatattgtacagttttgcatggcctggtgtgatcattttttggttagaatataatgctgacaaatgtggatggaggggaagatactgctttagcctatcactccttattttattttgtttggttttatgccctcagtgtcttagggaactttttaagagatcctctgctaccaaacaatgatgtggattcttttgcacagaaatatttaaggtgggatggtaaaaaatgtcacaaaagactcctcaccaatactttatgttgatatcacttaatattaaccagactttgctgtattgcaataaaacagagaactgttaaaaaaaaaaaaaaaaaaaaaa

SEQ ID NO: 679 - DNA, 2184 bp, HOMO SAPIENS
ccaggacgaactcctcgtcagctgaaaccagacttcctggcgacagcgacggcagcgtaccctgacttctcagcctcctgcctggcagccaccccacacagcctgccccaggaggagcacatcttcactgagcagcaccccgctttcccacagtcccccaactggcacttccctgtctcagacgcccggcgcaggcccaactcaggcccggcagggggttccaaggaaatggggaccagcagcctgggcctggtggacaccacaggaggcccaggcgatgactacggggtgcttgggagcactgccaatgagacagagaagaaatcatccaggcggagaaaggagagttcagacaaccaggagaacagagggaagccggagggcagcagcaaagcccgcaaggagaggacggccttcaccaaggagcagctgcgagagctggaggcagagtttgcccatcataactacctgactcggctccgcagatatgagattgcggtaaacctggacctctctgagcgccaggtcaaagtgtggttccagaaccgaaggatgaagtggaagcgtgtgaagggaggtcagcccatctcccccaatgggcaggaccctgaggatggggactccacagcctctccaagttcagagtgagattctgcatggaggaaaaatgactaaggactgagccccctacccaactacccccaccccaatcccaccttcaccctcttccttccccagccagggcagcctctccacatctttccctgactcttggatatgaaactgcccagcattcctgggagtcttaggattttctaggaagttctgtccagcctcttagcagcctcttccctagggcctttgctcccacactctcatggaatcagacagagatcctaccgggccggatgaatctggaaacagcttcagagatactgcttctcagcgtctcttggctgccacccatgcctcctcctaccgctgttctcctaggtcagccaggcctcctcctggtctggacaccacctggcctggtgggagaggagctttggaaccagctggcgactcggaaagtaaatgcttcaaaaggaaggaaatgacagagacacacgcccttgcccaccttcctctgtaggctgcacatctgaggctttggggccccttagttgtcccgaaaccccaagaaaaatcagaatgaggagagtcaaggacagcaactcagctgctgcaagccagaaacacatccctgtctccaaatttgttggctaagtggagacacttctgagaactgactagagaagacagaaaaatagcccgatgtaggtttcggtgtccccatataggcccgtccacacaggcttgactgggtggacaagaatgaacccatgacagcacctgctgcttcaaaatcaaaatcaatttagggatacagcaggggctgttgggctgtgctccagagaaaaggagcagctactccttttaaatccacgatttctggattgaaaacctgtccagatgctgagttgttgggctgaacaactaggagctgaaaacaacgtagaggctggaaagtgtcccctgcattctggaggggaggggagataataaggagggctgctgggtgagggcctggagatgtggaaccctggagtggaaggttctccagtgacagtgtcctgtgactgcaaaaggggacaagaaaatccctcttcctccatgggatggatttaagctcttgctgtgtgttctacaaatgctgttattgtgggaggaaatgctaggtttttgtgtgtggactgcccagacctcagccaggtcttctggagatgacatttgaggactgatggccaaagagcatgggggactgaagccctggctgcctcagcgctctgtctcccaacaccagctggtgttgcagagggaggtcaacgtgagtttggatctcttgtacgcagatgtaatcattcacatgtaaaaataaccccacctccccaccccaaaaagggcaagagctgtggaaaatgattgccaaatgagatggctggttagagcatgattttttctaaagcatacttcatatattttcttaagattacatcaagctaattgtgcgagctcaattcactttgtaagaaaactctcggagaaataaaatcaataaaaagcaaaaaaaaaaaaaaaaaa

SEQ ID NO: 680 - DNA, 2728 bp, HOMO SAPIENS
atcttggcttcccggggaaaggcggcgtgaggggaagaagttgtagggtgggggcaggagtgaggaggagggaagagagagggggaggaggccgcggcggggcagggcggggactgcctgcctgcctgggttgcggaagtgatagccgccgaccgagcctgctgctttcttgctactgcttcggcttcccggctaccccccggacggtgaaggcggcccagctgtggatggtcagatagcccttgtctcccgccgccaatctctggcccctagcagcacggagcagacggcggcagcagcagcagcaggcgaggaggaagatggcgggacggctgccggcctgtgtggtggactgtggcacggggtatacaaaactaggatatgctggaaatacagaaccacagtttatcatcccttcctgtattgctattaaggagtcagcaaaagtgggtgatcaagctcaaaggagggtgatgaaaggtgttgatgacctagacttcttcattggtgatgaagcaatagaaaaacctacatatgcaacaaagtggccaatccgccatggtatagttgaagattgggacttaatggaaaggtttatggagcaagtgatctttaaatatttaagggcagaacctgaagaccattattttcttttgactgaacctccattgaatactccagaaaacagggaatatactgctgaaataatgtttgagtccttcaatgttccaggcttgtacattgctgtgcaggctgttcttgccttagctgcatcttggacctcaagacaagtaggagaacggacgttgaccggtacggtaatagacagtggagatggtgtcactcatgtcattcctgtggctgaagggtatgtgattggcagctgtattaaacacattccaatcgcaggacgagatataacatattttattcagcaactgctgagagaccgagaagtaggaatccctccagaacaatccttggaaactgctaaggcagtaaaggagcgctatagttatgtctgcccagatttagtaaaagaatttaacaagtatgatacagatgggtcaaaatggattaaacagtatactggaatcaatgctatctcaaagaaagagttttctatcgatgttggttatgagagatttttgggacctgaaatcttttttcatccagagtttgctaatccagactttacacaacctatctcagaagttgtagatgaagtaattcagaattgtcctattgatgtcagacgtcctctctacaagaatattgtcctctctggaggttcaaccatgttcagggactttggacgtcgcttgcaaagagatttgaaaagaactgtagatgcccggctgaaattaagtgaggaattgagtggtggtagattgaagccaaaacctattgatgtacaagtcattacacaccacatgcagcgatatgcagtttggtttggaggatcaatgctggcttccacgcctgagttctaccaagtatgccacaccaaaaaggattatgaagaaattggacctagcatttgtcgtcacaatccagtgtttggagtcatgtcgtaaaattggcttcatagttattggggttagggaggtggggaagagataatctttctgattacctgttttgtctggatggctggttttgaggttttaaacctgacttgaaatagtaacaccaaacatgattatacaggaatattttaataagtgtatcaccatgcagatgtagaagagagcgaaagtgattgtgtttttctttagattgaatatttgaatcttatgtgtaacaaaaagaagtgggttttagttctttctgtgccctgatattttgtatattaatgaattatccaagattcgatgggatttatcagtgtgtagatagctctataatgcttgaattgtacacttctaagtgtgcagtgcaagagcttgtttatatttcatactttttatactttgaggaaaaaaagtcaaagaaaaattgtatttgagggaaaaaaccatgaccaagtaaaggataaattcaaaaaatagcctcatgagacttggcatacacactcgtgggattccagttattatggagtgcttccatccctctccaccccttccccccaaaaggttttctttgcaagtgcttttggaactaagagctagtatcttggattaactgatgcctgctagtgctttctgattactcgcattctgtttcttgctttaaaagaagagtaaagacaagagtgttggaccagtattgcagttctgtagtgtcatttcttataaaaaacaaaacaacaacaataatttatcaaaattggcatatttaaagcctaacattctaataaaggcacaaatttctttttaatacttgtttcagcctctttaatctctttataagttaactaataaatctattttcttcagacttctgcaatagttctttaaaatcacaacagttagcaagctgacttttgtaatgtgctcaatacaaatacttgtgaacttttaatatgttgagtgctttcattttgataactggatctccatttgatattttcatttgtataactcatttgcagtctgaaaattttttttagtgccagtccctgaacatatcattgaaagttaattttctttgcattttaaaatatctggattatgaagaaaaagtgatgaaaataaattaaaactgaattacaaaaaaaaaaaaaaaa

SEQ ID NO: 681 - DNA, 4919 bp, HOMO SAPIENS; identical to SEQ ID NO: 362

SEQ ID NO: 682 - DNA, 612 bp, HOMO SAPIENS
tccggttccggcctggcgagagtttgtgcggcgacatgaaactgcttacccacaatctgctgagctcgcatgtgcggggggtggggtcccgtggcttccccctgcgcctccaggccaccgaggtccgtatctgccctgtggaattcaaccccaacttcgtggcgcgtatgatacctaaagtggagtggtcggcgttcctggaggcggccgataacttgcgtctgatccaggtgccgaaagggccggttgagggatatgaggagaatgaggagtttctgaggaccatgcaccacctgctgctggaggtggaagtgatagagggcaccctgcagtgcccggaatctggacgtatgttccccatcagccgcgggatccccaacatgctgctgagtgaagaggaaactgagagttgattgtgccaggcgccagtttttcttgttatgactgtgtatttttgttgatctataccctgtttccgaattctgccgtgtgtatccccaacccttgacccaatgacaccaaacacagtgtttttgagctcggtattatatatttttttctcattaaaggtttaaaaccaaaaaaaaaaaaaaaaaaaaaaaaaaaaaaaaa

SEQ ID NO: 683 - DNA, 2167 bp, HOMO SAPIENS
gtctgggagcgagagtaagagataaaggcaagggcgcctgaccgggcctgggcacctcctcccactgcgggcaaagggcaggcagttcgtgcgcggacacaagcactggcggaccgtggccatggcgggcgctgagtggaagtcgctggaggaatgcttggagaagcacctgccgctccccgacttgcaggaagtgaagcgcgttctctatggcaaggaactcaggaagcttgatctgcccagggaagctttcgaagctgcctccagagaagactttgaactgcagggatatgcctttgaagcagcggaggagcagctgagacgaccccgcattgtgcacgtggggctggttcagaacagaatccccctccccgcaaatgcccctgtggcagaacaggtctctgcccttcatagacgcataaaggctatcgtagaggtggctgcaatgtgtggagtcaacatcatctgtttccaggaagcatggactatgccctttgccttctgtacgagagagaagcttccttggacagaatttgctgagtcagcagaggatgggcccaccaccagattctgtcagaagctggcgaagaaccatgacatggtggtggtgtctcccatcctggaacgagacagcgagcatggggatgttttgtggaatacagccgtggtgatctccaattccggagcagtcctgggaaagaccaggaaaaaccacatccccagagtgggtgatttcaacgagtcaacttactacatggagggaaacctgggccaccccgtgttccagacgcagttcggaaggatcgcggtgaacatttgctacgggcggcaccaccccctcaactggcttatgtacagcatcaacggggctgagatcatcttcaacccctcggccacgataggagcactcagcgagtccctgtggcccatcgaggccagaaacgcagccattgccaatcactgcttcacctgcgccatcaatcgagtgggcaccgagcacttcccgaacgagtttacctcgggagatggaaagaaagctcaccaggactttggctacttttatggctcgagctatgtggcagcccctgacagcagccggactcctgggctgtcccgtagccgggatggactgctagttgctaagctcgacctaaacctctgccagcaggtgaatgatgtctggaacttcaagatgacgggcaggtatgagatgtacgcacgggagctcgccgaagctgtcaagtccaactacagccccaccatcgtgaaagagtagccggcttcagtgcctgccttggggtgaggaagacacctctgccccagtggattagcaagtgtggcaggcttaacatgtccaggttctccccaataacattgtccaggttggttttaaaattcccaggcagggggagagtggcatggggagtgacttcttaatgggtaaggggctgcttacttctggggtattggaaatgtttggggactaggtagaggtgaatgtactaaatgccactgaatttgtatacttcagaatgtttgttatgtaaattttacctcaactaaaaaaaaaaatgcccaggtactgcttgtgcaggtggatttgaggttaggcagatgatgctgtccatcccgtacaccagtgggaagagggtgagggctgatccagagaccctgagcctacagcaaggctgtggtgggtcggatggtctttggatgtgtcagcttagctaggccacagtcaccagtaattcaatcagacactaatctaggtatttctgtgaaggtattttgtagatgtgacagaagtccattcccaattgactaagtaagtgagattatctcagataatctgggtcagcctgacctgattagtcagaaggcctaaagaacagagctaagggtttccctgaggaagaaattctgcctgaggacagcagcccagtgcttggcgagagttcctgacagtctgcccttctgatagcctgcctcacagagtttagacatgactagccagctcctacaatcactgaagtcaattccttgcaataaatctcaatatatcccctaaaaaaaaaaaaaaaaaaaaaaaaaaaaaaaaaaaaaaaaaaaaaaaaaaaaaaaaaaaaaaaaaaaaaaaaaaaaaaaaaaaaaaaaaaaaaaaaaaaaa

SEQ ID NO: 684 - DNA, 522 bp, HOMO SAPIENS
  misc_feature (31)..(31): n is a, c, g, or t
  misc_feature (346)..(346): n is a, c, g, or t
  misc_feature (490)..(490): n is a, c, g, or t
gatgctactgtacatagaactgtttccttantttcctttggagattgttcaacaatggtgggttgttttttttttaaacttttagaaatacatttaattcaattctataaatattagtcattcaaaatctggccacaatcttaggaatacaaaagtaaaatcccagttctttttttcctaaaatgtcacaatgtaatagatctaacattgcatatatttctgatgtgatgaaatgttgatatatattttctatcgtgcaaactacagctctaaaatttttcaaagatagtacatgtattatgttttctataatacttacaccatcattattgttttaccttttatntctcatattctattttaattatggaatggtattattacatatccctgataaaaatattaaaatgtgctatgggaaaattaagaaaagacatattaaataaaccttgttatgtagtagcagggacgtgggaaagctccttggaanaagtaaggttcatcactcagaagtcaacctat

SEQ ID NO: 685 - DNA, 3955 bp, HOMO SAPIENS
tctccgcgtcccccccaccccggccagatccctttcccagtcctgcttcccagtgcctcgggccagggaatcctggcctccgcctgcggagccggcggaacccgcttcccgcctccacggggcagcgccagcggcctggtcctttcaccggcagctccgtgccgacgctctcaccgctcttcctatcgccgggagtggcgggccgaccagggggcggccgggctaccgtccgccattcccgtgtctctgcgcccgcgggggccgcccgagccggccaccatgccgctgggcctgaagcccacctgcagcgtatgcaagaccacgtcgtcctccatgtggaagaagggagcgcagggggagatcctctgccatcattgcactggccggggcggcgcgggcagcgggggcgcaggctcgggggcggctggagggactgggggcagcggcggcggcggcttcggcgcggcgaccttcgccagcacctccgccacccctccgcagagcaacgggggcgggggcggcaagcagagtaagcaggaaattcacaggaggtctgctcggctcagaaacactaaatacaaatctgctccggctgctgaaaagaaagtctccaccaaaggaaaagggagaagacatatatttaaattgaaaaatcccatcaaagctcctgagtcagtttccactataatcactgcagaatcaatcttctacaagggagtatattaccaaattggtgatgttgtttctgtgattgatgaacaagatggaaagccctactatgctcaaatcagaggttttatccaggaccagtattgcgagaagagtgcagcactgacgtggctcattcctaccctctctagccccagagaccaatttgatcccgcctcctatatcatagggccagaggaagatcttccaaggaagatggaatacttggaatttgtttgtcatgcaccttctgagtatttcaagtcacggtcatcaccatttcccacagttcccaccagaccagagaagggctacatatggactcatgttgggcctactcctgcaataacaattaaggaatcagttgccaaccatttgtagttcacaaattaaaactgggtttccaggcctggtgtggtggctcacgcctgtagccccagctattgcaccactgctctccaagctgggcaatggagtcagattctctttcttaaaaaaccacaaaaaaactggatttccagttctctaatattcttagtaccacaagatatgtcataggtatctttaaatgaaattcttagctggaaaagtgactaaaaagtttttctcctgctacctagtaataaacaaatcattgtttattactggtcacttagaaaattaaaagggatagggccaggcacagtggcttatgcctgtaattgcagcacttttagaggccgaggcaggcggatcacctgaggtcgggaagtggatcgcctgaggtcaggagttcgagaccagcctggccaacatggcgaaaccccgtcgctactaaaaatacaaaaattagccaggtgtggtggcatgtgcctgtaatcccagctatttgggaggctgaggcaggagaatcgcctaaacccaggaggtggaggttgtagtgagccaagattgcaccgctgtgctccagcctgggcaacagagtgagactcttgtctcggaaaaaaaaaaaaaaaaaaaaggctgggcacagtggctcacgcctttaatcccagcactttgggaggctgaggcagatggatcgcctgaggttgggagttcgagaccagcctggccagcatggtgaaaccctgtctctactaaaaatacaaaaattagccaggtgtggtggcgcacacctgtagtcccagctactcgggaggctgaggcaggagaattggttgaacccaggaggcggaggttgcagtgagcagagatcgtgccactgcactccagcctgggtggacagagcaagactccgtctcaaagaaacaaacaaaaaattaaaagggatagaatataatgaaatatattttgaacttaaattatattctatatgtgtatcttcctaggcaaaagctgtaatttccagagagaccattaggaacaggtagtatctatttttctccattatttatttctagaaactcataaaatggattgtatttttctataagaacaaaatattaattaaggtatagatgactgaccaagggcttaatcaaataaaatgactaacagcatctatcataaagccacacaagccttatgttctcatctcaaaaatgctgtgacagctttttggctgctttaaccataagaaaaatgattggtggatgattttattagcccaggcttttaaaaactttcatctaggccacgtgcggtggctcatgcctgtaatcccggcactttgggaggcctgagtggatggatcacttgaggtcaggagttcaggaccagcctggccaacatgatgaaaccctgtctctactaaatatacaaaaattagttgggtgttatggtgcatgcctgtaatcccagctactcgggaggctgaggcaggagaattgcttgaactcgggaggtggagattgcagtaagccgagatcgtgccactgcactccagcctgggtgatagagcaagactgtctcaaaaaagaaaaaaaagaaaaaattttaatttaatccttctgtagaaacaggcattcagaaccattccattgatcttaataaagctgctctttactgtttctagtcaaaaatgagacttcgatcaaaccataagattttatactgcagatagtcagcttcaccaaagccgcagaggaaacatgtcgagatcaggcttcctgcttgatagtctcttgactaccattaaaacgaatattgggaggtcatgaaagtcattggtaggccattagcattgatatctttaaaacatctaccctaaaccatctgctatggacccataataagaggcctgttgtatatgaaattgtctagaattcaggtgcaggtctttgccggttaagtaagggagcaacacgtaaaatgggagaggagtggggtgtactcacttgcctcctcttttgtcctgatttaaccagcatttttcaaccctgggaaaatttgcagaatctaagttgattgtaatgattttgagctgcagcagctttaactcttaccctttttccacatagttatggtgtttgagttggaaagaaacaactataggtagctacacgtacataattatctctttattcacaaagggtatagtaaaattgattgtaaataactttctaagtgccaatattcaaaacttttggattaaaatgtatttttcaccgtgcatttactttggatgtatttatttcatttaaacaatttaaatggggctctttaaccaaaaatggtatttaaaaccaaaacagtatcgtacttagaatttggagtagaggccgggcacagtggctcacgcctgtaatcccagcactttggaaggctgaggcaggcggatcacctgaggtcaggagttcgagaccagcctggtcaacatgaaaccccgtctctactaaaaatacaaaaattagctgggcgtggtggcgtgcgcctataatcccagctagtctactcgggaggctgaggcaggagaatcgctggaactcaggaggcagagactgcagtgagccgagatcgcgccactgcactccagtctgggtgacggcatgactccatctccaaaaaaaaaaaaaaaagattttggagtagattcatcattaataagtaacagattttaggaaaatcaaaaaatggctaataaaatgaacacaatgtaaaacatttattaaaatgtagacttttaaaaatctataaattgatcatctgtttataaattggcagatggttgtgtaccatcttttaaaataaagattgaatttcaccc

SEQ ID NO: 686 - DNA, 3097 bp, HOMO SAPIENS
tgtgctgagacctcttggcgttccctgctggcctggttcatgtgtgttgaggaccaggccacgtggaggctcgctcccagggaggatggcggcgctccacacgactcccgactccccagctgcccagctggagcgggcagaggacgggtcagagtgcgaccctgaccaggaagaagaggaggaggaggaggaaaagggggaagaggtgcaggaggtggaagaagaggaggaggagatagtggtggaggaggaggaggagggtgtggcagaggtagtgcaggatgcgcaggtggaggcggtggccgaggtggaggtggaggcggacgtggaggaggaggatgtgaaggaggtgctggcagaggaggagtgtccggcgttggggacccaggagcgacttagccgtggtggtgatgccaagtccccagttcttcaggaaaagggcctgcaggcctcccgggctccagccactcctagggatgaggacctggaggaggaggaagaggaggaggaggatgaggacgaggatgatttgctgacggctgggtgtcagctggtgacgtttgaagatgtggctgtgtacttctccctggaggagtgggaaaggctggaagcagaccagcggggcctctaccaggaagtcatgcaggagaactatgggattctcgtgtccttgggatacccaattcccaagcccgatctgatcttccggctggaacaaggggaagaaccttgggtcccagatagtccccgacctgaggaaggagacatcgtcactggcgtctacacaggagcctggttctggacggacgacatagaggaccacgaggaggaagacgacgaggacttcctggcggaggtggccgaggaggagaacgagcccccagggctctggtcggcggcctacggcgtgggggacgtgcctgggacgtgggggcccgacgactcggattcggcgcagactccagaggggtggggacccgacccaggcggcctgggggtcctggccgacggctctgaagcgaagcctttcctgcccggccgggagccgggtgcgaacctgctgtcgccctgggcgttccccgccgcagtggccccgccggccgggaggccggagaccacgtgcgacgtgtgcggcaaggtcttcccgcaccgctcgcggctggccaagcaccagcgctaccacgcggccgtcaagcccttcggctgcgaggagtgcggcaagggcttcgtgtaccgctcgcacttggccatccaccagcgcacgcacaccggcgagaagcccttcccgtgcccggactgcggcaagcgcttcgtctacaagtcgcacctggttacgcaccgacgcatccatactggcgagcggccctaccgctgcgccttctgcggcgcgggcttcgggcgccgctcctacctggtcacgcaccagcgcacgcacaccggcgagcgaccctacccgtgttcgcactgcggccgcagcttcagccagagctcggcgctggcacggcaccaggcggtgcacacggccgaccgcccgcactgctgtcccgactgcggccaggccttccgcctgcgcgccgacttccagcgccaccgacgcggcgggggctgcgcggaggcgggtggtgacggcccccggcgggagcccggcgagacggcggccgccgcggggcccgaggacacggaccctgggccagagggatctgaagttggcgaggcggacggagaggcggaggccgcggccgaggagagagaggaggcggcggtggcggcgcccacccccagcggcaaggtggaccccgcgccggaacggcgcttcctggagctgggcaacggcctgggggagggcgaaggcccctcctcccacccgctgggcttccacttccccgtgcaccccaagtcctggctgcacccggacagcttcccgatcctgggcctacccgacttccgagagcggctgccggtcgacgggcgcccgctcccggcgcccctggggggcccgctctccctggtggagggtaccgggctggcgtgcgaccctttcggcggcggcggggccgcgggcggcggaggcggcctgcgcgcgttcgggcccgccatcgggggtctgctggcggagcccgcgccggccgcgctggcggaggaggagagcccgtggatctgctcggactgcggcaagacgtttgggcgccgggccgcgctggccaagcaccagcgctaccacgcgggcgagcggccgcatcgctgcgccgactgcggcaagagcttcgtgtacggctcgcacctggcgcgccaccggcgcacacacaccggcgagcggcccttcccgtgccccgagtgcggcgcgcggttcgcccgcggctcgcacttggcggcgcacgtgcgcggccacacgggcgagaagccgttcgtgtgcggcgtgtgcggtgcggggttcagccgtcgcgcgcacttgacggcgcacgggcgcgcgcacaccggggagcggccttacgcgtgtggagagtgcggccggcgcttcgggcagagcgcggcgctgacgcggcatcagtgggcgcacgccgaggagaagccgcaccgctgccccgactgcggcaagggcttcggccacagctcggacttcaagcggcatcggcgcacgcacacgggcgagaagcccttccgctgcgccgactgcggccgcggcttcgcgcagcgctccaacctggccaagcaccggcgcggccacacgggcgaacgccccttcccgtgccctgagtgcggcaagcgcttttcgcagcgctcggtgctggtcacgcaccagcgcacacatacgggcgagcggccctacgcctgcgccaactgcggccgccgcttctcgcagagctcgcacttgctcacccacatgaagacgcaccgcggagccaccgcagcgccgggctcgggttcggccccagcccccgcgcccaagcccgaggcggccgccaaggggccgtccagtgccggccccggtgagcgcggcagcgccctgctggagttcgcgggcggcacaagcttcggctccgagcaccaggccgcgttcgccgggccctcgggcgcctaccgggagggcgtcctgtga

SEQ ID NO: 687 - DNA, 1204 bp, HOMO SAPIENS
cgccgaccccttcgcttccgctccgcgttcccacaatgcagtgcggctgagcgcctcggagcccgcggggacgctgcggggggacccgtgctgaggcggcggcggcgacgtgggctgcggcgggcccgcggcgtcgggcggtgcggatgtcgggctgggcggacgagcgcggcggcgagggcgacgggcgcatctacgtggggaaccttccgaccgacgtgcgcgagaaggacttggaggacctgttctacaagtacggccgcatccgcgagatcgagctcaagaaccggcacggcctcgtgcccttcgccttcgtgcgcttcgaggacccccgagatgcagaggatgctatttatggaagaaatggttatgattatggccagtgtcggcttcgtgtggagttccccaggacttatggaggtcggggtgggtggccccgtggtgggaggaatgggcctcctacaagaagatctgatttccgagttcttgtttcaggacttcctccgtcaggcagctggcaggacctgaaggatcacatgcgagaagctggggatgtctgttatgctgatgtgcagaaggatggagtggggatggtcgagtatctcagaaaagaagacatggaatatgccctgcgtaaactggatgacaccaaattccgctctcatgagggtgaaacttcctacatccgagtttatcctgagagaagcaccagctatggctactcacggtctcggtctgggtcaaggggccgtgactctccataccaaagcaggggttccccacactacttctctcctttcaggccctactgagacaggtgatgggaattttttctttattttttaggttaactgagctgctttgtgctcagaatctacattccagattgaggatttagtgtcttaggaaatttttttaattttttttttttaaagaagaaaaaaaactacataatttctaccagggccatattagcagtgaaacattttaaactgcagaaattgtggttttggttcagaaacaagttgtatatttttcacccctgattatgggaaaaaaatcagttctgtctttgtgggttgctctactatggagatcaacagttactgtgactgagtcggcccattctgtttagaaatatattttaaatgtttagtaattgaaaaaaaaaaaaaaaaaaaaaaaaaaaaaaaaaaaaaaaaaa

SEQ ID NO: 688 - DNA, 447 bp, HOMO SAPIENS
  misc_feature (217)..(217): n is a, c, g, or t
  misc_feature (221)..(221): n is a, c, g, or t
  misc_feature (229)..(229): n is a, c, g, or t
cccacaggaaccagcttatgccttgattacgattttaatccgactccctatagggatttgggccctcaaggccaagaattcggcacgaggccattatagagtcctcttattggaatggattagaggggaaggaagaaacttaagtcattataccaggaaaatcattccctcactattgcaagagttaggtttcataatctgcctttcaaagagcaanttancaaaagcnataagtaattttgttgtaaggattacaaatacacctacatgataaattgggggccggggaggatggtcctaatgtggtaacttgggtcaaacttgccagtgagtcagacatgtatttgagaagtgctgcatctcagacagcttagatgcaagtgaaggagatacactttgagaaatggactgtagataccatgaagacgttgatgtccaagatgcatg

SEQ ID NO: 689 - DNA, 492 bp, HOMO SAPIENS
  misc_feature (316)..(316): n is a, c, g, or t
  misc_feature (439)..(439): n is a, c, g, or t
ttcccatgaggctcctacatttgagtggaggaagatgtacttgtctacgttgggtgatgattagtgccatgaagaacaaaacggatacagtgagtaatgtggacagggctatcttagctatcactctaataaggtgatatctgaggagagatctgaatgaagtgaggatacaatggatatccaaggaaaagagcattccagcaaaggaaaaaacacatgcagagaccctgaaggagaagcagggtcactttgtcaaagggacagcaaggaagccaatgaccgggtgaaatgagtgaagagagcgttcagagagganagccaaaagctctgtgggccacggcaggactttgtcccttgctgagcaagatgggaagccactgaatgtttgcgggcagggtagtgacatgctgtgacttatgtttaaaaggattactccttnatagcgatgaagaaaagctctataacaaaagttccgttgtggtggttatacag

SEQ ID NO: 690 - DNA, 4360 bp, HOMO SAPIENS
gcggccgcggcagggctgggcctgcgactacccgaggaggctgacctccagcccgggcgcccggttcagcgccgccccggccggcgccggtgcctgccaggcactcagggaggcgggggcgcagtggaggaggcggcgccatcgcgaagcgagcgcctcgcccgcactcagccttgccaccccgcccgcagtccaggctggactgggcggcatttgccgaggctcctcggccaggccccgtccgcccgagccgcgctgagacccgggcagcggccgcgtggagaggaggtggcagcggcccgggaggccggagccaagccagcgacccaccatggagacccgctacaacctgaagagtccggctgttaaacgtttaatgaaagaagcggcagaattgaaagatccaacagatcattaccatgcgcagcctttagaggataacctttttgaatggcacttcacggttagagggcccccagactccgattttgatggaggagtttatcacgggcggatagtactgccaccagagtatcccatgaaaccaccaagcattattctcctaacggctaatggtcgatttgaagtgggcaagaaaatctgtttgagcatctcaggccatcatcctgaaacttggcagccttcgtggagtataaggacagcattattagccatcattgggtttatgccaacaaaaggagagggagccataggttctctagattacactcctgaggaaagaagagcacttgccaaaaaatcacaagatttctgttgtgaaggatgtggctctgccatgaaggatgtcctgttgcctttaaaatctggaagcgattcaagccaagctgaccaagaagccaaagaactggctaggcaaataagctttaaggcagaagtcaattcatctggaaagactatctctgagtcagacttaaaccactctttttcactaactgatttacaagatgatatacctacaacattccagggtgctacggccagtacatcgtacggactccagaattcctcagcagcatcctttcatcaacctacccaacctgtagctaagaatacctccatgagccctcgacagcgccgggcccagcagcagagtcagagaaggttgtctacttcaccagatgtaatccagggccaccagccaagagacaaccacactgatcatggtgggtcagctgtactgattgtcatcctgactttggcattggcagctcttatattccgacgaatatatctggcaaacgaatacatatttgactttgagttataatatggttttgtgacttatgagctgtgactcaactgcttcattaaacattctgcattgggtataatctaagaattgtttacaaaaagattattttgtatttacccttcattcctttttttgatccttgtaagtttagtataaatatatctagacattcagactgtgtctagcagttacgtcctgcttaaagggactagaagtcaaagttccttgtctcactatttgatctgctttgcagggaaataacttgttttttctcatgtttcatcttctttttatgtaaatttgtaatactttcctatattgccctttgaaatttttggataaaagatgatgttttaagttccaatgagtattactagttactcaataccacttattgagtactctgtttctacgtatgtagaatgtatagggatagaagagttgaaaagggaaagcaaaactcctcaagtagcttccttaaaatgtcattcataggagatgtactggaattgctcattctgtgactttatttgtgtcctaaacattcttcagtgaaaataattttatttcagtcaaacatttatgaggaaatgagatcacatctttgtcactggatgctacttgaagagggagtactttgtaaccactttgatatgctgttatcaccaccccctgccctctgctgccataatcacacaaatttaaaaagaaagaaaacagtcttccatagatttttaaggaagaaagggcccaagccaggagatcgcttggttttcttccagaagttaaatggggggatctgaagatttgaatgtttggtctgctttgaaatgtatgtcttttgggatgtattatatgcctagctttataatcagtataaattttaattattccaggaatatgcataatattgaaatatttcatgtcctattttaatagaaaacctcagggcccaagtaacagtgatagaagttagaaaaacctttacttagaattgtccacctagtcagagcccaagaaagaattttcagtggaaaaatcaatatataacttagtgctagctagcgccacagactctagtagataatattatcatcataatggctggtgaaaccatataatcacagaaaaacattgccttcagcatgttcagttcgcagcactgagggcactcttgagggtgttgttaatgaagatttaatttttaaatacaggtggttccaagctttcaaataggttatgctccaaaagtgttatttgtaagttaatttttttacaagtcaaacaatgttggaagtggtatttaggttctagatcggtccacgaaagttagcccatatgtatatcttgaatagtataggggagggtattcataaagtccttatgtggttttaactaagtgaaattatggacaagagaaataattgtaaaatcgtcttaaaggaaaatttaatttttactcctgtttatgggacattcgttctattaactgtcagacacaatttctgttttcatctgagagccagttttcctttatttctacatctaaaataagaacatattgtacactattatataatacagaattgtcttaaactttaataaattcgcattttaaaggtgtttacagattattttttatatctgtagctgaatttgttaaagtctaaaaagctcaaggactttatgaagatctcattatatgaggaaaatcataggttaccattttataactctattgccataagaaaatacactctaaaatcttgatttgaaacatattagaaaccttgattcagtgctcagtggtctcctagtaagaagtcaccgacggtagcgtcatatgagaagaaagaaatccccaccacctcaacctctgctgagattgtgtgctaggaacagccttccctccgtttcccctcagtcaaacttgagccagcctctggatcgatgtgatcttattgcatgtttccatggggtgtacctatactttaagccaatcctgctgcattcactgctaagttaaataaaaagccaagaagattttgcactgtgcagatcctttgctatctgacttgcatctcttcccccacctgtcagctagccacctgcttgtttgtgttgggatattttttagcacctgaagcaccatctgaaaggggcaccattttcttcttccctttgatctcacatatgctccctaaaaatccttaagttgtcaatctgatccccagtgtgaggttaatgagcaaaattggtctttggggccctttttgtccaagccccactgaaaggcctcttcagaaaactattatctttaaagccctactttaactccttaattccagcatacagctaaaactggatgtatattctggcaagtaaaggctgaggactcctctttaatcctcagatctagataactcatgacattttatttgaccaacatagcacatgatgagatatcaaggtaattaaaatagcatgcttgaaaaaaaaatacgtaatctgtttcacctgtaactgtttaagccaataaacttttcaaaatttatgtaatgtggggcttttatgtagcactttacgttttcatgctgcttattgttttattctactgaaaaaaatgaatttcaagattctcaacttttttaatttcaaaaattgtttattgttttgactataggaatacaaaatttcctattttgggagaataagaactctttttgtcatttttggctatgaataaactttctggtcttttgagaccacccatttttatagatcagaatcagaaaacaggtaaacctcactcacacatttggactcatttgaacaaaaatctaggccaaaatactgaaaagcctatgtgtttttttaattggaagtatatgtaaggttaatgcatttagtgaacgtgactaacaaagactaatgtgcacattaacagatgtactttttaaggttttatgggaggctgtgcattgctcaaaagctgttgggaacgccttctgaacagttgccttcagaactagtttgagctgctcaataaaaccagtgactttactcataaaaaaaaaaaaaaaaaaa

SEQ ID NO: 691 - DNA, 903 bp, HOMO SAPIENS
tagtcacgctcggtaccaggcgcagatcatggcaggcagccggctggaaaccgtagggagcatcttctctcggactcgggacctggttcgggccggggtgctgaaggagaagcccctgtggtttgacgtatatgacgcctttcccccgctgagggagcccgtcttccaaaggcctcgagtgcgatatggcaaagccaaagctcccatccaagacatctggtaccacgaggatcggattagagcgaagttttattcagtgtatgggtctggtcaaagagcttttgatctattcaatccaaacttcaagtctacctgtcaacggtttgtggagaagtacactgagctacagaaacttggagaaacagatgaagagaagttatttgtggaaacagggaaggctttattggcagaaggtgtcattttaagacgagtaggcgaagcaaggactcaacacggaggtagtcacgtttcccggaaatccgaacacttgagtgtcagaccacagactgcgttggaagaaaacgagactcagaaagaagttccacaggaccagcatttggaggcacctgcagaccagtcgaaaggtctcttgcctccctgaaggacctgtatactgtgtatgctggcattcacactctactcactggctgaatgttgagctatttttaaacagttgaactgtgtaaatgtttcttgatctctaaggtattatgtttgccttctcttagttatttctgggttgtcacaaagctcagtatcatggtttgacagaagcagttatgtgaacttttatgttaggacattactaaataaagaattccctagctgcttataaagtaaatttactttgaattgtaaataacatgaagaaacctttataaagattgttcaaatgggactcaa

SEQ ID NO: 692 - DNA, 508 bp, HOMO SAPIENS
  misc_feature (421)..(422): n is a, c, g, or t
gttcagaccacaaattccaagttcctgcaagacttgtgtggattgtggttgctgtgagtctgtgagatgtggatctgtctcgcacaagcgccacctagtgccagcctgggactctggtggtaatctatcccacatttcagcactcaaagtctgtgtggtccgtgtagggtcggatccatacatgtagagctcaagggtaagcccaagagttcatgagcaactttcaggggttgctctcccgaagcccttcctcattgtaacctgcccagtagtgtctgggtccctgggctctaccttttcagccctccagccagcttgggtggttgaggcttgatttaccctactctctggtgcacttgactgaaccacgtcagagctaagcagcgagaagccagagagaaaaagcatgaaggtttccccnncctctggggacctcagactctctggttggaaaggaagtttgcctggcctgatgactttaattatctgccatttctcactagggcca

SEQ ID NO: 693 - DNA, 3575 bp, HOMO SAPIENS
agaacacgacaccgggaagcgccacccggaggcggaaatcagcccgcgtccggcgcaggcgggagaagggagaggagtgacatccgtttgtcggaagtcgctcctcccccttccttcgctttttttccttgtcattggttcctggcactcgggccccacctcctccggctacgcccctcacggccgcttttcccgcctccgccggggccgagccgctgttcggctgacagttgaggatggccggagccgagggcgccgctgggcggcagtcggagctggagcccgtggtatcgttggtcgacgtccttgaggaggacgaggagctggagaatgaggcgtgcgctgtcctgggcggcagcgactccgagaagtgctcctactctcagaaattttcgttgtgattgtggaaacagcaagtttaaaaatttggaatgcaaattacttcctgacaaagcaaaggtaaattctggcaataagtacaatgacaacttttttggattgtactgcatttgcaagagaccttatcctgatcctgaagacgagattccagatgagatgatccagtgcgtagtctgtgaagactggttccatggaaggcatcttggtgccattccccctgagagtggggattttcaggagatggtatgccaggcctgcatgaaacgttgttcttttttgtgggcttatgctgcacaattggcagtaaccaaaatatccactgaggatgatggattggtgcggaacattgatggaataggtgatcaggaagttatcaaacctgaaaatggagagcatcaagatagtaccctcaaagaggatgttccagaacagggaaaggatgatgtccgggaggttaaagtagagcagaacagtgaaccatgtgccggctctagttctgaatctgatctccagacagtgtttaagaatgaaagcctcaacgcagaatcaaaatctggctgcaaacttcaggagcttaaagctaagcagcttataaagaaagacactgccacctattggcccctgaactggcgtagcaagttgtgtacctgccaagactgtatgaaaatgtatggagatctagatgtcttattcctgacagatgaatacgacacagttctggcttatgaaaacaaagggaagattgcccaggccactgacaggagcgatcccctaatggatacccttagcagcatgaatagagtccagcaagtggaactcatttgtgaatacaatgatttgaagactgaacttaaagactatctcaagagatttgctgatgaaggcacggttgttaagagagaggacattcagcagttctttgaagagtttcagtcaaaaaagagaagaagagtggatgggatgcagtattactgcagctagagtggagtatgaagctttctcattcaagccaatgaaaatgcgcttcccattcttggaataaaagaggtgtggttcacatttggccccctttccgtcctcctctgtttggagaggcctcgcgctcccttcattctctttagctgcagtagccaccgtgtggatgctgacttcacagccagcgtcctctgtgactcagctgatgcagctcattccacagacttctccagtgtactcctactccagtgcacccagggttatttgcatagtttttaagtttgattttgttttgagaaagcaaattggtgtcttgtttaatgatctgttatttcactcccagatgtgtgtgttttgccacagagctgttgccttccagaacctcctccgcaggcatcacggaaggctctcttcccgtcacctagaacctctacaggtcccctcgcccctatgatcgtggtgccttgggtcaaagcttcctcaagcctggtctgctccttctttcacgtccctgttttctgaggtttggtcatagcttagaaaggatcttggggcttgttttctctaggcccaacctccagagtagccaggactgatggttttctggtctggatgtctgtcacaggcggagagattaacagatgacagggttgaggaagcaagcctttgttatgaattttactaatacagttcaagtgaaattttcgttcatgattctattggcactagaattagaatttcagtactgtagtgctcacagggcttcctggagaacatttgcccgtatactagtcccttctctgctgcctagaaaacagaccgggtctcacccctgtgaaatcttggtggtttacgaagtcctctggatttcttgatattatcagggatattcataagcatatatcaaaaatggacctattttgatattctgttatgaaaatgttattagaaccccaataaattattatttttcccccttgaatctgctaaagaaaacagatcctgacttagcttacttgaaataagcagggcagggagccctgttttggaagagacagactgtggaagagattacaaacaaggcccgaggctgcacgaatgatgagttttgtgtatataatgttaatgtccaccgccacttccctaacgactatgagatcttttttttgaagatcctcatggaaggttgtacagagccccacatttgaggggaagtcctttcagttgatatgagatctctttaacacccctcagtctatgtaggaaatgccttgtgatacatagagaaccctcagcttctctctgcctctggaggaccaaggtctttcctgacagtcggagacacaccttgatgtatgttaataaaagcatttcaggctgtggggccaccatgtatattaatactccttatgtgtccagcatctgtgtattcattcgagtgcccaatccctggatgagatgaactaggccttataaaaagtcaaagcctcaaagaaatggcacaaccatgttcttcggcactcaggctcctaattgcagatcctcacgaagggtggtatgtggagctggaaggtcttgtggccacaggacatgctggtgagccctgagctggccttgtgcagagggctccgttcaaaggctcggggtgtctttgaggttgtttatcaagctggggaactcttccaagtctgacaatgtttcgaaccctttttgcaaggttgcactattagtataccatcatgtccggaaaacttttaatcttctcaaatatctgatgtaactaccagaaagtcccttacttcctatgaccaatcaggaccaagtcttggaggtgatgtgttacattacgtgcagcacaatagtaccgatcagttaactcagcgctgaagggcttgttttatgaaaggtactattccttctttcacattaactggaaacctctttttttacctgttgttcacaactagttttcttattgactgtattggactgtctcttcttgtagagactgattttggccaacatattaatgcatgttttatgcaaaacacaaatatgatattagttgcttttaaggagttctggcattgtatgtgcatttttgtagaaattgttactggacttataattacatacttaactctgatcaggtttctgtaaaatttaaataaaaccaatacaaaataaaaaaaaaaaaaaaa

SEQ ID NO: 694 - DNA, 967 bp, HOMO SAPIENS
cctgtttctcccccatcaggagcagtttcagtctcaacttcaaaagaacaaacgcgcactcaaaacaaaggaagaccgtcctcgactgcagaggaagcaggaagctgtcggcccagctctgagcccagctgctggagccccgagcagcggcatggagtccgtggccctgtacagctttcaggctacagagagcgacgagctggccttcaacaagggagacacactcaagatcctgaacatggaggatgaccagaactggtacaaggccgagctccggggtgtcgagggatttattcccaagaactacatccgcgtcaagccccatccgtggtactcgggcaggatttcccggcagctggccgaagagattctgatgaagcggaaccatctgggagccttcctgatccgggagagtgagagctccccaggggagttctctgtgtctgtgaataacagagcccagaggggtccctgcctgggcccaaaatcacacagcagattggggtagagccggagaggacccgagactcctgtgccagcctgggcatcccctccactgccagggaaggactgcatccaagtcgcatccgtacccaggccgaggtgtccgaggcccaggctgaaatccggttgctgctgcagagaccaagtttccaaggccttgtcaagtgggctgtgccagacgatccccaggcctgtcattggctgctcttcggctcggacacaccaaacctcaccaagcacttccatttctgagggaatagaggttgtggcttccgtcaagcacccatttaccccaccctcctcctcctcttcctgcaaacttgagtcacagctgccctgctgggctcaggccccagggatgtctgagtcagcctggctggggttccagtcctgacaccgcccttaccagctgggagactccgggaacctccaaccctgctgagcctccacttcgacatccgtg

SEQ ID NO: 695 - DNA, 3653 bp, HOMO SAPIENS
aagtgcacggaggagttccgggggccaggcggccgccgcgagtctggtatcctgagcttcgtgagttgagcgctgctgctccgcggtggagtcaccgcaccgctcccgggatcatggtgttctacttcaccagcagcagcgttaattcatctgcctacactatttacatgggaaaagataaatatgaaaatgaagatctgatcaagcatggctggcctgaagatatctggtttcatgtggacaaactctcttcggctcatgtataccttcgattacataagggagagaatatagaagacatcccaaaggaagtgctgatggactgtgcccaccttgtgaaggccaatagcattcaaggctgcaagatgaacaacgttaatgtggtatatacgccgtggtctaacctgaagaaaacagctgacatggatgtggggcagataggctttcacaggcagaaggatgtaaaaattgtgacagtggagaagaaagtaaatgagatcctgaaccgattagaaaagaccaaagtcgagcggttcccagacctagcagcagagaaagaatgcagagatcgtgaagagaggaatgagaaaaaagcccaaattcaggaaatgaaaaagagagaaaaagaagaaatgaagaagaagagggaaatggatgaacttaggagctattcatcactaatgaaagttgaaaatatgtcttcaaatcaggatggcaatgattcagatgaattcatgtaaaaggagaaaaggagaaaaggacctttgaaagatgtgaatgtagagacaattgcagaccttttggtttcatctgtgttctgaaatataaaatacaaccaaaattctaccttcatcctacccagaaattattgattttcaagttttaaaaaaattgtaccttttttgctgacagaaaaggatcagatatgtataaaatagttgaacttgacagcatataacttaaagtgaaaatgtttttgccagaacatgtcttggtaccttgtgaaagcaggctgcccttgttcttgagatagactttaaaatgaaccagctctgaaaagtacttctgctgctctggtctatccctgaaaacagatgtcttgaaacacttttcatattcttaaaataatcttcacttctgttaagaagaacatgttggtgggtaattatgcgaatgtttccctgtccctgatttctcgattaggcgtatgggttttgaaaaagagatttttcagaagattgtcagcttcagtattcatgttccatcgtgtcatctgggtctgttagtgtagtgaccctcagtgcagtctgtcccagcgtttacgtccttgcttcctctgagcagaggcctccatcttagtatcaacatatttaaagaaattgatggtgttcatcaagctggggcctgtggcagttgttgcctgagcaccaagtaacccaagccacctatgtgacaacttctgggcccaggagtaatttctcagcattgagggtaaaataggatggagtgctctgttgatcatttgggagatgtaggttacctgatttgtgccttaggatgcagcgtgaagcagaagtccatattgcaattatgattttagaaggaactaagcattttactcacacccacagcagcaagaatgacctcctgcagcagatattccacctgtaatagcactttggaactgtgggcaaaaccaaaaggctagtgtttccatttattccatgttggtgtatggggttgaactggaaaattccctgaggcaaaactcactggccaaattttgagagggtatagaaaatgactttagagatgagtggttttgtgtatgtgtctgatgatattcagtctgatgttccgcaattttaaaagttataataaaataccatttttttaatctggaaggacattgatatatgaattcttagaatttgctattaaaaagggtagcccccattccacaagctggttttgagggtgatcttgctctaaaaaacctcattcatcataggctcagtctgacaggttctgtacggggctatcatctttctcctcctctgctaaatgcctctttcttccagctgctcactgggtcaaagggatgtcctttctcagatgtattcttgatacatctcagatgtattcgtagctgtgctccttccatacttccaaggagtccggcttctacagaattcctctgtacctcacactgcaacacatgtagatagcgcttttgaaaaatacatatatttttactatagtatgagaggtcctggggctcaaactttaaacatttcctaactcagcttacactggtttaaaatgtccaggtctctgctgaattctcttgttgaattcatagctctgtgttgattcctatgcccctaaccctgcagcctctttgttttatttttttccccatctctgttggtcccagggaaagcaaggaaattttcttttgaggacttataggttgattgcccacaggtcaaactgttggcattgaactcctctcatttcttgccattggattgtttcctaaacgttggataggagaattcgaaattgttgctatttttatgagctgtgcccttgatcaaatctgtgctgtgggtctgagtcactttgccaatgtcgtcttcagtttcaacactctgatcagcatgcaggcgaggggcatgtttaatttacttcactaactgctatattctatagctttagacttcatatttcttatccacctttgtctaggctcacgatctttgggcaagggagctttgtcaccgtggttgggctagaacaaatattgagaagtttaccaacacagatgttgagaagtttattgaaaggcactgacattagcagaataagtgatggacattagttgaaccccttcagtgtctatgtgttttattgtattgtctttaactcgttcttgaagcacagatttcagcgagcctttcagctattcagtgccagcggttttccccactcaggaaagatggtgtgagccatacacacagcaggattagacggggagagtttcagctgcagcttctagtttaagaccaaagcccttcctcccgctgctgcatctgtctgagaggggaagctcttgttttccaagctggaaccgtttatgaggaaaactgagcagggtggcaaaatggaaaaggaacaattttctagtttttcctacgcgtgatattgacgcgtgctttttctttgatttgaggtacagcatgtaaataacaaatttccatattcaaaatgatcatattagagtgactgagtgaccttttgattttgaagcagactaaaatctgaccagaccacaatgaaaagtataaaattagaaacttaaattccaagctaaatttcagctttgacccacctaactccagtgaataggtggcagctcagaaacaaggacagcactgctgctgccagagcaagctcacatccagctggcacttcgtgagagctccttcctgccgggcacgtgtgagttcagcgtgggcaagagacttttatgcacattctgtcattcaaaagggaaatgatgccaaccccagatgcagcatgtcctgaatgaatgatctgtaaaatacaataataaaagcttatagtttgagtagaaaaaaaaaaaaaaa

SEQ ID NO: 696 - DNA, 4256 bp, HOMO SAPIENS
tacgagcggctgtgaaggaaactgtttaaccggatcccattgtacccagagtgcagagccgcctttccagcatgcaggggctgctcagcgtttagtcacatcaagaaatagaacagaattcagccatggccccaagaaagagaggtggacgaggtatttcattcatcttttgctgtttccgaaataatgatcacccagaaatcacgtatcggctgcgaaatgatagcaactttgcgcttcagaccatggaaccagcattgcccatgccccctgtggaggagctggatgtcatgttcagtgaactggtggatgaactggacctcacagacaaacacagagaagccatgtttgcacttccagctgagaaaaaatggcaaatatactgtagcaagaaaaaggaccaggaagaaaacaagggagctacaagttggcctgaattctacattgatcagctcaattccatggctgctagaaaatctctgctggctttagagaaggaagaagaagaagaaagaagtaaaactatagagagtttaaagacagcactgaggacaaaaccaatgaggtttgtaaccagattcatcgacttggatggcctatcatgtatcctcaactttctaaagaccatggactacgagacctcagagtctcgaatacatacttctctcattggctgtataaaggcgttaatgaacaactctcaaggccgggctcacgtcctggctcattctgagagtattaatgtaattgctcagagtctgagcacagagaacattaaaacgaaggtggccgtgctggaaatcttgggcgccgtgtgcctggttcccgggggccacaagaaggttctgcaggccatgctgcactaccagaagtatgccagcgaaaggacccgctttcagacattaattaacgacttggataaaagcactgggcggtatcgagatgaagtgagtctcaagactgccatcatgtccttcattaatgcagtgctcagccaaggtgcaggagtggagagtttggactttagacttcatcttcgctatgaatttctgatgttaggaattcaacctgtaatagataaattaagggaacacgaaaattcaacattagataggcatttagacttttttgaaatgctccgaaatgaagatgaactagaatttgccaaaagatttgaactggttcacatagacacaaaaagtgcaactcagatgtttgagctgaccaggaagaggctgacacatagtgaagcttacccgcatttcatgtccatcctgcaccactgcctccaaatgccttacaagaggagtggcaacactgttcagtactggctactactagatagaattatacagcagatagttatccagaatgacaaaggacaggaccctgactccacacctttggaaaactttaatattaagaatgtcgtacgaatgttggttaatgaaaatgaagttaagcagtggaaagaacaagcggaaaaaatgagaaaagagcacaatgagctacaacagaaactggaaaagaaagaacgagaatgtgatgctaagactcaagagaaggaagagatgatgcagaccttaaataaaatgaaagagaaacttgaaaaggagactactgagcataagcaagtcaagcagcaggtggcggacctcacagcacagctccatgagctcagcaggagggccgtctgtgcttcaatcccaggtggaccctcgcctggagcaccaggagggccctttccttcctctgtgcctggatctctccttcctcccccaccacccccacctctaccaggtgggatgcttccccctccaccgcctcccctccctccaggtggccctcctcctcccccagggcctcctcccttaggggcaatcatgccacctcctggtgctccaatgggcctagcactgaagaagaaaagcattcctcagcccacaaatgccctgaaatccttcaactggtctaaactgcccgagaacaaactggaaggaacagtatggaccgaaattgatgatacaaaagtcttcaaaattctagatcttgaagacctggaaagaaccttctctgcctatcaaagacagcaggatttctttgtgaacagtaactccaagcagaaagaagcagatgccattgatgacactctgagttccaaacttaaagttaaagagctttcggtgattgatggtcggagagctcagaattgcaacatccttctatcgaggttgaaattatccaatgacgaaatcaaacgggcaattctaacaatggacgaacaggaagatctgcccaaggacatgttggaacagctcttgaaatttgttcctgaaaaaagtgacattgacctattggaggaacataaacacgaactggatcggatggccaaggctgataggttcctttttgagatgagccgaattaatcactatcagcaaaggttgcaatcgctgtacttcaaaaagaagtttgcagagcgtgtggcagaagtgaaacctaaagtggaagcaattcgttctggctcagaagaggtgtttaggagtggtgccctcaagcagttgctggaggtggttttggcatttggaaattatatgaataaaggtcaaagagggaatgcatatggattcaagatatctagcctaaacaaaattgctgacacaaaatccagcatcgacaaaaacattacccttttgcactatctcatcactattgtggaaaataagtaccccagtgttctcaatctaaatgaagaattgcgagatattcctcaagctgcgaaagtaaacatgactgagctggacaaagaaataagtaccttgagaagtggcttgaaagcagtagagacagagctggaatatcagaagtctcagcccccacagcccggagataagtttgtgtctgttgtcagccagttcatcacagtagccagcttcagcttctctgatgttgaagaccttctagcagaagctaaagacctgtttactaaagcagtgaagcactttggggaagaggctggcaaaatacaaccagatgagttctttggcatttttgatcaatttcttcaagctgtgtcagaagccaaacaagaaaacgaaaatatgagaaagaaaaaggaggaagaagaacgtcgagctcgcatggaagctcagctcaaagaacaacgtgaaagggaacgtaaaatgagaaaagctaaagagaatagtgaagaaagcggagagtttgatgaccttgtttcagctttacgctcaggagaagtgtttgacaaagacctttctaaattgaaacggaatcgcaaacgtattaccaaccagatgactgacagcagcagagagagaccaatcacaaaacttaatttctaattttccatgaatacttttttttagaaagctcattagcagccctctaaagtgactagaacgtttcattacactgccttgcaatccaaacagtggcaattttttccttcatctgtgagtgaatgtgtgaacgtgtgtatgtaaatgtatgtgtgtatatattaaaaaatgtatatagatgtctgagtgttgtctggagacctatacgtatggttaaaaagatttatgttaatgtatgtgctccaaaacctttcgtgtatgcattcacattgagtgtggctcattttctttccccgaacgccatgactgttcagaagcacaatactatctcctgaaagagataagagacattccctagattcaaaggcaaaacagaagaaacaaacaaacaaacaaacaaagcttgcaaaatattttatggtttccaagcttgatatcctttaaaattattttcattgatggaactggagttgttggaaaaacatagatttaaaatgatttttgatagctgacattgtgatgttgatgtatcacatcagtaataggaccagctttgaatttctgacattggtgtggggatacagtctgtaaatgtttattgagaacatcttgcacacaatttgaattatgtagaatgtcaatcaagtttttgtatatttaaaagttggacatcaattttttcccctgatttcatcaagttatctctgccaagtgctcttgataatttcttcagatttttggaaaaaaacactatataaatgcaatccatgctttttttaaagaacaacattgccagagtatgcttgttctaacaatatagatatataaaccttaaaaataataaaatatctcacccaagacttaaaggaagaattctctgaagggataaagattact

SEQ ID NO: 697 - DNA, 1016 bp, HOMO SAPIENS
ccggaagcctcgaggtttagtcccgcccccctctcctcgctgcttaggctccgcggcctccaagctgtagctatgacggcgcgcgggactccgagccgcttcttggccagcgttctccacaacggactgggtcgctatgtgcagcagctgcagcgtctgagcttcagcgtcagccgcgacggcgcctcgtctcgcggcgccagggagttcgtggagcgggaggtgatcgacttcgcccgacggaatccaggggtcgtaatatatgtaaactcgcgtccgtgctgcgtgcccagagtagtggccgaataccttaacggggctgtgcgcgaggagagcatccactgcaagtcggtcgaggagatctcgacgctggtgcagaagctggccgaccagtcgggcttggacgtgatccgcatccgcaagcccttccacaccgacaaccctagcatccagggccagtggcaccccttcaccaacaagccgaccacgttccgcgggctacgcccccgagaggttcaggatcctgccccagcccaggtgcaagcacagtgaagagttgccccaccaactgcagccccaggctttggactgttactccggtaaaggtggttcttcccctttgggattccaagcccaggcaaatggaacccatcaatgggcaagttgacagaggttctgcttgggataatgaagagctgcctgtttctttccagtgcctgcttctgggggcagtgaccttgtgaaccactcatttttatgcaagtggcatccctaaaacctgagatgaggaagacttcaagggttttacagggcccttgttttttaaatccaaattgataataatgatctcaaaacacagtgagaggtctgaaggctggcttctgaagaatccctgatgtcttattggaacaaccactgagctacggagagctctgctgtgatgggctaggcactttatatctgtgtgaatacagatttataaaacaggttaataaacttatccaaggtcacatttc

SEQ ID NO: 698 - DNA, 4801 bp, HOMO SAPIENS
aaagggggaaaagaaagtgcggcggaaagtaagaggctcactggggaagactgccgggatccaggtctccggggtccgctttggccagaggcgcggaaggaagcagtgcccggcgacactgcacccatcccggctgcttttgctgcgccctctcagcttcccaagaaaggcatcgtcatgtgatcatcacctaagaactagaacatcagcaggccctagaagcctcactcttgcccctccctttaatatctcaaaggatgacacttctgtggtgtgtagtgagtctctacttttatggaatcctgcaaagtgatgcctcagaacgctgcgatgactggggactagacaccatgaggcaaatccaagtgtttgaagatgagccagctcgcatcaagtgcccactctttgaacacttcttgaaattcaactacagcacagcccattcagctggccttactctgatctggtattggactaggcaggaccgggaccttgaggagccaattaacttccgcctccccgagaaccgcattagtaaggagaaagatgtgctgtggttccggcccactctcctcaatgacactggcaactatacctgcatgttaaggaacactacatattgcagcaaagttgcatttcccttggaagttgttcaaaaagacagctgtttcaattcccccatgaaactcccagtgcataaactgtatatagaatatggcattcagaggatcacttgtccaaatgtagatggatattttccttccagtgtcaaaccgactatcacttggtatatgggctgttataaaatacagaattttaataatgtaatacccgaaggtatgaacttgagtttcctcattgccttaatttcaaataatggaaattacacatgtgttgttacatatccagaaaatggacgtacgtttcatctcaccaggactctgactgtaaaggtagtaggctctccaaaaaatgcagtgccccctgtgatccattcacctaatgatcatgtggtctatgagaaagaaccaggagaggagctactcattccctgtacggtctattttagttttctgatggattctcgcaatgaggtttggtggaccattgatggaaaaaaacctgatgacatcactattgatgtcaccattaacgaaagtataagtcatagtagaacagaagatgaaacaagaactcagattttgagcatcaagaaagttacctctgaggatctcaagcgcagctatgtctgtcatgctagaagtgccaaaggcgaagttgccaaagcagccaaggtgaagcagaaagtgccagctccaagatacacagtggaactggcttgtggttttggagccacagtcctgctagtggtgattctcattgttgtttaccatgtttactggctagagatggtcctattttaccgggctcattttggaacagatgaaaccattttagatggaaaagagtatgatatttatgtatcctatgcaaggaatgcggaagaagaagaatttgtattactgaccctccgtggagttttggagaatgaatttggatacaagctgtgcatctttgaccgagacagtctgcctgggggaattgtcacagatgagactttgagcttcattcagaaaagcagacgcctcctggttgttctaagccccaactacgtgctccagggaacccaagccctcctggagctcaaggctggcctagaaaatatggcctctcggggcaacatcaacgtcattttagtacagtacaaagctgtgaaggaaacgaaggtgaaagagctgaagagggctaagacggtgctcacggtcattaaatggaaaggggaaaaatccaagtatccacagggcaggttctggaagcagctgcaggtggccatgccagtgaagaaaagtcccaggcggtctagcagtgatgagcagggcctctcgtattcatctttgaaaaatgtatgaaaggaataatgaaaagggtaaaaagaacaaggggtgctccaggaagaaagagtccccccagtcttcattcgcagtttatggtttcataggcaaaaataatggtctaagcctcccaatagggataaatttagggtgactgtgtggctgactattctgcttcctcaggcaacactaaagtttagaaagatatcatcaacgttctgtcaccagtctctgatgccactatgttctttgcaggcaaagacttgttcaatgcgaatttccccttctacattgtctatccctgtttttatatgtctccattctttttaaaatcttaacatatggagcagcctttcctatgaatttaaatatgcctttaaaataagtcactgttgacagggtcatgagtttccgagtatagttttctttttatcttatttttactcgtccgttgaaaagataatcaaggcctacattttagctgaggataatgaacttttttcctcattcggctgtataatacataaccacagcaagactgacatccacttaggatgatacaaagcagtgtaactgaaaatgtttcttttaattgatttaaaggacttgtcttctataccacccttgtcctcatctcaggtaatttatgaaatctatgtaaacttgaaaaatatttcttaatttttgtttttgctccagtcaattcctgattatccacaggtcaacccacattttttcattccttctccctatctgcttatatcgcattgctcatttagagtttgcaggaggctccatactaggttcagtctgaaagaaatctcctaatggtgctatagagagggaggtaacagaaagactcttttagggcatttttctgactcatgaaaagagcacagaaaaggatgtttggcaatttgtcttttaagtcttaaccttgctaatgtgaatactgggaaagtgattttttctcactcgtttttgttgctccattgtaaagggcggaggtcagtcttagtggccttgagagttgcttttggcattaatattctaagagaattaactgtatttcctgtcacctattcactagtgcaggaaatatacttgctccaaataagtcagtatgagaagtcactgtcaatgaaagttgttttgtttgttttcagtaatattttgctgtttttaagacttggaaaactaagtgcagagtttacagagtggtaaatatctatgttacatgtagattatacatatatatacacacgtgtatatgagatatatatcttatatctccacaaacacaaattatatatatacatatccacacacatacattacatatatctgtgtatataaatccacatgcacatgaaatatatatatatatataatttgtgtgtgtgtatgtgtatgtatatgactttaaatagctatgggtacaatattaaaaaccactggaactcttgtccagtttttaaattatgtttttactggaatgtttttgtgtcagtgttttctgtacatattatttgttaattcacagctcacagagtgatagttgtcatagttcttgccttccctaagtttatataaataacttaagtattgctacagtttatctaggttgcagtggcatctgctgtgcacagagcttccatggtcactgctaagcagtagccagccatcgggcattaattgatttcctactatattcccagcagacacatttagaaactaagctatgttaacctcagtgctcaactatttgaactgttgagtgataaaggaaacaaatataactgtaaatgaatcttggtatcctgtgaaacagaataattcgtaatttaagaaagcccttatcccggtaacatgaatgttgatgaacaaatgtaaaattatatcctatatttaagtacccataataaatcatttccctctataagtgttattgattattttaaattgaaaaaagtttcacttggatgaaaaaagtagaaaagtaggtcattcttggatctacttttttttagccttattaatatttttccctattagaaaccacaattactccctctattaacccttcacttactagaccagaaaagaacttattccagataagctttgaatatcaattcttacataaactttaggcaaacagggaatagtctagtcaccaaaggaccattctcttgccaatgctgcattccttttgcacttttggattccatatttatcccaaatgctgttgggcacccctagaaataccttgatgttttttctatttatatgcctgcctttggtacttaattttacaaatgctgtaatataaagcatatcaagtttatgtgatacgtatcattgcaagagaatttgtttcaagatttttttttaatgttccagaagatggccaatagagaacattcaagggaaatggggaaacataatttagagaacaagaacaaaccatgtctcaaatttttttaaaaaaaattaatggttttaaatatatgctatagggacgttccatgcccaggttaacaaagaactgtgatatatagagtgtctaattacaaaatcatatacgatttatttaattctcttctgtattgtaacttagatgattcccaaggactctaataaaaaatcacttcattgtatttggaaacaaaaacatcattcattaattacttattttctttccataggttttaatattttgagagtgtcttttttatttcattcatgaacttttgtatttttcatttttcatttgatttgtaaatttacttatgttaaaaataaaccatttattttcagctttgaattttaaaaaaaaaaaaaaaaaa

SEQ ID NO: 699 - DNA, 1019 bp, HOMO SAPIENS
gaggaggagggtcggggacggaagcgcagagcacggaccccgccccctcgcggccccgctcgtgacgtcgcggggggcgccggcctccgcccggccccgagggcaggctctccccggaggctcagccccctctgctccccatgggcaactgccaggcagggcacaacctgcacctgtgtctggcccaccacccacctctggtctgtgccactttgatcctgctgctccttggcctctctggcctgggccttggcagcttcctcctcacccacaggactggcctgcgcagccctgacatcccccaggactgggtctcttttttgagatcttttggccagctgaccctgtgtcccaggaatgggacagtcacagggaagtggcgagggtctcacgtcgtgggcttgctgaccaccttgaacttcggagacggtccagacaggaacaagacccggacattccaggccacagtcctgggaagtcagatgggattgaaaggatcttctgcaggacaactggtccttatcacagccagggtgaccacagaaaggactgcaggaacctgcctatattttagtgctgttccaggaatcctaccctccagccagccacccatatcctgctcagaggagggggctggaaatgccaccctgagccctagaatgggtgaggaatgtgttagtgtctggagccatgaaggccttgtgctgaccaagctgctcacctcggaggagctggctctgtgtggctccaggctgctggtcttgggctccttcctgcttctcttctgtggccttctctgctgtgtcactgctatgtgcttccacccgcgccgggagtcccactggtctagaacccggctctgagggcactggcctagttcccgacttgtttctcaggtgtgaatcaacttcttgggccttggctctgagttggaaaaggttttagaaaaagtgaagagctggaatgtgggggaaaataaaaagcttttttgcccagtggaaaaaaaaaaaaaaaaaaaa

SEQ ID NO: 700 - DNA, 3606 bp, HOMO SAPIENS
tccgcgctcgtgcccgcgcgggtgcgttgctgtcctggccgcgcccctgtcccgccgcctcccgctcctcgcctggcggatgtaggttgttggcctgaggggagctacgtagccgaggtttgcgctgccgccgccaggcccggtccggttccagcctctgcccggacgctagccggcctggccatggctgaccgcgggtgcccgctggaggcggcgccgctgcctgccgaggtgcgggagagcctggctgagctggagctggagctgtcggaagatgtccacactgaagccgtgcaagcagctttggccaaatacaaagagaggaagatgcctatgccttcgaagagacgttctgtccttgtgcattcgtctgtggaaacctacacccctccagacacgtcgtctgcctcagaagatgagggctctttacggcgacccgggcgactcacctccactccgctccagagccattccagcgtcgagccctggctcgaccgggtcattcagggctcgtccacctcatcctctgcatcctccacctcatctcacccgggagggagacccaccactgctcccagtgctgcagccacgccgggggccgccgctaccactgcactcgcaggcctcgaggcccacacccacatagatctgcattctgcccctcctgatgtcaccacgggcctcgtggagcattcgtactttgagcgtccacaggtggcttctgtgagaagtgttcctcgggggtgcagcgggagcatgctggaaacagcagatggtgtccctgtgaacagcagagtgtcctccaaaatccagcagcttctgaacaccctgaagaggccaaagcgccctccactgaaggagttctttgtggatgattttgaggaattgttggaagttcagcaaccagatccaaatcagccaaagcctgagggaagcgagacgagtgtgctgagaggggagcctctcactgcaggtgtcccccgaccgccgtcgctgttggccaccttgcagcgctggggcacaacacagcccaaatccccctgtctgactgccttggatacaactgggaaagccgtctacactctcacctatggtaaactttggagtcggagtttaaaactagcttatactctacttaataaactgacaagtaagaatgaacctctacttaaacctggagacagagtggcgctcgtgtttccgaatagtgaccctgtgatgttcatggttgcattttatgggtgtctcctggcagagctggttcctgtccccatagaagtgccattaacaagaaaggatgcaggcagccagcaggttgggtttctgctgggcagctgtggagtcttcttggccctgaccacagacgcttgtcagaaaggcctccccaaggcacagacaggagaggtggcagctttcaaaggttggcccccgctctcctggctagtgattgatgggaagcatctagccaagcccccaaaggactggcaccctctggcccaggacacagggactgggactgcctacattgagtataaaaccagcaaagaaggcagtacggtgggggtcacagtgtcccacgcatccctgctggcacagtgccgggctctgacccaggcgtgcgggtactcagaagctgaaacattaacaaacgtgctggatttcaaaagggatgctggtctgtggcatggcgtgttaacaagcgtcatgaacaggatgcacgtggtcagcgtcccctacgcgctgatgaaggcgaacccactctcctggatccagaaagtgtgcttctataaagctcgggccgcgctggtgaagtcgcgagacatgcactggtctctcctagctcagcggggccagagggacgtcagcctcagctcactgcgcatgctgattgtggccgatggtgccaacccgtggtcgatctcctcctgtgacgccttcctcaacgtcttccagtccagaggtctgaggccagaggtcatctgtccttgtgcaagttctcctgaggcgctgactgtcgccatccgcaggccacctgatctgggaggaccacctccaagaaaagcagtcctgtcgatgaacggtctaagttatggtgttatcagagtggatactgaagaaaagttgtcagtccttactgttcaggacgttggtcaggtgatgcctggagctaatgtatgtgttgtgaagttagaaggtaccccttatctttgtaaaactgatgaagtgggagaaatatgcgtcagttccagtgcaactggcacagcgtactatggattgcttggaatcacgaagaatgtgtttgaggcagttccggtcaccacaggaggagcacccatctttgacaggccattcaccaggacaggcctgctgggcttcatcgggcctgacaacctggtcttcatcgtgggcaaactggacgggctgatggtcactggagttcgcagacacaatgcagatgacgttgtggccaccgcactggccgtggagcccatgaagtttgtctacagaggcaggatcgctgtgttctctgtgaccgtgctgcacgacgaccggattgtcctggtggctgagcagcggccggatgcctcggaggaggacagcttccagtggatgagccgtgtgctgcaggccattgatagcatccaccaggtgggcgtgtactgtctggccctggttcctgccaacaccttgcccaaggctcctctcggagggattcacatttctgaaaccaaacagcgctttctggaagggacgctgcacccgtgtaatgtgctgatgtgccctcacacctgtgttaccaacctccccaaacctcgtcagaaacaaccagaggttggaccagcctcaatgatcgtggggaacctggttgctgggaagagaatcgctcaggcttccgggagagagctcgcccacctggaggacagcgaccaggcacggaagttcctgttcctggctgacgtgctgcagtggcgtgcccacaccactcctgaccacccgctgttcttgctgctgaacgccaagggcaccgtcacaagcactgcaacctgtgtccagctgcacaaaagggctgagagagtggccgcggctctgatggagaagggaagactgagtgttggggaccatgtggctctggtctacccaccaggggtggacctcattgccgcgttctatggctgcttgtactgtggctgcgtgcctgtcaccgtgcggcccccgcaccctcagaacctcggcaccacactgcccaccgtcaagatgatcgtggaggtcagcaagtctgcatgcgtcctcaccacgcaggctgtcacacggctgctcaggtccaaggaggctgctgctgccgtggacatcaggacctggcccaccatcctagacacagatgacatcccaaaaaagaagatagcaagcgttttcaggcccccctcccccgatgtcctcgcatacttggacttcagcgtgtcaaccactgggatattagcgggagtgaaggcggggcgtggtggctcacgcctgtaatcccagcacttcgggaggccgaggcgggtggatcacaagatcaagagatggagaccatcctggccaacgtggtgaaaccccgtctctact

SEQ ID NO: 701 - DNA, 319 bp, HOMO SAPIENS
  misc_feature (122)..(122): n is a, c, g, or t
  misc_feature (241)..(244): n is a, c, g, or t
gtccaggagggtgacaactctattatcaactgtgcttattcaaacagcgcctcagactacttcatttggtacaagcaagaatctggaaaaggtcctcaattcattatagacattcgttcaanatatggacaaaaggcaaggccaaagagtcaccgttttattgaataagacagtgaaacatctctctctgcaaattgcagctactcaacctggagactcagctgtctacttttgtgcagannnnactacgggaggaggaaacaaactcacctttgggacaggcactcagctaaaagtggaactcaatatccagaaccct

SEQ ID NO: 702 - DNA, 313 bp, HOMO SAPIENS
ctcacacacagcctcgtgggtagggtcagcagaccagattgcttgttatgtaagacgagaggtctggttgatgatctagcactttcaccaagaaatggacgtggagaggatcagagtgatcaagagtgtatgaagtgcattccaatggtgggcaaaacaggctcctgctcttgtggaggtcacaatctagtggaggagggatgttactagaaatgcacaaagtgggctgaacacagtggctcacacctgtaatcctagcactttgggaggctgaggtgggcagatcacttgaggttagaagttagagtccagc

SEQ ID NO: 703 - DNA, 1636 bp, HOMO SAPIENS
cagtctacgcttgcgcggcgcaacagggccgactgcagctggaagatggcggcgtccgtggtctgtcgggccgctaccgccggggcacaagtgctattgcgcgcccgccgctcgccggccctgctgcggacgccagccttgcggagtacggcaaccttcgctcaggcgctccagttcgtgccggagacgcaggttagcctgctggacaacggcctgcgtgtggcctccgagcagtcctctcagcccacttgcacggtgggagtgtggattgatgttggcagccgttttgagactgagaagaataatggggcaggctactttttggagcatctggctttcaagggaacaaagaatcggcctggcagtgccctggagaaggaggtggagagcatgggggcccatcttaatgcctacagcacccgggagcacacagcttactacatcaaggcgctgtccaaggatctgccgaaagctgtggagctcctgggtgacattgtgcagaactgtagtctggaagactcacagattgagaaggaacgtgatgtgatcctgcgggagatgcaggagaatgatgcatctatgcgagatgtggtctttaactacctgcatgccacagcattccagggcacacctctagcccaggctgtggaggggcccagtgagaatgtcaggaagctgtctcgtgcagacttgaccgagtacctcagcacacattacaaggcccctcgaatggtgctggcagcagctggaggagtggagcaccagcaactgttagacctcgcccagaagcacctcggtggcatcccatggacatatgcagaggacgctgtgcccactcttactccatgccgcttcactggcagtgagatccgccaccgtgatgatgctctaccttttgcccacgtggccattgcagtagagggtcctggctgggccagcccggacaatgtggccttgcaagtggccaatgccatcatcggccactatgactgcacttatggtggtggcgtgcacctgtccagcccactggcttcaggtgctgtggccaacaagctatgccagagtttccagaccttcagcatctgctatgcagagacgggcttgctgggtgcacactttgtctgtgaccgaatgaaaatcgatgacatgatgttcgtcctgcaagggcagtggatgcgcctgtgtaccagtgccacggagagtgaggtggcccggggcaaaaacatcctcagaaatgccctggtatctcatctagatggcactactcctgtgtgtgaggacatcggacgcagcctcctgacctatggccgccgcatccccctggctgaatgggaaagccggattgcggaggtggatgccagtgtggtacgtgagatctgctccaagtacatctatgaccagtgcccagcagtggctggatatggccccattgagcagctcccagactacaaccggatccgtagcggcatgttctggctgcgcttctaggcgggaagcctatgtaagcaagagggcagggccggggtttgtggtcccccccccaccacaaacacagcacttcggctcctctaacctgtgccacaggtgaccaccaataaaatcctctgctgagaagtgaaaaaaaaaaaaaaaaaaa

SEQ ID NO: 704 - DNA, 163 bp, HOMO SAPIENS
aacaggttttgaaagcaagtttgataaagcaatttattacaattttctcttcttcaacaagctattatttcagctctaactctggtcatatacttgtttttggatctctgcttctttttctggcaacatattcaagaatttaaatattcactaggctttatgg

SEQ ID NO: 705 - DNA, 268 bp, HOMO SAPIENS
ctgctggggctcttgagtgcccaggtttgctgtgtgagaggaatacaagtggagcagagtcctccagacctgattctccaggagggagccaattccacgctgcggtgcaatttttctgactctgtgaacaatttgcagtggtttcatcaaaacccttggggacagctcatcaacctgttttacattccctcagggacaaaacagaatggaagattaagcgccacgactgtcgctacggaacgctacagcttattgtacatttcctctt

SEQ ID NO: 706 - DNA, 3528 bp, HOMO SAPIENS
ctttttcgcaacgggtttgccgccagaacacaggtgtcgtgaaaactacccctaaaagccaaaatgggaaaggaaaagactcatatcaacattgtcgtcattggacacgtagattcgggcaagtccaccactactggccatctgatctataaatgcggtggcatcgacaaaagaaccattgaaaaatttgagaaggaggctgctgagatgggaaagggctccttcaagtatgcctgggtcttggataaactgaaagctgagcgtgaacgtggtatcaccattgatatctccttgtggaaatttgagaccagcaagtactatgtgactatcattgatgccccaggacacagagactttatcaaaaacatgattacagggacatctcaggctgactgtgctgtcctgattgttgctgctggtgttggtgaatttgaagctggtatctccaagaatgggcagacccgagagcatgcccttctggcttacacactgggtgtgaaacaactaattgtcggtgttaacaaaatggattccactgagccaccctacagccagaagagatatgaggaaattgttaaggaagtcagcacttacattaagaaaattggctacaaccccgacacagtagcatttgtgccaatttctggttggaatggtgacaacatgctggagccaagtgctaacatgccttggttcaagggatggaaagtcacccgtaaggatggcaatgccagtggaaccacgctgcttgaggctctggactgcatcctaccaccaactcgtccaactgacaagcccttgcgcctgcctctccaggatgtctacaaaattggtggtattggtactgttcctgttggccgagtggagactggtgttctcaaacccggtatggtggtcacctttgctccagtcaacgttacaacggaagtaaaatctgtcgaaatgcaccatgaagctttgagtgaagctcttcctggggacaatgtgggcttcaatgtcaagaatgtgtctgtcaaggatgttcgtcgtggcaacgttgctggtgacagcaaaaatgacccaccaatggaagcagctggcttcactgctcaggtgattatcctgaaccatccaggccaaataagcgccggctatgcccctgtattggattgccacacggctcacattgcatgcaagtttgctgagctgaaggaaaagattgatcgccgttctggtaaaaagctggaagatggccctaaattcttgaagtctggtgatgctgccattgttgatatggttcctggcaagcccatgtgtgttgagagcttctcagactatccacctttgggtcgctttgctgttcgtgatatgagacagacagttgcggtgggtgtcatcaaagcagtggacaagaaggctgctggagctggcaaggtcaccaagtctgcccagaaagctcagaaggctaaatgaatattatccctaatacctgccaccccactcttaatcagtggtggaagaacggtctcagaactgtttgtttcaattggccatttaagtttagtagtaaaagactggttaatgataacaatgcatcgtaaaaccttcagaaggaaaggagaatgttttgtggaccactttggttttcttttttgcgtgtggcagttttaagttattagtttttaaaatcagtactttttaatggaaacaacttgaccaaaaatttgtcacagaattttgagacccattaaaaaagttaaatgagaaacctgtgtgttcctttggtcaacaccgagacatttaggtgaaagacatctaattctggttttacgaatctggaaacttcttgaaaatgtaattcttgagttaacacttctgggtggagaatagggttgttttccccccacataattggaaggggaaggaatatcatttaaagctatgggagggttgctttgattacaacactggagagaaatgcagcatgttgctgattgcctgtcactaaaacaggccaaaaactgagtccttgtgttgcatagaaagcttcatgttgctaaaccaatgttaagtgaatctttggaaacaaaatgtttccaaattactgggatgtgcatgttgaaacgtgggttaaaatgactgggcagtgaaagttgactatttgccatgacataagaaataagtgtagtggctagtgtacaccctatgagtggaagggtccattttgaagtcagtggagtaagctttatgccagtttgatggtttcacaagttctattgagtgctattcagaataggaacaaggttctaatagaaaaagatggcaatttgaagtagctataaaattagactaatctacattgcttttctcctgcagagtctaataccttttatgctttgataattagcagtttgtctacttggtcactaggaatgaaactacatggtaataggcttaacaggtgtaatagcccacttactcctgaatctttaagcatttgtgcatttgaaaaatgcttttcgcgatcttcctgctgggattacaggcatgagccactgtgcctgacctcccatatgtaaaagtgtctaaaggtttttttttggttataaaaggaaaatttttgcttaagtttgaaggataggtaaaattaaaggacatgctttctgtttgtgtgatggtttttaaaaattttttttaagatggagttcttgttgcccaggctagaatgcaatggcaaaatctcactgcaatctcctcctcctgggttcaagcaattctcctacttcagcctcccaagtagctgggattacaggcatgtgctaatttggtgtttttaatagagatgaggtttttccatgttggtcaggctggtctcaaactcctgaccttaggtgatcgcctcggcctcctaaagtgctggaattacaggcatgagccaccatgcctggccaggacatgtgttcttaaggacatgctaagcaggagttaaagcagcccaagagataaggcctcttaaagtgactggcaatgtgtattgctcaagattcaaaggtacttgaattggccatagacaagtctgtaatgaagtgttatcgttttccctcatctgagtctgaattagataaaatgccttcccatcagccagtgctctgaggtatcaagtctaaattgaactagagatttttgtccttagtttctttgctatctaatgtttacacaagtaaatagtctaagatttgctggatgacagaaaaaacaggtaaggcctttaatagatggccaatagatgccctgataatgaaagttgacacctgtaagatttaccagtagagaattcttgacatgcaaggaagcaagatttaactgaaaaattgttcccactggaagcaggaatgagtcagtttacttgcatatactgagattgagattaacttcctgtgaaacccagtgtcttagacaactgtggcttgagcaccacctgctggtattcattacaaacttgctcactacaataaatgaattttaagctttaaaaaaaaaaaaaaaaaa

SEQ ID NO: 707 - DNA, 3400 bp, HOMO SAPIENS
gcccccaggagacccagaggacaactgggcaaggtgggccggagagtgtgggggaaggcaaaggagttctgtgagctcagcgtctgaagctcatttcatgcatcaggccccagggctcagcttccgccttcggcttccccttctgccaagagccctgagccactcacagcacgaccagagaacaggcctgtctcaggcaggccctgcgcctcctatgcggagatgctactgccactgctgctgtcctcgctgctgggcgggtcccaggctatggatgggagattctggatacgagtgcaggagtcagtgatggtgccggagggcctgtgcatctctgtgccctgctctttctcctacccccgacaagactggacagggtctaccccagcttatggctactggttcaaagcagtgactgagacaaccaagggtgctcctgtggccacaaaccaccagagtcgagaggtggaaatgagcacccggggccgattccagctcactggggatcccgccaaggggaactgctccttggtgatcagagacgcgcagatgcaggatgagtcacagtacttctttcgggtggagagaggaagctatgtgagatataatttcatgaacgatgggttctttctaaaagtaacagccctgactcagaagcctgatgtctacatccccgagaccctggagcccgggcagccggtgacggtcatctgtgtgtttaactgggcctttgaggaatgtccacccccttctttctcctggacgggggctgccctctcctcccaaggaaccaaaccaacgacctcccacttctcagtgctcagcttcacgcccagaccccaggaccacaacaccgacctcacctgccatgtggacttctccagaaagggtgtgagcgcacagaggaccgtccgactccgtgtggcctatgcccccagagaccttgttatcagcatttcacgtgacaacacgccagccctggagccccagccccagggaaatgtcccatacctggaagcccaaaaaggccagttcctgcggctcctctgtgctgctgacagccagccccctgccacactgagctgggtcctgcagaacagagtcctctcctcgtcccatccctggggccctagacccctggggctggagctgcccggggtgaaggctggggattcagggcgctacacctgccgagcggagaacaggcttggctcccagcagcgagccctggacctctctgtgcagtatcctccagagaacctgagagtgatggtttcccaagcaaacaggacagtcctggaaaaccttgggaacggcacgtctctcccagtactggagggccaaagcctgtgcctggtctgtgtcacacacagcagccccccagccaggctgagctggacccagaggggacaggttctgagcccctcccagccctcagaccccggggtcctggagctgcctcgggttcaagtggagcacgaaggagagttcacctgccacgctcggcacccactgggctcccagcacgtctctctcagcctctccgtgcactactccccgaagctgctgggcccctcctgctcctgggaggctgagggtctgcactgcagctgctcctcccaggccagcccggccccctctctgcgctggtggcttggggaggagctgctggaggggaacagcagccaggactccttcgaggtcacccccagctcagccgggccctgggccaacagctccctgagcctccatggagggctcagctccggcctcaggctccgctgtgaggcctggaacgtccatggggcccagagtggatccatcctgcagctgccagataagaagggactcatctcaacggcattctccaacggagcgtttctgggaatcggcatcacggctcttcttttcctctgcctggccctgatcatcatgaagattctaccgaagagacggactcagacagaaaccccgaggcccaggttctcccggcacagcacgatcctggattacatcaatgtggtcccgacggctggccccctggctcagaagcggaatcagaaagccacaccaaacagtcctcggacccctcttccaccaggtgctccctccccagaatcaaagaagaaccagaaaaagcagtatcagttgcccagtttcccagaacccaaatcatccactcaagccccagaatcccaggagagccaagaggagctccattatgccacgctcaacttcccaggcgtcagacccaggcctgaggcccggatgcccaagggcacccaggcggattatgcagaagtcaagttccaatgagggtctcttaggctttaggactgggacttcggctagggaggaaggtagagtaagaggttgaagataacagagtgcaaagtttccttctctccctctctctctctctttctctctctctctctctttctctctcttttaaaaaaacatctggccagggcacagtggctcacgcctgtaatcccagcactttgggaggttgaggtgggcagatcgcctgaggtcgggagttcgagaccagcctggccaacttggtgaaaccccgtctctactaaaaatacaaaaattagctgggcatggtggcaggcgcctgtaatcctacctacttgggaagctgaggcaggagaatcacttgaacctgggagacggaggttgcagtgagccaagatcacaccattgcacgccagcctgggcaacaaagcgagactccatctcaaaaaaaaaatcctccaaatgggttgggtgtctgtaatcccagcactttgggaggctaaggtgggtggattgcttgagcccaggagttcgagaccagcctgggcaacatggtgaaaccccatctctacaaaaaatacaaaacatagctgggcttggtggtgtgtgcctgtagtcccagctgtcagacatttaaaccagagcaactccatctggaataggagctgaataaaatgaggctgagacctactgggctgcattctcagacagtggaggcattctaagtcacaggatgagacaggaggtccgtacaagatacaggtcataaagactttgctgataaaacagattgcagtaaagaagccaaccaaatcccaccaaaaccaagttggccacgagagtgacctctggtcgtcctcactgctacactcctgacagcaccatgacagtttacaaatgccatggcaacatcaggaagttacccgatatgtcccaaaagggggaggaatgaataatccaccccttgtttagcaaataagcaagaaataaccataaaagtgggcaaccagcagctctaggcgctgctcttgtctatggagtagccattcttttgttcctttactttcttaataaacttgctttcaccttaaaaaaa

SEQ ID NO: 708 - DNA, 596 bp, HOMO SAPIENS
  misc_feature (70)..(70): n is a, c, g, or t
  misc_feature (511)..(511): n is a, c, g, or t
cagcatccagtcagacctagtaaagaaaaccttggattcttaacccaagataggctgtaaatcactagcntttttttcctcatgaaaaaaaatagagttaaaaaatatttcctctcttttccatattccagctgaactccgtttccaaaggcacaaagaagagtgtgcttattcagattttgaatctttttggtaccttttggttaatgacatagcctcctgaaattctggatgtcttcaaagtcagttttgcttctttatcctgaaaatcagatttacaatgctgaaggcatttcttgggcccagtgtagctcacgcaatctctgctacccataagccttgatgaagatgatacagtccggactgtgagcatggtgcttcatgtatatgtgctgccagtaacaagaatttttttgttttgttttgttttgttttgataaggcataaaagaaactcattccttgacatcaactgtaattccatcattccatgtctgcggatacagacaatnaaaaaaatgttgtgtagtcagtactaattactgacattataagcattctcaaatgcaataaaaatgctggttgttcacgctggta

SEQ ID NO: 709 - DNA, 1795 bp, HOMO SAPIENS
ccccgcctccccccgcgccgccgccgcccgctaccgccgccgccgccgctgcgcctgctgctcctcgccgtccgcgctgcagtgcgaagggctcgaagatggccggttggcagagctacgtggataacctgatgtgcgatggctgctgccaggaggccgccattgtcggctactgcgacgccaaatacgtctgggcagccacggccgggggcgtctttcagagcattacgccaatagaaatagatatgattgtaggaaaagaccgggaaggtttctttaccaacggtttgactcttggcgcgaagaaatgctcagtgatcagagatagtctatacgtcgatggtgactgcacaatggacatccggacaaagagtcaaggtggggagccaacatacaatgtggctgtcggcagagctggtagagcattggttatagtcatgggaaaggaaggtgtccacggaggcacacttaacaagaaagcatatgaactcgctttatacctgaggaggtctgatgtgtaagcagcctctccccatctacctagcaactgtcttcatcaacaaccctaattatggtcacaatgctaccaaactgtagatggtagctaatttttctttacctattttctaatgtcatgattcctgtttgcccaatggatcatttgtatgttaaccactgtatgtaaccaacccttatctggcaacataattgcagcacaataatgatttgcatgataccttgaaattggggggagggggcatgccaagttgggcatcactttgtcttagcaattaatgggatattgattactaaaataagttaatattaagcaaggtgccggttgtacaatctctgatcagtgtcttttcagcactttgagcatttacttggctcatttagtcttccttttgtagcgcatggttgggaggaaaaagtgcatgcatcattccttcactcttctctttttcccgccccccctcccttcgcacataggcatttggtttgcttccatctttttttatgcagtgcctgtttttttttaaccaattaaaatcccttttgttgatgagctattgagagctgcagtagtttgcttttagtattgttgttgcacttgagcagagacaaacctttattcatagtgtctacaggacatatgaagagtgcaatggcaaaacaagagcaaaaagcacttcctcccatgaccttacagtaaccatactgattgaatccccagggacattccatcattgcaatagctcagatttttcttcctttttctttgcacaccagctctactctttagtaaaattgtaaaaggctgccattatggacattaggtatcccaacataaccatctggagtgtgtccagtttgttcttcataggaccaatttttatttgcagcttgagtttttatatgaagttgcattattgtggacttggctgtcttgtgatgaatttttttcatatgtattctgtgccatactattgttaaaatgaactgttgctattgtgagatggattttaactgacctattaagggtttctttcgaatggcactactttagggacattctagtatttgcttctattgtttgggccttgtggataatgtacagatttaaaaacaaatcttgttgctgatttgtccatttctttccctgcactttgttacatctgggatacagtctaactcatctgatttaatatgcatttaaaaaaatgccataactattaaacaccttgtttacagacagatgaaataaatttattccaaccaaaaaaaaaaaaaa

SEQ ID NO: 710 - DNA, 4151 bp, HOMO SAPIENS
gcggccgctgggtgcgcgtgcgcatgcgcgctggcctccagggggtggcgggaccgagtgtgtgacgcacttgcgtgggagtacgaggctgacgcggcggccctgtccccgtaactgtgacacgggtgcacgcgagcgtcattgggggcgatgggggccgtgctgggtgcgcgtttgcaccagtgacgcagccgctgcatctccgccagtccgcgcaggccagcatccttcagaaaaagcatccccgaggaggaagacgaatcgttaaacatctgaaagggtcaggccagcatccttcagaaaaagcatccccgaggaggaagacgaatcgttaaacatcttaggtcagctctagcctctcggaatttgtcttcttcagtggaaaccccgagaagactgatcagttcttcagttctaaaacaatggcccagggtttggtgacgttcgccgacgtagccatagacttttctcaggaggagtgggcctgtctgaactctgctcagagggacctgtactgggacgtgatgctggagaactacagtaacttggtctcactggatttggagtcagcatatgaaaataagagtttacctacagaaaaaaacattcatgaaataagggcttccaaaaggaattcagatagaagaagtaaatcccttggccgtaactggatatgtgaaggtacgcttgaaagaccacagcgctccagagggaggtatgtcaatcagatgatcatcaattatgtcaaaagacctgctactagagaaggcacccctcctagaacacatcagagacatcataaggagaattcctttgaatgtaaggactgtgggaaggcctttagtcgtggctatcaacttagtcaacatcagaaaatccatactggtgagaaaccttatgaatgtaaagaatgtaagaaggccttccgttggggcaatcagcttactcaacatcaaaaaattcatactggggagaagccctacgaatgtaaagactgtgggaaggcttttcgatggggctcaagcctcgttattcataagaggattcatactggtgaaaaaccctatgaatgtaaagactgtggaaaggcctttcggcgtggtgatgagctcactcagcaccagagattccacactggggagaaagactacgaatgcaaagactgtgggaagacctttagccgtgtgtataaacttattcagcacaagagaattcatagtggggagaagccttacgagtgtaaagactgtgggaaggcttttatttgtggttcaagcctcattcagcataaaagaattcacacaggtgagaaaccctatgaatgtcaagaatgtgggaaggcctttactcgagtcaattaccttactcagcatcagaagatccacaccggtgagaagcctcacgaatgtaaggagtgtgggaaggcctttcgctggggttcgagcctcgttaagcacgagaggatacatacgggcgagaagccgtacaagtgcacagaatgtgggaaggccttcaattgtggctatcacctcactcagcacgagagaatccacacaggcgaaaccccgtataaatgtaaggagtgtgggaaggctttcatttatggatcgagcctcgtgaaacatgagagaattcataccggggtgaaaccctatgggtgtacagaatgtgggaagagctttagtcacggccatcagcttacacaacatcagaaaacgcacagtggggcgaaatcctacgaatgtaaggagtgcgggaaggcatgtaaccacctaaaccatctccgagaacatcagaggatccacaacagttgaagagccttttgaacgcagtagcccgctcgtatctatggtttcgctttccacagtttgttacctgcagtcaactgcagttcaaaaatattaaatggaaaattccagaaataaagaattttaagtctcaaatggtgtgcccttctgagtagcgtgatgaaatctctcgctgtccggctccagccggccggggatgtgagtcatcccttggtccagcacatccacgctgtatacgccacccaccctgctagtgacttagtagccgtcttggtgatcagatcaactatcccagcatcacagtgcctgtgcccaagcagtcctcactttgcttaacagtggccccagagagcaggagtagtgatgctggtgattcggatatgccaaagagaagccacaaagtgcttccttttaaatgaaaaggtgaaagttctcaacttaaaaaagaaaagaaaaaaatcatatactgaggttgctaagatctacatgacaataagatattttgggagagagatacgttcacataattttattacatatattgttacaattgttctattttgttagttactgttggtaatctcttactgtgcctaatttataaattaaactttagatatgtatgtacaggaaaaaatgtagtatatagtatcgtatatatgtacaggaaaaaaacgtactatctgtggtttcaggtgtccactgcgggtcttcaaacgtacccccctcaggtgagaggggactgctgtacaaagaatataggaaggcctctagactacatccattccttcctcaacaggaggaaaattcctggtacagtttaacgtaaggcttcactgatcactgttgtttttgtttttgtttttgtttttttgagacagagtctcactcttgcccaggctggagtgcagtggcacggtcttggctcactgcaacctccacctcccaggttccagcaattctcctgcctcagcctccccagtagctgggattacagacatgcaccaccacacctggctaatttttgtatttttagtagagacagttttcaccatgttgtccaggctggtctcaactcctgacctcaggtgatccacccaccttgccctcccaaagtgctaggattacaggcgtgagccactgcacctagcccactgatcactcttctgcttacagaatatcagaagtcattctagaggcaaatttgaagagtggaaaaatcactttttctgaatgatcttgtttttggtgtagatgtttttattgtgtgggttagtttaatgaatacataaagactaccagtaccattctgtctttactccgtggcatctgtggaataaccctgctaatgtaacacgtgagaaagcctttggtcatgccacccactctaccagttgtccccaccatcccccgccctcctccctgtgagacactgggccaaaggctcactacccctgtgcgttgtccagcacacagacactatgtgcattatttgtacataaggataatcacatctacctgagactgctatcatggaaattaaatgtttggtacatgtaaagtctttgaaagtgtaactggaatattgtgtaattttaataaataataactattgttgtttttatgatcattactaccatttgtgttgccattagtgaatttttacaagaaaactccctgtgggtgcaatgagtctggaaaagaccattgagtcttctagaagaaaacattaagagattattggcacagccgtgggttacgcaatgatttcttagtacacaaaacacagcaaacataaaaagttgttacacttcatcaaaagtacaaagttctgttcatcaaatgatgctgttaagatagggaaaagacaagaaacaggactggaagaagatgtttgctctaaggtacacctgacaaaggaactctcatagaaaatataaagaatccctcaagttgaaaaaaaaatcaatttaaaggggagaaaacttcagcacgtctcaacagaagaccaccaaatggccaataagtaagtgaaaatgtattcaatgtcattgctcctcaaggaactgtagagtaaaaccacaatgtgctgtcactctagacagtcaccaggatgattaaatttaaatcacaataacaaggctgatttcagatgtctcaccacaaagaaggaggataagggagcgaggtgatggatatgttaattagcttgatttaatccttccacattgtatacatgtatcagaacatcacattgtactccatcaatataatacaattattatttgtcaatcaaatattaataaaatcaaagatgagcaggaaaaaaaaaaaaaaaaaaaa

SEQ ID NO: 711 - DNA, 1581 bp, HOMO SAPIENS
ctcgccgctgccccggctccgccgctcgcagagagattcggaggagcccgggcgggggggaggaggagggggaggagggagcggagatctcggggctcggagccggccgccgctccgctccgatcgctgtggggcttggttttttgggggtgggggggcgggggggctcagatatggaggcaaatgggagccaaggcacctcgggcagcgccaacgactcccagcacgaccccggtaaaatgtttatcggtggactgagctggcagacctcaccagatagccttagagactattttagcaaatttggagaaattagagaatgtatggtcatgagagatcccactacgaaacgctccagaggcttcggtttcgtcacgttcgcagacccagcaagtgtagataaagtattaggtcagccccaccatgagttagattccaagacgattgaccccaaagttgcatttcctcgtcgagcgcaacccaagatggtcacaagaacaaagaaaatatttgtaggcgggttatctgcgaacacagtagtggaagatgtaaagcaatatttcgagcagtttggcaaggtggaagatgcaatgctgatgtttgataaaactaccaacaggcacagagggtttggctttgtcacttttgagaatgaagatgttgtggagaaagtctgtgagattcatttccatgaaatcaataataaaatggtagaatgtaagaaagctcagccgaaagaagtcatgttcccacctgggacaagaggccgggcccggggactgccttacaccatggacgcgttcatgcttggcatggggatgctgggatatcccaacttcgtggcgacctatggccgtggctaccccggatttgctccaagctatggctatcagttcccaggcttcccagcagcggcttatggaccagtggcagcagcggcggtggcggcagcaagaggatcaggctccaacccggcgcggcccggaggcttcccgggggccaacagcccaggacctgtcgccgatctctacggccctgccagccaggactccggagtggggaattacataagtgcggccagcccacagccgggctcgggcttcggccacggcatagctggacctttgattgcaacggcctttacaaatggataccattgagcaggtgctttcgttgccatctcactctgagagcatacctggatgtccaggcaagactgggcgaagtttctgagtggccctttgtttaggtgatgtcctcagacctggacccccaccagcctcactccccatcccaaccagagatggctcacttcggatcgagggttgactacatctcatcatctcacgaatctgctgtaatataagacaacagcttttaaatgtgtatataacccatgatttcggttttgttttgttttgtttttcttgatggtttccctctccctccctctcttcccattctccttttaaatctctttgaatcacatttggtagtgattttgacttagtccagtagtcacatagctttaatatctagttcaaagctaaccatagtataattgttatattaaggagttat

SEQ ID NO: 712 - DNA, 2937 bp, HOMO SAPIENS
atttggttgaaagaaaacccacaatccagtgtcaagaaagaagtcaacttttcttcccctacttccctgcatttctcctctgtgctcactgccacacgcagctcaacctggacggcacagccagaggcgagatgcttctctgctgatctgagtctgcctgcagcatggacctgggtcttccctgaagcatctccagggctggagggacgactgccatgcaccgagggctcatccatccgcagagcagggcagtgggaggagacgccatgacccccatcgtcacagtcctgatctgtctcgggctgagtctgggccccaggacccacgtgcagacagggaccattcccaagcccaccctgtgggctgagccagactctgtgatcacccaggggagtcccgtcaccctcagttgtcaggggagccttgaagcccaggagtaccgtctatatagggagaaaaaatcagcatcttggattacacggatacgaccagagcttgtgaagaacggccagttccacatcccatccatcacctgggaacacacagggcgatatggctgtcagtattacagccgcgctcggtggtctgagctcagtgaccccctggtgctggtgatgacaggagcctacccaaaacccaccctctcagcccagcccagccctgtggtgacctcaggaggaagggtgaccctccagtgtgagtcacaggtggcatttggcggcttcattctgtgtaaggaaggagaagaagaacacccacaatgcctgaactcccagccccatgcccgtgggtcgtcccgcgccatcttctccgtgggccccgtgagcccgaatcgcaggtggtcgcacaggtgctatggttatgacttgaactctccctatgtgtggtcttcacccagtgatctcctggagctcctggtcccaggtgtttctaagaagccatcactctcagtgcagccgggtcctgtcgtggcccctggggaaagcctgaccctccagtgtgtctctgatgtcggctatgacagatttgttctgtacaaggagggggaacgtgaccttcgccagctccctggccggcagccccaggctgggctctcccaggccaacttcaccctgggccctgtgagccgctcctacgggggccagtacagatgctacggtgcacacaacctctcctctgagtgctcggcccccagcgaccccctggacatcctgatcacaggacagatccgtggcacacccttcatctcagtgcagccaggccccacagtggcctcaggagagaacgtgaccctgctgtgtcagtcatggcggcagttccacactttccttctgaccaaggcgggagcagctgatgccccactccgtctaagatcaatacacgaatatcctaagtaccaggctgaattccccatgagtcctgtgacctcagcccacgcggggacctacaggtgctacggctcactcaactccgacccctacctgctgtctcaccccagtgagcccctggagctcgtggtctcaggaccctccatgggttccagccccccacccaccggtcccatctccacacctggccctgaggaccagcccctcacccccactgggtcggatccccaaagtggtctgggaaggcacctgggggttgtgatcggcatcttggtggccgtcgtcctactgctcctcctcctcctcctcctcttcctcatcctccgacatcgacgtcagggcaaacactggacatcgacccagagaaaggctgatttccaacatcctgcaggggctgtggggccagagcccacagacagaggcctgcagtggaggtccagcccagctgccgacgcccaggaagaaaacctctatgctgccgtgaaggacacacagcctgaagatggggtggagatggacactcgggctgctgcatctgaagccccccaggatgtgacctacgcccagctgcacagcttgaccctcagacggaaggcaactgagcctcctccatcccaggaaagggaacctccagctgagcccagcatctacgccaccctggccatccactagcccggagggtacgcagactccacactcagtagaaggagactcaggactgctgaaggcacgggagctgcccccagtggacaccaatgaaccccagtcagcctggacccctaacaaagaccatgaggagatgctgggaactttgggactcacttgattctgcagtcgaaataactaatatccctacattttttaattaaagcaacagacttctcaataatcaatgagttaaccgagaaaactaaaatcagaagtaagaatgtgctttaaactgaatcacaatataaatattacacatcacacaatgaaattgaaaaagtacaaaccacaaatgaaaaaagtagaaacgaaaaaaaaaaactaggaaatgaatgacgttggctttcgtataaggaatttagaaaaagaataaccaattattccaaatgaaggtgtaagaaagggaataagaagaagaagagttgctcatgaggaaaaaccaaaacttgaaaattcaacaaagccaatgaagctcattcttgaaaatattaattacagtcataaatcctaactacattgagcaagagaaagaaagagcaggcacgcatttccatatgggagtgagccagcagacagcccagcagatcctacacacattttcacaaactaaccccagaacaggctgcaaacctataccaatatactagaaaatgcagattaaatggatgaaatattcaaaactggagtttacataatgaacgtaagagtaatcagagaatctgactcattttaaatgtgtgtgtatgtgtgtgtatatatatgtgtgtgtgtgtgtgtgtgtgtgtgtgtgaaaaacattgactgtaataaaaatgttcccatcgtaaaaaaaaaaaaaaaa

SEQ ID NO: 713 - DNA, 3848 bp, HOMO SAPIENS
acctgcagcgcgaggcgcgccgctccaggcggcatcgcagggctgggccggcgcggcctggggaccccgggctccggaggccatgccggcgttggcgcgcgacggcggccagctgccgctgctcgttgttttttctgcaatgatatttgggactattacaaatcaagatctgcctgtgatcaagtgtgttttaatcaatcataagaacaatgattcatcagtggggaagtcatcatcatatcccatggtatcagaatccccggaagacctcgggtgtgcgttgagaccccagagctcagggacagtgtacgaagctgccgctgtggaagtggatgtatctgcttccatcacactgcaagtgctggtcgacgccccagggaacatttcctgtctctgggtctttaagcacagctccctgaattgccagccacattttgatttacaaaacagaggagttgtttccatggtcattttgaaaatgacagaaacccaagctggagaatacctactttttattcagagtgaagctaccaattacacaatattgtttacagtgagtataagaaataccctgctttacacattaagaagaccttactttagaaaaatggaaaaccaggacgccctggtctgcatatctgagagcgttccagagccgatcgtggaatgggtgctttgcgattcacagggggaaagctgtaaagaagaaagtccagctgttgttaaaaaggaggaaaaagtgcttcatgaattatttgggacggacataaggtgctgtgccagaaatgaactgggcagggaatgcaccaggctgttcacaatagatctaaatcaaactcctcagaccacattgccacaattatttcttaaagtaggggaacccttatggataaggtgcaaagctgttcatgtgaaccatggattcgggctcacctgggaattagaaaacaaagcactcgaggagggcaactactttgagatgagtacctattcaacaaacagaactatgatacggattctgtttgcttttgtatcatcagtggcaagaaacgacaccggatactacacttgttcctcttcaaagcatcccagtcaatcagctttggttaccatcgtagaaaagggatttataaatgctaccaattcaagtgaagattatgaaattgaccaatatgaagagttttgtttttctgtcaggtttaaagcctacccacaaatcagatgtacgtggaccttctctcgaaaatcatttccttgtgagcaaaagggtcttgataacggatacagcatatccaagttttgcaatcataagcaccagccaggagaatatatattccatgcagaaaatgatgatgcccaatttaccaaaatgttcacgctgaatataagaaggaaacctcaagtgctcgcagaagcatcggcaagtcaggcgtcctgtttctcggatggatacccattaccatcttggacctggaagaagtgttcagacaagtctcccaactgcacagaagagatcacagaaggagtctggaatagaaaggctaacagaaaagtgtttggacagtgggtgtcgagcagtactctaaacatgagtgaagccataaaagggttcctggtcaagtgctgtgcatacaattcccttggcacatcttgtgagacgatccttttaaactctccaggccccttccctttcatccaagacaacatctcattctatgcaacaattggtgtttgtctcctcttcattgtcgttttaaccctgctaatttgtcacaagtacaaaaagcaatttaggtatgaaagccagctacagatggtacaggtgaccggctcctcagataatgagtacttctacgttgatttcagagaatatgaatatgatctcaaatgggagtttccaagagaaaatttagagtttgggaaggtactaggatcaggtgcttttggaaaagtgatgaacgcaacagcttatggaattagcaaaacaggagtctcaatccaggttgccgtcaaaatgctgaaagaaaaagcagacagctctgaaagagaggcactcatgtcagaactcaagatgatgacccagctgggaagccacgagaatattgtgaacctgctgggggcgtgcacactgtcaggaccaatttacttgatttttgaatactgttgctatggtgatcttctcaactatctaagaagtaaaagagaaaaatttcacaggacttggacagagattttcaaggaacacaatttcagtttttaccccactttccaatcacatccaaattccagcatgcctggttcaagagaagttcagatacacccggactcggatcaaatctcagggcttcatgggaattcatttcactctgaagatgaaattgaatatgaaaaccaaaaaaggctggaagaagaggaggacttgaatgtgcttacatttgaagatcttctttgctttgcatatcaagttgccaaaggaatggaatttctggaatttaagtcgtgtgttcacagagacctggccgccaggaacgtgcttgtcacccacgggaaagtggtgaagatatgtgactttggattggctcgagatatcatgagtgattccaactatgttgtcaggggcaatgcccgtctgcctgtaaaatggatggcccccgaaagcctgtttgaaggcatctacaccattaagagtgatgtctggtcatatggaatattactgtgggaaatcttctcacttggtgtgaatccttaccctggcattccggttgatgctaacttctacaaactgattcaaaatggatttaaaatggatcagccattttatgctacagaagaaatatacattataatgcaatcctgctgggcttttgactcaaggaaacggccatccttccctaatttgacttcgtttttaggatgtcagctggcagatgcagaagaagcgatgtatcagaatgtggatggccgtgtttcggaatgtcctcacacctaccaaaacaggcgacctttcagcagagagatggatttggggctactctctccgcaggctcaggtcgaagattcgtagaggaacaatttagttttaaggacttcatccctccacctatccctaacaggctgtagattaccaaaacaagattaatttcatcactaaaagaaaatctattatcaactgctgcttcaccagacttttctctagaagctgtctgcgtttactcttgttttcaaagggacttttgtaaaatcaaatcatcctgtcacaaggcaggaggagctgataatgaactttattggagcattgatctgcatccaaggccttctcaggctggcttgagtgaattgtgtacctgaagtacagtatattcttgtaaatacataaaacaaaagcattttgctaaggagaagctaatatgattttttaagtctatgttttaaaataatatgtaaatttttcagctatttagtgatatattttatgggtgggaataaaatttctactacagaattgcccattattgaattatttacatggtataattagggcaagtcttaactggagttcacgaaccccctgaaattgtgcacccatagccacctacacattccttccagagcacgtgtgcttttaccccaagatacaaggaatgtgtaggcagctatggttgtcacagcctaagatttctgcaacaacaggggttgtattgggggaagtttataatgaataggtgttctaccataaagagtaatacatcacctagacactttggcggccttcccagactcagggccagtcagaagtaacatggaggattagtattttcaataaagttactcttgtccccacaaaaaaa

SEQ ID NO: 714 - DNA, 1186 bp, HOMO SAPIENS
gatgtccggctggagctgtcgcctccgccgccgctgctgccggtgccggttgtgagcgggtctccagtcggctcctctgggcgtctcatggcctctagcagctccctggtgcccgaccggctgcgcctgccgctctgcttcctgggtgtctttgtctgctatttttactatgggatcctgcaggaaaagataacaagaggaaagtatggggaaggagccaagcaggagacgttcacctttgccttaactttggtcttcattcaatgtgtgatcaatgctgtgtttgccaagatcttgatccagttttttgacactgccagggtggatcgtacccggagctggctctatgctgcctgttctatctcctatctgggtgccatggtctccagcaattcagcactacagtttgtcaactacccaactcaggtccttggtaaatcctgcaagccaatcccagtcatgctccttggggtgaccctcttgaagaagaagtacccgttggccaagtacctgtgtgtgctgttaattgtggctggagtggcccttttcatgtacaaacccaagaaagttgttgggatagaagaacacacagtcggctatggagagctactcttgctattatcgctgaccctggatggactgactggtgtttcccaggaccacatgcgggctcattaccaaacaggctccaaccacatgatgctgaacatcaacctttggtcgacattgctgctgggaatgggaatcctgttcactggggagctctgggagttcttgagctttgctgaaaggtaccctgccatcatctataacatcctgctctttgggctgaccagtgccctgggtcagagcttcatctttatgacggttgtgtattttggtcccctgacctgctccatcatcactacaactcgaaagttcttcacaattttggcctctgtgatcctcttcgccaatcccatcagccccatgcagtgggtgggcactgtgcttgtgttcctgggtcttggtcttgatgccaagtttgggaaaggagctaagaagacatcccactaggaagagagagactacctccacatcaagaatatttaagttattatctcaaacagtgacatctcttgggaaaatggacttaataggaatatgggactgagttccagtcttttttaataaaataaaatcaagc

SEQ ID NO: 715 - DNA, 3617 bp, HOMO SAPIENS
cagtctcctgaatatttacgcgttgctgaatctcctgtggacaaaccaccaataggccaggactgtcctgtggacagacggggtgagcctcttcttgtgtctggagattctgaaaagatttgatcaccaggagatttttcgggacattaccaaaccactcattttagtggctgcctccgggtgatgatggctgtgtgaacgactgccatggcccaccggaagcttgagagcgtggggagcggcatgttggaccatagggtgagaccaggtcctgtccctcacagccaggagcccgagagcgaggacatggagctgcccttggagggctatgtgcccgagggcctggagctggctgccctgcggccagagagccccgcgccagaggaacaggagtgccacaaccacagccccgatggggactccagctctgactacgtgaacaacacctctgaggaggaggactatgacgagggcctccctgaggaggaggagggcatcacctactacatccgctactgccctgaggacgacagctacctagagggcatggactgcaacggggaggagtacctggcccacagtgcacaccctgtggacactgatgagtgccaggaggcggtggaggagtggacggactcggcgggcccgcacccccacggccacgaggctgaaggcagccaggactacccagacggccaactgcccattccggaggatgagccctccgtccttgaggcccatgaccaggaagaagatggtcactactgtgccagcaaagagggctaccaggactactaccccgaggaggccaacgggaacaccggcgcctccccctaccgcctgaggcgtggggatggggacctggaggaccaggaggaggacattgaccagatcgtggcagagatcaagatgagtctgagcatgaccagcatcaccagcgccagtgaggccagccccgagcatgggcctgagccagggcctgaggactctgtagaggcctgcccacccatcaaggccagctgcagccccagcaggcacgaggcgaggcccaagtcgctgaacctccttcccgaggccaagcaccccggagacccccagagaggcttcaagcccaagaccaggaccccagaagagaggctgaagtggccccacgagcaggtttgcaatggtctggagcagccaaggaagcagcagcgctctgatctcaatggacctgttgacaataacaacattccagagacaaagaaggtggcatcatttccaagttttgtggctgttccagggccctgcgaaccagaagacctcatcgacgggatcatctttgctgccaattacctggggtccacccagctgctatcagaacggaacccttccaaaaacatcagaatgatgcaagcgcaggaggccgtcagccgggtcaagaattctgagggggatgcccagacgctgacggaagtggacctcttcatttccacccagaggatcaaggttttaaatgcagacacgcaggaaaccatgatggaccacgccttgcgtaccatctcctacatcgccgacattgggaacattgtagtgctgatggccagacgccgcatgccccggtcagcctctcaggactgcatcgagaccacgcccggggcccaggaaggcaagaagcagtataagatgatctgccatgtgttcgagtcggaggatgcccagctcatcgcccagtctatcggccaggccttcagcgtggcctaccaggagttcctgcgagccaatggcatcaaccccgaagacttgagccagaaggaatacagcgacatcatcaacacccaggagatgtacaacgacgacctcatccacttctcaaactcggagaactgcaaggagctgcagctggagaagcacaagggcgagatcctgggcgtggtggtggtggagtcgggctggggctccatcctgcccacggtgatcctggccaacatgatgaatggcggcccggctgcccgctcggggaagctgagcatcggggaccagatcatgtccatcaatggcaccagcctggtggggctgcccctcgccacctgccaaggcatcatcaagggcctgaagaaccagacacaggtgaagctcaacattgtcagctgtcccccggtcaccacggtccttatcaagcggccagacctcaagtaccagctgggcttcagcgtgcagaatggaattatctgcagcctcatgagagggggcattgctgagcgagggggcgtccgtgtgggccaccgcatcatcgagatcaacgggcagagcgtggtggccacagcccacgagaagatagtccaagctctgtccaactcggtcggagagatccacatgaagaccatgcccgccgccatgttcaggctcctcacgggtcaggagaccccgctgtacatctaggccaccccagcctggccacgcagccaggacaccgggcagggccgcccgggcccagaggagctgggagccgggccgcagacttgaccccgacgccacagcccagccacggacgctggctccccaaagggtgtgccctcaccacccacttgatttttttcattttgccaaaaaggggtatgtctttatcaaaggagagtcacagaacaaatgtttgtttgtaaagcgttccaagtattttgccacgttctggactgtcttctccctgcacaagccagggtgtgtctcggtagctgtgcgtggtgtggagtgtgtgtctttcctccctgaagctgtgcggagcgaactggcgcctccgagggacgcggctcccggggcagggcagccgtcacccctgcctcccgcccccttggctgggacgtctggggtcctgtggggcccccacaatggtcccaaacagctgcctctgccactgactgcagggacacgggcagcctggctcccaggacacgacttgtaatgaaagtttggggacatgtgattgattgattgattgtaaataaaggatgatggccacaacatgaaaactccatatttatttagatgctattattactgtttggacttttattttggcaggcttttttccagactctagggttttccaatgtgactaatgaccacacctgcctctcccgtcgtctcttctgggcaccctcccacccggctgcatacccgggcagggctcccacagagacaaggagggcacaggtgtctgccccctctttaaaatcgatctacacacatccacgcacatgcgaccccgaggaaacgaaacccactctagaaaacgcgaccttggccgcacctaaagcagccagccgtgagtgcagaccccttggccagcgtggcgcagtggccctgagcagtagtggcatgtgtgtagatcaagtcggatctagtccagctcggttcattagcgatccatgtaatctgacgtcatcttgtctcgaagtctctttttttggcccaggccttgaagaatacactgtgacttaagaagccttaccacgcagtaactaaagctttaggatgactgtattcgaggagtgccgtgtgttgcatgcagctacccgtaggaagacttcgcgcatatcactaataaacctgaagtcgtgatgaaaaaaaaaaaaaaaaaa

SEQ ID NO: 716 - DNA, 5957 bp, HOMO SAPIENS
agtatccaccccgcccgctcccggtgacgtgccagccccaggcccacgccgctcccgccccgcgtgatgacgccaccgtcccgggcggaggcgggcgtgcggcggagccgcgtcccctcagaggggcgctggcgcggggctgagccgcccgggatcagcgcgagcacccagcccgcctcggccgggagggcagcgcggcactgcggggcgatgagcggcgcccggggcgagggcccggaggcgggcgccggcggggctgggggccgcgcggcgcctgagaaccccgggggcgtgctgagcgtggagctgcccgggctgctggcgcagctggcgcggagcttcgcgctgctgctgcccgtgtacgcgctgggctacctggggctcagcttcagctgggttctcctcgcgctcgcgctgctcgcctggtgtcgccgcagccgcggcctcaaggccctgcgcctgtgccgcgcgctggcgctgctggaagacgaggagcgcgtcgtgcgcctgggggtgcgcgcctgcgacctgcccgcctgggttcattttccagacactgaaagagcagaatggctaaataagactgtaaaacacatgtggcctttcatttgccaatttatagagaagttgtttcgagaaactatagaaccagccgtgcggggagcaaacacccaccttagcacctttagtttcacgaaggtcgacgtgggccagcagcccctcaggatcaatggtgttaaggtatacactgaaaatgtagacaaaaggcaaattattttggaccttcagattagttttgtaggaaattgtgagattgatttggagatcaaacgatatttttgtagagctggtgtgaaaagtatccagattcatggtaccatgcgggtgatcctggaaccgttgattggagatatgcccttagttggagctttgtctatcttcttccttaggaaaccacttttagaaattaactggacaggactgacgaatcttctggatgtccctggattgaatggtttatcagatactatcattttggatataatatcaaactatctggtgcttcccaatcgaatcaccgttccacttgtcagtgaagttcaaatagctcagttgcggtttcctgtaccaaagggtgttctaaggatacattttattgaagctcaggatcttcaggggaaagacacttaccttaagggacttgtcaagggaaagtcagacccctatggaatcattagagttggcaaccaaatcttccaaagcagagtcatcaaggagaacctcagtccaaagtggaatgaagtctatgaggctttagtgtatgaacatcctggacaagaattagagattgagctctttgatgaagacccagacaaggatgactttttaggaagtcttatgattgacctcattgaagttgaaaaggagcgccttttagatgaatggttcactctggacgaggttcccaaggggaagctacacttgagactggagtggctcacgttaatgccaaatgcgtcaaacctcgacaaggtgctaacagacatcaaagctgacaaagaccaagccaacgatggtctttcctctgcattgctgatcttgtacttggattcagcaaggaaccttccgtcagggaagaaaataagcagcaacccaaatcctgttgtccagatgtcagttgggcacaaggcccaggagagcaagattcgatacaaaaccaatgaacctgtgtgggaggaaaacttcactttcttcattcacaatcccaagcgccaggaccttgaagttgaggtcagagacgagcagcaccagtgttccctggggaacctgaaggtccccctcagccagctgctcaccagtgaggacatgactgtgagccagcgcttccagctcagtaactcgggtccaaacagcaccatcaagatgaagattgccctgcgggtgctccatctcgaaaagcgagaaaggcctccagaccaccaacactcagctcaagtcaaacgtccctctgtgtccaaagaggggaggaaaacatccatcaaatctcatatgtctgggtctccaggccctggtggcagcaacacagctccatccacaccagtcattgggggcagtgataagcctggtatggaagaaaaggcccagccccctgaggccggccctcaggggctgcacgacctgggcagaagctcctccagcctcctggcctccccaggccacatctcagtcaaggagccgacccccagcatcgcctcggacatctcgctgcccatcgccacccaggagctgcggcaaaggctgaggcagctggaaaacgggacgaccctgggacagtctccactggggcagatccagctgaccatccggcacagctcgcagagaaacaagcttatcgtggtcgtgcatgcctgcagaaacctcattgccttctctgaagacggctctgacccctatgtccgcatgtatttattaccagacaagaggcggtcaggaaggaggaaaacacacgtgtcaaagaaaacattaaatccagtgtttgatcaaagctttgatttcagtgtttcgttaccagaagtgcagaggagaacgctcgacgttgccgtgaagaacagtggcggcttcctgtccaaagacaaagggctccttggcaaagtattggttgctctggcatctgaagaacttgccaaaggctggacccagtggtatgacctcacggaagatgggacgaggcctcaggcgatgacatagccgcagcaggcaggaggcgtcctcttcagcgtagctctccacctctacccggaacacaccctctcacagacgtaccaatgttatttttataatttcatggatttagttatacataccttaatagttttataaaattgttgacatttcaggcaaatttggccaatattatcattgaattttctgtgttggatttcctctaggatttcgccagttcctacaacgtgcagtagggcggcggtagctcttgtgtctgtggactctgctcagctgtgtccgtaggagtcggatgtgtctgtgctttattatggccttgtttatatatcactgaggtatactatgccatgtaaatagactattttttataatctttacatgctggtttaaattcagaaggaaatagatcaaggaaatatatatattttcttctaaaacttattaaattcgtgtgacaaataatcattttcatcttggcagcaaaaagttctcagtgacctattttgtggtgtttctttttgaaaagaaaagctgaaatattattaaatgctagtatgtttctgcccattatgaaagatgaaataaagtattcaaaatattaacattttcataaatataaggatgtattattgagaagtaagttgaagggcttataaggaaaaatgttttataactgagtaatatattaagagaattgtcatggttcataaatcacattatgctaatctgaaatttcttacataaaaatgaagtgtcttatgtttattttaattgctgttgtaacttactcatgaaacagtatacagacaccttgtacttttcctcaactgtaagagcagactttcaatgttagcaattaagctgttgtcaaacaatcagtcatgagctttgttaattttcaatgttttcccagcctataaaaaaaggaaggtacacgttgtccttttaaaggttgtgaggtagattggagtgagtagacaggatattgcattaaaaattgaaagctcgatctcattattgtcaggaacccccagtgtgacctcacacataggatgtgggacctttgagccgatgtgcactggccaccaccagggttgggggcgccacagctgcgagcccggcccctgctgttctcagcagccacttcccaggctgcctcactttatgccatgactgaccttaatattgggatattgttatgcaatttttatcctgtttagactgttaaaagcaggtttctgtacttaagagtcccccagacctcctgtgaggtgaggctctgttgcagtgtcgtaggctgtgtgtgtctgtaaagaaagaatgcacatatgtagacgattaagtgtatattataagctatatgctgaaaatggcttccatagccatgagaacatcttaaaactatgtgtaaatatattaaggaaagtatagctttgtaatttaaattggagcttttagcttgtttcatggaactatacaacttgtgggtaactcacatgaccaaacaaaccaaagtgcctgtgacggggcgggtggcgtctacccaccctcccttctagcagattcttattttgtttgaatttataaacaaggctggtggctgtctacccaccctcccttctagcagattttgattttgtttcaatttataacttacactttgaaccatgggtttacttataatggagtctgtagcttcacagcatatttcatgtaatcataaagaccagtatattccctcctgctgaatgacatgcgactgtaaagcctctttataaaccatttccaatgttagtatataggattatttgggaagcgtatcaatacctttatagacaaatacgaacatgtatgcacacaaaacatttaactatggtatttatggaagacaggtaacaacattaaatctagttgctttcccttagtattagatttgttgagggttttttaaaaatcaggtctgttgaaagtcttctgtcataatctataaagcagcagcactcatggaaattgtagcatgccagtaatttttaccaacatcccatacatctgagttctgcagtccagtgtgtaatccgctccatgtgtattttgcttaatggaatgctttatttaagcacttaggcagagtagacacaattaaaggtacaaagcccagaggaagtggtagagcagcaccgtgcctgccctgaggcagtggagtcagtagcgctgtccccagggccttgagtgcctggaggtgcttggcctccagtagctgcctccattctcttttaaaaaaagggggtgattctgaggcactgaagtgcctcccagatgtggaggagtgaagccaccatcgaggccacactcagcactccaggatcccagcgatgtcagacactcttgagttgtcaaaacgttaattttcagttttaaataatcagtttatctaagaaaagggaattttaacttttctaccttgagccaagccaatgaagggaaaattaattaacttagtaaatttgaagtgcagctctgttagctcgtacatgtgggttcttatcctgatcctgtgccttaaagtaggaaggtgtttccaagttcagattaaaatagaagcagctggccgggtgcggtggctcacgcctgtaatcccagcactttgggaggccgaggcgggcggatgacctgaggtcaggagttcaagaccagcctggccaacatggagaaaccccatctttactaaaaatacaaaaattagccgggcgtggtggtggagcgcacgcctgtagtcccagctactcgggaggctgaggcaggagaattgcttgaacccaggaggcggaggttgcagtgagccaagatcgcaccactgcactccagcctgggcaacagagtgagactccgtctcaaaaaataaataaaatagaagcagccttgtaactgtatttaccatgataatatattctgcacggtaagaattccttttacagacattctttatcaagaggtcggcccttctttttcaggcacataagccaaatgcaggcctgtgtgtagctgtgtgttttttctgtggttgccgcatttattccacctccagctggaccccccactgcaaatagagaacagcggtgggggatgggggttaaaaagtagagaacctcctttctgttcaactaatttcacgtgacagtgcatgtatttattcaataaaacctttatgttagctc

SEQ ID NO: 717 - DNA, 5433 bp, HOMO SAPIENS
ctttccccttactccgctcccctcttttccctccctctcctccccttccctctgttctctcctcctcttcccctcccctcccccgtccggagcactctatattcaagccaccgtttcctgcttcacaaaatggccaccgcacgcgacacctacggtcacgtggcctgccgccctctcagtttcgggaatctgcctagctcccactaaggggaggctacccgcggaagagcgagggcagattagaccggagaaatcccaccacatctccaagcccgggaactgagagaggaagaagagtgaaggccagtgttaggaaaaaaaaaacaaaaacaaaaaaaacgaaaaacgaaagctgagtgcatagagttggaaaggggagcgaatgcgtaaggttggaaaggggggcgaagaggcctaggttaacattttcaggcgtcttagccggtggaaagcgggagacgcaagttctcgcgagatctcgagaactccgaggctgagactagggttttagcggagagcacgggaagtgtagctcgagagaactgggacagcatttcgcaccctaagctccaaggcaggactgctaggggcgacaggactaagtaggaaatcccttgagcttagacctgagggagcgcgcagtagccgggcagaagtcgccgcgacagggaattgcggtgtgagagggagggcacacgttgtacgtgctgacgtagccggctttccagcgggtatattagatccgtggccgcgcggtgcgctccagagccgcagttctcccgtgagagggccttcgcggtggaacaaacactcgcttagcagcggaagactccgagttctcggtactcttcagggatgagtcatgtggcagtggaaaatgcgctcgggctggaccagcagtttgctggcctagacctgaactcttcagataatcagagtggaggaagtacagccagcaaagggcgctatattcctcctcatttaaggaaccgagaagctactaaaggtttctacgataaagacagttcagggtggagttctagcaaagataaggatgcgtatagcagttttggatctcgtagtgattcaagagggaagtctagcttcttcagtgatcgtggaagtggatcaaggggaaggtttgatgatcgtggacggagtgattacgatggcattggcagccgtggtgacagaagtggctttggcaaatttgaacgtggtggaaacagtcgctggtgtgacaaatcagatgaagatgattggtcaaaaccactcccaccaagtgaacgcttggaacaggaactcttttctggaggcaacactgggattaattttgagaaatacgatgacattccagttgaggcaacaggcaacaactgtcctccacatattgaaagtttcagtgatgttgagatgggagaaattatcatgggaaacattgagcttactcgttatactcgcccaactccagtgcaaaagcatgctattcctattatcaaagagaaaagagacttgatggcttgtgcccaaacagggtctggaaaaactgcagcatttctgttgcccatcttgagtcagatttattcagatggtccaggcgaggctttgagggccatgaaggaaaatggaaggtatgggcgccgcaaacaatacccaatctccttggtattagcaccaacgagagagttggcagtacagatctacgaggaagccagaaaattttcataccgatctagagttcgtccttgcgtggtttatggtggtgccgatattggtcagcagattcgagacttggaacgtggatgccatttgttagtagccactccaggacgtctagtggatatgatggaaagaggaaagattggattagacttttgcaaatacttggtgttagatgaagctgatcggatgttggatatggggtttgagcctcagattcgtagaatagtcgaacaagatactatgcctccaaagggtgtccgccacactatgatgtttagtgctacttttcctaaggaaatacagatgctggctcgtgatttcttagatgaatatatcttcttggctgtaggaagagttggctctacctctgaaaacatcacacagaaagtagtttgggtggaagaatcagacaaacggtcatttctgcttgacctcctaaatgcaacaggcaaggattcactgaccttagtgtttgtggagaccaaaaagggtgcagattctctggaggatttcttataccatgaaggatacgcatgtaccagcatccatggagaccgttctcagagggatagagaagaggcccttcaccagttccgctcaggaaaaagcccaattttagtggctacagcagtagcagcaagaggactggacatttcaaatgtgaaacatgttatcaattttgacttgccaagtgatattgaagaatatgtacatcgtattggtcgtacgggacgtgtaggaaaccttggcctggcaacctcattctttaacgagaggaacataaatattactaaggatttgttggatcttcttgttgaagctaaacaagaagtgccgtcttggttagaaaacatggcttatgaacaccactacaagggtagcagtcgtggacgttctaagagtagcagatttagtggagggtttggtgccagagactaccgacaaagtagcggtgccagcagttccagcttcagcagcagccgcgcaagcagcagccgcagtggcggaggtggccacggtagcagcagaggatttggtggaggtggctatggaggcttttacaacagtgatggatatggaggaaattataactcccagggggttgactggtggggtaactgagcctgctttgcagtaggtcaccctgccaaacaagctaatatggaaaccacatgtaacttagccagactataccttgtgtagcttcaagaactcgcagtacattaccagctgtgattctccactgaaattttttttttaagggagctcaaggtcacaagaagaaatgaaaggaacaatcagcagccctgttcagaaggtggtttgaagacttcattgctgtagtttggattaactcccctcccgcctacccccatcccaaactgcatttataattttgtgactgaggatcatttgtttgttaatgtactgtgcctttaactttagacaactttttattttgatgtcctgttggctcagtaatgctcaagatatcaattgttttgacaaaataaatttactgaacttgggctaaaatcaaaccttggcacacaggtgtgatacaacttaacaggaatcatcgattcatccataaataatataaggaaaaacttatgcggtagcctgcattagggctttttgatacttgcagattgggggaaaacaacaaatgtcttgaagcatattaatggaattagtttctaatgtggcaaactgtattaagttaaagttctgatttgctcactctatcctggataggtatttagaacctgatagtctttaagccattccagtcatgatgaggtgatgtatgaatacatgcatacattcaaagcactgttttcaaagttaatgcaagtaaatacagcaattcctctttcaacgtttaggcagatcattaattatgagctagccaaatgtgggcatactattacagggaaagtttaaaggtctgataacttgaaataggtttttaggagaattcatctacttagactttttaaatgcctgccataaatgaaattgaaatggtagaatggctgaccacagcaatgaccagccctcattagggccctggatgatttttggtctaataacgcatgctagtgttgatgttttttggtcaagagggtatgaacaggaagaattaaatgcagcaggctttattttaaatgccgattcacattactctgttcaagctgcgttgagatgttaaactggcttactatagacttcgtaaaaatggctccagaagagtaacaaactgaaatctttgagatcacacaggttggaaatatgtacataactgcacaaggtgtcaattctgctctacagtgcagttttagtcagttttagttgcataggtttccattgtatttatagtctgtttatgctaaatctggccaaagatgagcattgtccaccactaaaatgcctctgccactttgaattctgtgctaattttgtggccagaatgcggtgatcaaaacgctccatctttttacagtggcataggaagacggcaaaaatttcctaaagtgcaatagattttcaagtgtattgtgccttgttctaaaacttttattaagtaggtgcacttgacagtattgaggtcatttgttatggtgctatttcaattagtctaggtttaggcccttgtacattttgcccataactttttacaaagtacttcttttattgcacattcagagaattttatatatatgtcttgtgtgcgtgtccttaaacttccaatcttactttgtctcttggagattgttgaacgcagcttgtctaggaaggggatgggactagattctaaaatttatttgggaccatgggaatgatagttgggaagaaaactatttgcacacgacagatttctagatactttttgctgctagttttatgtaatatttattgaacattttgacaaatatttatttttgtaagcctaaaagtgattctttgaaagtttaaagaaacttgaccaaaagacagtacaaaaacactggcacttgaatgttgaatgtcaccgtatgcgtgaaattatatatttcggggtagtgtgagcttttaatgtttaagtcatattaaactcttaagtcaaattaagcagacccggcgttggcagtgtagccataactttctgatgttagtaaaaacaaaattggcgacttgaaattaaatcatgccaaggttttgatacacttgtcttaagatattaatgaaacacttcaaaacactgatgtgaagtgtccagattctcagatgtttgttgtgtggattttgtttagttgtgtgtttttttttttttttcagtgaatgtctggcacattgcaatcctcaaacatgtggttatctttgttgtattggcataatcagtgacttgtacattcagcaatagcatttgagcaagttttatcagcaagcaatattttcagttaataaggtttcaaaaatcatgtaaggatttaaacttgctgaatgtaaagattgaacctcaagtcactgtagctttagtaattgcttattgtattagtttagatgctagcactgcatgtgctgtgcatattctgattttattaaaataaaaagttgaactgcacagtctcctttgttgttgtcaattgtggtttattttcagaggtgtaaataaagtgctcttgcctgaaaaaaaaaaaaaaaaaaaaaaaaaaaaaaaaaaaaaaa

SEQ ID NO: 718 - DNA, 5038 bp, HOMO SAPIENS
cgctttttccgtaacaaaatagcaaagctcccgactgtccgcagccccggccgctcacagatggagggtcccagggcctaggacgcagcccccagcgggaagctccagctggccgtgaagaggccgagtcgagagccgggaggcgcgcgggggtgggcgctgcagccgcgggttgtttatctggagtacggaggggaggggggagcctggaaaccgccccgtgtcccatttcctcctcttgttttcgctccggattctccatgttggacccaaactgaggagcccggagctgccgctgggggatcggggccgggggcacccgggggagccgctgcccgggccgcccgccctttgtacaggccgcctcccttcccggtccggggaggaaacgagaggggggatgtgaacagctgtggaagtcggagtctcgggagccggagcgggcccccgcccaggccccccagcccagcccagcccgcgcgcccgcccgtcctcccgcccagccagcccgggcccgcgggattgttagatggaacacggctccatcatcacccaggcgcggagggaagacgccctggtgctcaccaagcaaggcctggtctccaagtcctctcctaagaagcctcgtggacgtaacatcttcaaggcccttttctgctgttttcgcgcccagcatgttggccagtcaagttcctccactgagctcgctgcgtataaggaggaagcaaacaccattgctaagtcggatctgctccagtgtctccagtaccagttctaccagatcccagggacctgcctgctcccagaggtgacagaggaagatcaaggaaggatctgtgtggtcattgacctcgatgaaacccttgtgcatagctcctttaagccaatcaacaatgctgacttcatagtgcctatagagattgaggggaccactcaccaggtgtatgtgctcaagaggccttatgtggatgagttcctgagacgcatgggggaactctttgaatgtgttctcttcactgccagcctggccaagtatgccgaccctgtgacagacctgctggaccggtgtggggtgttccgggcccgcctattccgtgagtcttgcgtgttccaccagggctgctacgtcaaggacctcagccgcctggggagggacctgagaaagaccctcatcctggacaactcgcctgcttcttacatattccaccccgagaatgcagtgcctgtgcagtcctggtttgatgacatggcagacactgagttgctgaacctgatcccaatctttgaggagctgagcggagcagaggacgtctacaccagccttgggcagctgcgggccccttagcctgccctgcttccaagcgacggccatcccagtaggggactttcccacactgtgcctttacgatcagcgtgacagagtagaagctggagtgcctcaccacacggcccggaaacagcgggaagtaactggaaagagctttaggacagcttagatgccgagtgggcgaatgccagaccaatgatacccagagctacctgccgccaacttgttgagatgtgtgtttgactgtgagagagtgtgtgtttgtgtgtgtgttttgccatgaactgtggccccagtgtatagtgtttcagtgggggagaagctgaaagaccaagactcttcccaagttagcttgtctcctctcctgtcaccctaagagccactgagttgtgtagggatgaagactattgaagactccattgccaaaccatggcctttcctcagtgttgtaaggcctatgccaaggataaaggaagggtatgcctttgggtactccaggcacacacctttctgaaatccttctccagccagctgctgcagacaaaagatcacatttctgggaagatgagaacttgtttccagaccagcatccagtggccatcaggtcttgtggcccaaaggctatgcttgcctccggctgagtgcctgggataggccttttctatgtctccccaaggctggggtgctgagcctgccttcctcaccacctagccatagtctcaaacctgtggggaaggaggttttctccctgcccgggaagaggacagataactgatttccgttcttttgactgtgttttaaaattctctttctaaacacagagtgttgggcctggtttgtttctgacaaagttacagtcctgggcctgtaatgaatgtcggcggcgctggggttgcagggaaaagacaaatcctcaaagcgtggacgtgtgtccccatggcttgtggatcagctaagctcgggatcatttccataagtctgcttttcagggattctctgctggtgctggtgcaaggacttctgttccaaaggctgggaaaaactaagctgtcccagcccctcccatttcttgggcagggctcttttcctgttgtgtcttcccccagggcctgtcctgtaccgagctctgtctgttccagccttcatccttcctggctgttgcttttcctcttaagggcctcagaactcttgctcttcctgggctgagggggaatgagtgttcttgccatttgccagcctaatgcgcatgctttctgcctctggtaacaggagtgagtgagcccctcagacctgcactctgggtgtctcctgctttcaaaggttcttaatagtgaatgctttaaaattaaagtcatcacgaaatggaagttttcccagggtggaaaataagaggaagtgctgctgtaattgggagcacaaggggcctcccaaaaaggagccccacctcagcatcactgccttaatcgtggcctccctggggtgggtggggttctctcctccctccctccctcctcctggggtgggagggcgctcctgttcccatctctgtgttccctggaggcaggtatcacaaagcatttgtgaattgctttaggtgcagggacaccacccactcaggactcttccccatcatcccttccattgccacaccctagatccagcctcaggaactaacaagttttgagaaaagcaggtagtagagcagcagcttcgtgctctcagcggtggctggctggcatttttctctagcgttgtggtgccaccttcccttcttgtcccaaggttataaggccttgtctttctctttggaatcataaagtggaacagagtccccagaactcatgtggccatttccgccagcatcactccccggtgcctatggggtcccggtgtacctaaagggagaaggaccccatgtgctagccagaaatatactgtctcttgaaggaaagcaggagctcagactcttagagccagctgtggcttcggacccaaggcctgacctaggctgctatcctaatattgcaggaggggcctctcttccaagccccaccctaagggttagcccttggccaaatcttttgccgtctaggcccagccaggcttttctgactaaataagcaataagaggctctaagctgactgagttgcaaggaccctttccgccctcccttggatctccatgtttttccagatggcggaagagcatgtgccaccccctttcctaacagacttgtccaagtgcttggcgtgggacccatgaccaaagcccaggatggcttggtgggagtgtccctgctgcatctgcatgaagcccctgctttttaggcctcactcccatcagaaccctgcctgcccacctgcaactcccccccaacaatgccattcccacttgccccagagaagctactcggccaaacctagccagggtctgttcttgtggaccagagccagcctagtcattatttgctgtcgggtttccagtttcaccgtgtgttagggtgagggatgattgtaaaatttgctcctcaaaggaatcaggccagactcaattttggagggcaagacagggaggaggccgcttcatcccagactctcttctagggcttcccaccatcagcccctcccacttgagactggtctttgggaggcaataggccaccatgcctggtcagcaccaattcaagccatgccaggaatctgcctacctgccaggttcagttcttttaaggtgcctcttcagggacacagtgtgtctctctgattgggcttctaaatcaaaagcctgatgttcgtgtccctctcatagggggagctttggacacaggaccagtttggaaaagggtcaggtaagggtttccactctgcacattgtagagggaacactctgtaggcccatgggtcccttactagagaggttgagtgaatttgccttcagttaacatgggaccttctgtttagcttcctcttgcttcccaaagattttaagcattttgtaaatgtataaactcacctctggtaacagtggcccagacgctgctttgtgctaaaagcatgggaaatgtaaaggcagtctttctctgggaaatggatgctattctattctgctgcccctacctgttcctgaggcctcatttagaaagaaaatcccctcagaaggctgtctggcacccagtgtcctagccaggccaagtatatgagaaaggtaagtccattttccccttcaggtcctcagtggattacttaaccactgctgtccctcggtccctttttcctaaacgggtttagttctgtcttttttctccttttttctaaatgctggtaaatatttacattcagccagggaagaggaggccagaggtcgggccagctgccccattcttttaacgttgtagggcctgcccatggagcggaccctcctctttgggcctcgtgagcttttttgcttatcatgttccatttcgtgccgctttcccccttcaagatgccatttggagggtaggggatctgcttcccactgtgactgggctatgggattctgactaccttgcttacagattcatggtttgataaatttgttgtattcaaaaacttgaaatgcaggacgccattaagtgtctgtttatatttttggaatatttgtattacttacaattaattaataaaagtgggtttaaaaaacctttccaggaaaaaaaaaaaaaaaaaaaa

SEQ ID NO: 719 - DNA, 265 bp, HOMO SAPIENS
  misc_feature (123)..(124): n is a, c, g, or t
  misc_feature (131)..(131): n is a, c, g, or t
attgctctggaatggaaattaggcttttttgaaggtgtgaccctttttgttcatttcttcagcagttactttttattttttaaatgtttgacacacagtctctgataaatgatcattcaccanncaccgantactctccttgctctgttaagtgtgacactgtccctttgagaatctggcgacagctatgtatcccatcaccacacaccccaaaaaaaaaatttatgtctggttccaggagttaccttttatgagaagtccatct

SEQ ID NO: 720 - DNA, 6038 bp, HOMO SAPIENS
taggttgtgacagttggaagtgtcatgtacaacatgcggcgattaagtctttcacccaccttttcaatgggatttcatctgttagttactgtgagtctcttattttcccatgtggaccatgtaattgctgagacagaaatggaaggagaaggaaatgaaactggtgaatgtactggatcatattactgtaagaaaggggtgattttgcccatttgggaaccccaagacccttcttttggggacaaaattgctagagctactgtgtattttgtggccatggtctacatgtttcttggagtctctatcatagctgatcggttcatgtcctctatagaagtcatcacatctcaagaaaaagaaataaccataaagaaacccaatggagagaccaccaagacaactgtgaggatctggaatgaaacagtttctaacctgaccttgatggccctgggatcttctgctcctgagattctcctttcagtaattgaagtgtgtggccataacttcactgcaggagacctcggtcctagcaccatcgtgggaagtgctgcattcaatatgttcatcattattgcactctgtgtttatgtggtgcctgacggagagacaaggaagattaagcatttgcgtgtcttctttgtgacagcagcctggagcatctttgcctacacctggctttacattattttgtctgtcatatctcctggtgttgtggaggtctgggaaggtttgcttactttcttcttctttcccatctgtgttgtgttcgcttgggtagcggataggagacttctgttttacaagtatgtctacaagaggtatcgagctggcaagcagagggggatgattattgaacatgaaggagacaggccatcttctaagactgaaattgaaatggacgggaaagtggtcaattctcatgttgaaaatttcttagatggtgctctggttctggaggtggatgagagggaccaagatgatgaagaagctaggcgagaaatggctaggattctgaaggaacttaagcagaagcatccagataaagaaatagagcaattaatagaattagctaactaccaagtcctaagtcagcagcaaaaaagtagagcattttatcgcattcaagctactcgcctcatgactggagctggcaacattttaaagaggcatgcagctgaccaagcaaggaaggctgtcagcatgcacgaggtcaacactgaagtgactgaaaatgaccctgttagtaagatcttctttgaacaagggacatatcagtgtctggagaactgtggtactgtggcccttaccattatccgcagaggtggtgatttgactaacactgtgtttgttgacttcagaacagaggatggcacagcaaatgctgggtctgattatgaatttactgaaggaactgtggtgtttaagcctggtgatacccagaaggaaatcagagtgggtatcatagatgatgatatctttgaggaggatgaaaatttccttgtgcatctcagcaatgtcaaagtatcttctgaagcttcagaagatggcatactggaagccaatcatgtttctacacttgcttgcctcggatctccctccactgccactgtaactatttttgatgatgaccacgcaggcatttttacttttgaggaacctgtgactcatgtgagtgagagcattggcatcatggaggtgaaagtattgagaacatctggagctcgaggaaatgttatcgttccatataaaaccatcgaagggactgccagaggtggaggggaggattttgaggacacttgtggagagctcgaattccagaatgatgaaattgtcaaaacaatatcagtcaaggtaattgatgatgaggagtatgagaaaaacaagaccttcttccttgagattggagagccccgcctggtggagatgagtgagaagaaagccctgttattgaatgagcttggtggcttcacaataacaggccaacctgtcttcaggaaggttcatgctagagaacatccgattctctctactgtaatcaccattgcagacgaatatgatgacaagcagccactgaccagcaaagaggaagaggagaggcgcattgcagaaatggggcgccccatcctgggagagcacaccaagttggaagtgatcattgaagaatcctatgaattcaagagtactgtggacaaactcattaagaagacaaacctggcccttgtggttgggactaacagctggagagaacagttcattgaagctatcactgtcagtgctggggaagatgatgacgacgatgaatgtggggaagagaagctgccctcctgtttcgattacgtgatgcactttctgactgtgttctggaaggtcctgtttgccttcgtcccccctactgaatactggaatggctgggcgtgtttcattgtctccatcctcatgattggcctactgacagctttcattggagacctggcttcccactttggctgcaccattggcctgaaagattctgtgactgcagtcgtgttcgtcgcacttggaacatcagtgccagacacatttgccagcaaagtggcagccacccaggaccagtatgcagacgcctccataggtaacgtcacgggcagcaacgcggtgaatgtcttcctgggaatcggtgtggcctggtccatcgctgccatctaccacgcagccaatggggaacagttcaaagtgtcccctggcacactagctttctctgtcactctcttcaccatttttgctttcatcaatgtgggggtgctgctgtatcggcggaggccagaaatcggaggtgagctgggtgggccccggactgccaagctcctcacatcctgcctctttgtgctcctatggctcttgtacattttcttctcctccctggaggcctactgccacataaaaggcttctaaaggaactatcagatatagtaaatttatatatatacatatatatacataaaaattatgtataatggacagaggaaactgacatttgtcatgttcacttacctgctgatggaatccagcttcaagagcatactctgtactagggccgaagtaaaaaaccatcacctcccattcccaggggcatcatcatgttcaacaaggcatggaggcagggccatctttgcagctcagtctagaagggctgcactctctccaggttgataaatccttaaggctttgatttgttttgtttttggttttgttttcagtggagctggggaggtagttaatgtttggctttatttttgttattttgttttgttttgtttttttgggagagtcagggttgttgcttttctttgtggaaagtgaaaccatccaaatgtaaatgggttttggtaaaaatttaaatcattagtattccccctcacctcccccaatcactttaaaacttattttggattaagaaaaaatctgggcatggaagaagaaagaagcatgtcttcatcgtattaccaaagttcatgcttatctccggaatgtgagtggaggtgaagctgcctccaagaagaagcataaaagtggaatggagccaggaaatccgatggttctagaaatagtctgatatttaaacatgtgatacctggcagtctcgtttaacaggtacaaggaaaacgtgcctagattcccaggaacgtgcaaaatcctttctttcttatctctttagctctggactgtgattggcaaggtccttcttccagcattcagcccagctaagcccccaggtgccccatcccaaccctgttcctcctgtccacctgccatcccctatgcaaacagtaagaataaccccattcaaaaagcacatcatcgttttccatttgcattaacatgtgtctcagtcccatgttgccgttgcttgggattgtctgtcagttttattttcaaaggcatccatggcttgcacaatcctgttccagtcatgactgaacatttgctccttcttcatgtgccgttcggaaatgttgttgtgatacctgttacacagtgcatggtgaaaaacaaataaaacaaaacaaagagtatctgtatatagtagagtatagtacatactgttctcccatttggcaatgttgattggacattgaagacataagtgagttttcttttcacctgagttgttacttttgtgctgttattgagtttgattaattactagggataaaaggagaaaatggattattgttcacggttctgcacattcatttctaagaagcaataactgtcatgtggggagaagttaaagctattgagaggatagcaggcaaactacaaagatcttcatggaaaattagccatgtggaacacatcagaggcctctaaaaatcacccattaattcaggaaggccaaggagaaaggccttatagagacgttgatatgttggatgtgcctaggctttcagagccaccctttccacaacacccctccctgcaaagtatttatttcacatctgcactgtctggcacagatggtagatagtgctggtttgttcattttatttttttacttaaaaggctattttgagccctgtttctttcactgtccagtctagtcctctttgattatatcagtagttgctgagtaagaaagaagccagggtgaccaacgggcctttaaaagtgttgtctcctctacttatgctgaaagagaaggcaattaaataagactagtacctcccaggaggattggactgggatatttttaaccctttaaaaagaatagctgtttctatgttaaaataccaaagaacatggataaacccaacattccaaagtagtgagtccactaatgagaaaaataatagaatgactttggtcacctctcggagacttctgtgtctataaggaatcccaggctggagacattcctagccctctgtattgattcaaaaatacttaataaattaaagctgttgagacttattttttcttctgtcactcagtaaccatgatccttcctcatttaataaacatttggtgactgaatgagtaattaaatgctggttacccacttaatgtgccaggtagtatgatactttctggggactaagccatgaacaaaacagtctagatccctgccctcagaagggttacagtttatgtgattactattttcatgagtaaaagtgaagaaagccatatggaaagatttttatcttgcaagaaaaaacaattatgaaactcttttaacataaacacactgaaactgtatcaaagcaattgtccaaattgtatttatacccaagaatttctttaactaagagagcataaggcatatgtttggaaaaccaccctctttatctttgaccgacttgcagataaatatatctctccattttaaaccaagaagggcaatcatgttggtgatccagatcactgagaaagcccagtgtatcccatcttttatctttgttggcaatggaacttttctatggcccacactttacaattctttgtcattctaacccatccttcccatccttattttttttttttttgagaattgctaaatggaaagctagcctagaagcaccaagtaaatatattcaaggaatataagttgtttaaacattagaaaaatttttgcactcattttttagctgtattaggaatgtcaataatcctgtagcaaattttcacagagaactttaagaaattcttgcattggtcgatttcaatttgaaagctttttggtttgtttgctttttaaattttcatgttctaggaaactatgattctggttgttcaggattgttattattatagttgtgtaaaattattttattttgtgtgtattgtgcacagcttggggggggggcgggaaatgcactaattgtgctcttccttataaatggtacatattactgacacagacaaataaagtttctaattgtttctgatttaatcactagtgatacagcatattctgtatgaaatgttttctcctttctcattgtcatctacttcattttttgttttcatgttttgaagaaataaaaaccaaaatggta

SEQ ID NO: 721 - DNA, 4451 bp, HOMO SAPIENS
gctccgcccccgcgccgccggccctagtctgcctgttttcgactcgcgctccggctgctgtcacttggctctctggctggagcttgaggacgcaaggagggtttgtcactggcagactcgagactgtaggcactgccatggcccctgtgctcagtaaggactcggcggacatcgagagtatcctggctttaaatcctcgaacacaaactcatgcaactctgtgttccacttcggccaagaaattagacaagaaacattggaaaagaaatcctgataagaactgctttaattgtgagaagctggagaataattttgatgacatcaagcacacgactcttggtgagcgaggagctctccgagaagcaatgagatgcctgaaatgtgcagatgccccgtgtcagaagagctgtccaactaatcttgatattaaatcattcatcacaagtattgcaaacaagaactattatggagctgctaagatgatattttctgacaacccacttggtctgacttgtggaatggtatgtccaacctctgatctttgtgtaggtggatgcaatttatatgccactgaagagggacccattaatattggtggattgcagcaatttgctactgaggtattcaaagcaatgagtatcccacagatcagaaatccttcgctgcctcccccagaaaaaatgtctgaagcctattctgcaaagattgctctttttggtgctgggcctgcaagtataagttgtgcttcctttttggctcgattggggtactctgacatcactatatttgaaaaacaagaatatgttggtggtttaagtacttctgaaattcctcagttccggctgccgtatgatgtagtgaattttgagattgagctaatgaaggaccttggtgtaaagataatttgcggtaaaagcctttcagtgaatgaaatgactcttagcactttgaaagaaaaaggctacaaagctgctttcattggaataggtttgccagaacccaataaagatgccatcttccaaggcctgacgcaggaccaggggttttatacatccaaagactttttgccacttgtagccaaaggcagtaaagcaggaatgtgcgcctgtcactctccattgccatcgatacggggagtcgtgattgtacttggagctggagacactgcctttgactgtgcaacatctgctctacgttgtggagctcgccgtgtgttcatcgtcttcagaaaaggctttgttaatataagagctgtccctgaggagatggaacttgctaaggaagaaaagtgtgaatttctgccattcctgtccccacggaaggttatagtaaaaggtgggagaattgttgctatgcagtttgttcggacagagcaagatgaaactggaaaatggaatgaagatgaagatcagatggtccatctgaaagccgatgtggtcatcagtgcctttggttcagttctgagtgatcctaaagtaaaagaagccttgagccctataaaatttaacagatggggtctcccagaagtagatccagaaactatgcaaactagtgaagcatgggtatttgcaggtggtgatgtcgttggtttggctaacactacagtggaatcggtgaatgatggaaagcaagcttcttggtacattcacaaatacgtacagtcacaatatggagcttccgtttctgccaagcctgaactacccctcttttacactcctattgatctggtggacattagtgtagaaatggccggattgaagtttataaatccttttggtcttgctagcgcaactccagccaccagcacatcaatgattcgaagagcttttgaagctggatggggttttgccctcaccaaaactttctctcttgataaggacattgtgacaaatgtttcccccagaatcatccggggaaccacctctggccccatgtatggccctggacaaagctcctttctgaatattgagctcatcagtgagaaaacggctgcatattggtgtcaaagtgtcactgaactaaaggctgactttccagacaacattgtgattgctagcattatgtgcagttacaataaaaatgactggacggaacttgccaagaagtctgaggattctggagcagatgccctggagttaaatttatcatgtccacatggcatgggagaaagaggaatgggcctggcctgtgggcaggatccagagctggtgcggaacatctgccgctgggttaggcaagctgttcagattcctttttttgccaagctgaccccaaatgtcactgatattgtgagcatcgcaagagctgcaaaggaaggtggtgccaatggcgttacagccaccaacactgtctcaggtctgatgggattaaaatctgatggcacaccttggccagcagtggggattgcaaagcgaactacatatggaggagtgtctgggacagcaatcagacctattgctttgagagctgtgacctccattgctcgtgctctgcctggatttcccattttggctactggtggaattgactctgctgaaagtggtcttcagtttctccatagtggtgcttccgtcctccaggtatgcagtgccattcagaatcaggatttcactgtgatcgaagactactgcactggcctcaaagccctgctttatctgaaaagcattgaagaactacaagactgggatggacagagtccagctactgtgagtcaccagaaagggaaaccagttccacgtatagctgaactcatggacaagaaactgccaagttttggaccttatctggaacagcgcaagaaaatcatagcagaaaacaagattagactgaaagaacaaaatgtagctttttcaccacttaagagaaactgttttatccccaaaaggcctattcctaccatcaaggatgtaataggaaaagcactgcagtaccttggaacatttggtgaattgagcaacgtagagcaagttgtggctatgattgatgaagaaatgtgtatcaactgtggtaaatgctacatgacctgtaatgattctggctaccaggctatacagtttgatccagaaacccacctgcccaccataaccgacacttgtacaggctgtactctgtgtctcagtgtttgccctattgtcgactgcatcaaaatggtttccaggacaacaccttatgaaccaaagagaggcgtacccttatctgtgaatccggtgtgttaaggtgatttgtgaaacagttgctgtgaactttcatgtcacctacatatgctgatcttttaaaatcatgatccttgtgttcagctctttccaaattaaaacaaatatacattttctaaataaaaatatgtaatttcaaaatacatttgtaagtgtaaaaaatgtctcatgtcaatgaccattcaattagtggtcataaaatagaataattcttttctgaggatagtagttaaataactgtgtggcagttaattggatgttcactgccagttgtcttatgtgaaaaattaacttttttgtggcaattagtgtgacagtttccaaattgccctatgctgtgctccatatttgatttctaattgtaagtgaaattaagcattttgaaacaaagtactctttaacatacaagaaaatgtatccaaggaaacattttatcattaaaaattacctttaattttaatgctgtttctaagaaaatgtagttagctccataaagtacaaatgaagaaagtcaaaaaattatttgctatggcaggataagaaagcctaaaattgagtttgtagaactttattaagtaaaatccccttcgctgaaattgcttatttttggtgttggatagaggatagggagaatatttactaactaaataccattcactactcatgcgtgagatgggtgtacaaactcatcctcttttaatggcatttctctttaaactatgttcctaacaaaatgagatgataggatagatcctggttaccactcttttgctgtgcacatacgggctctgactggttttaatagtcaccttcatgattatagcaactaatgtttgaacaaagctcaaagtatgcaatgcttcattattcaagaatgaaaaatataatgttgataatatatattaagtgtgccaaatcagtttgactactctctgttttagtgtttatgtttaaaagaaatatattttttgttattattagataatatttttgtatttctctattttcataatcagtaaatagtgtcatataaactcatttatctcctcttcatggcatcttcaatatgaatctataagtagtaaatcagaaagtaacaatctatggcttatttctatgacaaattcaagagctagaaaaataaaatgtttcattatgcacttttagaaatgcatatttgccacaaaacctgtattactgaataatatcaaataaaatatcataaagcattttaaaaaa

SEQ ID NO: 722 - DNA, 921 bp, HOMO SAPIENS
gacaggtcgcctgactgggctcctccccgggcccgccccgacaggtttgtcttgtgaccgcgggcggccgctgcttctttcccgagcttggaacttcgttatccgcgatgcgtttcctggcagctacattcctgctcctggcgctcagcaccgctgcccaggccgaaccggtgcagttcaaggactgcggttctgtggatggagttataaaggaagtgaatgtgagcccatgccccacccaaccctgccagctgagcaaaggacagtcttacagcgtcaatgtcaccttcaccagcaatattcagtctaaaagcagcaaggccgtggtgcatggcatcctgatgggcgtcccagttccctttcccattcctgagcctgatggttgtaagagtggaattaactgccctatccaaaaagacaagacctatagctacctgaataaactaccagtgaaaagcgaatatccctctataaaactggtggtggagtggcaacttcaggatgacaaaaaccaaagtctcttctgctgggaaatcccagtacagatcgtttctcatctctaagtgcctcattgagttcggtgcatctggccaatgagtctgctgagactcttgacagcacctccagctctgctgcttcaacaacagtgacttgctctccaatggtatccagtgattcgttgaagaggaggtgctctgtagcagaaactgagctccgggtggctggttctcagtggttgtctcatgtctctttttctgtcttaggtggtttcattaaatgcagcacttggttagcagatgtttaattttttttttaacaacattaacttgtggcctctttctacacctggaaatttactcttgaataaataaaaactcgtttgtcttgtcttctgcaaaaaaaaaaaaaaaaaaaaaaaaa

SEQ ID NO: 723 - DNA, 5454 bp, HOMO SAPIENS
aggcatttccggcccagggggcttggctccccgcggcacgggatttagcgttcgcgctccttcccttcccgtggtcgagccgagtcctgacctgagggctgcatcaagatcttgtcattccacatcgtggtttcctttgaggatgtggctgtacccctctcccaggaggagtgggactgtctgatccctgctcagaggggcctctacaaggatgtgatgatggggacctatgggaacctactctcattagtaggtgaatggttaagcaaactgtggtacatccataccatgggatacgactcaacaatcaaaaggaactgcccagacttcaccacgatgcaatatatgcatgacttcaagcttccaaacctgatgtcatctccaggctggagcggggggacgaaccatagacccctcacatcctgagaactcaggggagctggagctggaggcacaagagagaaggctgtgattctaggattgaaaaagaggaaatgattccaaagcaggacatttctgaagaattggaatcccagagagcaaaatcagaagatcatgtaaggaatatttttaaggaaactgaagagatgagtaaaactgagggaaagttagagaattgctggagaaaatatgcagtagaaggagttaagaactcattctcccagaagagcaatttcagagaaattaccatgaggtatgtgaaaaccctctctagagagaatggccagaagttcaatgctgttggagaaaactgcattacagactcaaatcctgccaaacatcttagagggtctagagaggagagtctccatccaagtgtgtcaagtgtagaaaacttgcaacaacatgaggacctcattaacctccagagtttccaattaggagaaagagcctatcagacagatgtgttagtgaaagtgcccagacagagctcagttcttagtgagaatcagaggatgaataatccagagagatggtttgagagtactgggtgtggaaaaacttacaatcagaacagagcttttaaccagcaccagagatttcatagtggagagaagacctatgagcacaatgaatgtggaaaagctttcagttggccctctatcctcagtaaacatcagagaatccacactggtaagaaactctacacatgtgaggattgtggcaaatctttcagtgttcactcatactttattcagcattgtaaaattcacactagagaaaaaccctatgagtgtattaaatgtgggaaagcttttagtacacattcatcttatgttcaacatctaaaaattcatacaggagagaaacatcatgagtgtaatcagtgtgggaaagcctttagtcatagctctaatctaattcatcatcagagaattcatagtggagagaaaccttacaagtgcaaagaatgtgggaaagccttcaacagacaatcaaaccttattcagcatcagagaattcattctggagagaaaccttatgactgtaaggagtgtggcaaagccttcagtacacaattatttctcattcagcatcagagaattcatacaggagaaaagccctatgaatgtaatgaatgtgcaaaatcctttagcctgaaccgaactcttactgtccatcagagaattcacactggagagaaaccttataggtgtaatgaatgtgggaaatcctttagtcaatgctcacaagttattcaacataagagaattcacactggagagaaaccttatatctgcaatgagtgtggaaaatcatttggtgctcgtctatcccttatccagcatcagagaattcacactggagagaaaccttatggttgtagtgtgtgtgggaaaacctttagtcaaaagggacatcttattcagcatcagtgaattcacacaggagagaaaccctatgaatgtagtgagtgtggaaaagctttcagccagagttttaatcttattcaccatcaaagaacacacaatggtgagaagtcctatgaatgtaatgaatgtgataaagccttcagtttgctttcttcccttgttcaacatcagagaatacataatggagacaaaccctatgagtgtcacaaatgtgggaaggcctttagccaggggtcacaccttattcagcatcagaggagtcacattggtgagaaaccctatgagtgtaatgagtgtgggaaaacctttgggcagatatccaccctaattaagcatgagagaacacacaatggagagaagccctatgagtgcagtgactgtgggaaggccttcagccagagtgcacaccttatccaccatcaaagaattcacactggagagaatccctatgagtgcagtgaatgtgggaaggccttcaatgtttgttcctctctcattcagcatcacagaattcatactggtgagaaaccttatgaatgtagtgactgtggcaaggcgttcagtcagcattcacaatttatccaacatcagagaattcacactggagagaaaccctacatgtgcaatgagtgtgagaaatccttcagtgcatgcttatcccttatccaacacaagagaattcacactggagagaaaccctatgtatgtgccaaatgtggaaaatccttctgacaaagctctcaccttattcaacatcagagaattcacagtggggagcaacctcatacgtgtaatcgatgtgaaaaaaccttcagttagagaataactcttagtagtcatgagaaaatccatacaattcacattagagagcaagtctatgaatgtagtaagtgtggggaactctagcgcacagtcatctttcattcaacattgtacagttcacagtggagagtaactgattagtctataaattcttcacagttatacattatatgagagtcatactcgtgagaaatgagtcactttatggttttccttttggagattcagctcttaagggatttcactctcccagtgagctgctaactaaaggcaggctgctgaagtatatagcagcaatcccacaatagcacaccttgcttcagattcagaggatgagcccccttcttgagccctgtagatatgtgaaacttaattatttagatgcatttcatggcaccagaccctaaggtacagttaggtatttcactggagaccacttactttgctttgctttgcttttttttttttttttttttgtatgatttatttcaacttcaaagaaagtagttgagatccttgcacttccaagtgtgatggaaccaggctagggttttctttgtttgtttgggcctcttcaaaacgtttttattctgttataaggaatatgataccttaagcttcaattcacagggaagagaaacatgattataagcaaaagtttgtcaaggaataaggtgagtctttgtgtagattaaaatagttgagaccttgctaaaaagtcagataacactgtaatccacctccaggtttccaagagttaagacgctgccagcaaggagcttgcagtcttgtagctggcccaatatatccaactaattcaaaatgggaaattgtacattttacttaaacaggatttggtagatgggtcttctagatatgttgtcatgaagaaaaatcaggaaaatgtccaagggtgggagcctgtggcttatggcttcacttacccatcacagatagctatgttacactgcaagaacagagttcatggcttttcctgaggtggctggaaaccttaatctcctgaagttaagtcaaaacttaaatgtcaattcacccagctctcttgcctgcaggctgatccagggacttagagcttgttacccagttacaacttcttctagagaagaacttttaagaaggaagcaaaaagaaattcagtttcccccaaggatctcttctttgaggttccatcaagagatgacaaaaggaggctgggcgcggtgtctcacacctgtaatcccagcactttgggaggctgaagtgggcagatcacgaggtcaagagatcaagaccatcctggccaacatggtgaaaccacatttctacaaaatgcaaaaattagctgggcatggtggtgcacgcctgtagtcccagctacttgggaggctgaggcaggagaattgcttgaacccaggaggcggaggtagcagtgagccaagattgcaccactgcattccagcatggccacaaagcaagactccaaaaaatatatatatatatgacaaaagggttaggaagcttttcctctgaggcccacgattacacaaccaaatcagaaaataatattttttttgttttaaacctgtttacataagatggaggtgtttacttaactaagaacctcggtatttactcaaatccggttttgggttttatggctaaaacatttctccagattaaccttatcagtttggaatatgtttttattttccattaaatatttcatccaaatcatactgaattttatttatcatggcttttaatgttctctattcaagtcaaatttctgtttcctaattacttggcttggtgatggcattaatattggttgggagctagatggtctctgctctatttgatgattggcatagagcaatcatacacttggtacttcctagcatttttttttgagacagtatcatgctgtatcatgttgcacagggtggagtgcagtggtgcagtcatagctcactgtaaccttgaactcctgggctcaagtgattcccctgcctcaacttcatgagtagcagggactacagctgtgtaccaccacaccggcctctcctggcttcttaaccacttacattaaaattgagaggagaaaggcattttcagtttctttagttaataaaaagaagccatttctggaggagttttatgcctgtaccagcagaggttcagccttccaggaatctcatcatgatccatactgctgacacaggcctttgtcacctgaagcattcttaaaataaggagactgacattaaacaggacaattgtgaactccactttgtaagcatcatacatatcttacaactcattctgaagactcctttattcttgctcttcccagagagctactgtgtttagtcatgctcactgcactcacaagagaaaaagagtaagtggcatatttgcaggtgttgatggttacaagagcatttttactttttcctccatgtttgttctgcagcatttccattgatgcatgctattgtagacttcttaggttgaccttggccttgacctccaccactagctcatgacccaaaactgaagatgtgcatcagaaagggacagatttggtctttctgctgtaaaagatattctgccttagtgcctgctaatttgttgtgcatagtcctgtgctgccaatcttccccaccaattgttaaggttaatgtgtgttttatatgtgtattcacaaacattaaaatgtaatcagtggattccaaaaaaaaaaaaaaaaaaaaaaaaa

SEQ ID NO: 724 - DNA, 2522 bp, HOMO SAPIENS
agaaagcggctccagggagccagggcaccgtgagcctggtggttggcagctggagccacgtcggagggggaagtgtcgcagcattctctgcaggcatcacagacctgaggcagtggcctccggagggcactggacagaaacagccatccaagtggctgagtggagggaccctgctcaagtgcagctgcagtggccggggtttccctcaggtagggatcggggcgccttgtcgccgccagccacgtgtggcgtccggtacagtcagcagagtgcagggtgcgggcaccaggaaagggggcgcaggggaactcccgcgggcctcgcgtttgcaaacttctcgcctgggcaggaggcggtcgtgggaaagaaggtggaagagcgagctttttggaactgtgcacgggacagattggacgcacacccctcgggaggcgcgaaggcatggaaaatttgaagcatattatcacccttggccaggtcatccacaaacggtgtgaagagatgaaatactgcaagaaacagtgccggcgcctgggccaccgcgtcctcggcctgatcaagcctctggagatgctccaggaccaaggaaagaggagcgtgccctctgagaagttaaccacagccatgaaccgcttcaaggctgccctggaggaggctaatggggagatagaaaagttcagcaatagatccaatatctgcaggtttctaacagcaagccaggacaaaatactcttcaaggacgtgaacaggaagctgagtgatgtctggaaggagctctcgctgttacttcaggttgagcaacgcatgcctgtttcacccataagccaaggagcgtcctgggcacaggaagatcagcaggatgcagacgaagacaggcgagctttccagatgctaagaagagataatgaaaaaatagaagcttcactgagacgattagaaatcaacatgaaagaaatcaaggaaactttgaggcagtatttaccaccaaaatgcatgcaggagatcccgcaagagcaaatcaaggagatcaagaaggagcagctttcaggatccccgtggattctgctaagggaaaatgaagtcagcacactttataaaggagaataccacagagctccagtggccataaaagtattcaaaaaactccaggctggcagcattgcaatagtgaggcagactttcaataaggagatcaaaaccatgaagaaattcgaatctcccaacatcctgcgtatatttgggatttgcattgatgaaacagtgactccgcctcaattctccattgtcatggagtactgtgaactcgggaccctgagggagctgttggatagggaaaaagacctcacacttggcaagcgcatggtcctagtcctgggggcagcccgaggcctataccggctacaccattcagaagcacctgaactccacggaaaaatcagaagctcaaacttcctggtaactcaaggctaccaagtgaagcttgcaggatttgagttgaggaaaacacagacttccatgagtttgggaactacgagagaaaagacagacagagtcaaatctacagcatatctctcacctcaggaactggaagatgtattttatcaatatgatgtaaagtctgaaatatacagctttggaatcgtcctctgggaaatcgccactggagatatcccgtttcaaggctgtaattctgagaagatccgcaagctggtggctgtgaagcggcagcaggagccactgggtgaagactgcccttcagagctgcgggagatcattgatgagtgccgggcccatgatccctctgtgcggccctctgtggatgaaatcttaaagaaactctccaccttttctaagtagtgtatcaaaatctaaaccaaggagtctctggacaagaagctgggagaggcacaaactggacatctctctctctcatatccttcggcattgggttatctatgggtgcaaggagtgggcacgcttctctgttacaaatagaaaacgattccagtcatacaggacacatcccactccaaatgatatttccaaaaacatacctctgacagtaactttgatagatggtttgtcaaatgtatctttctgggtatccacacctcttggcaatgaaatttgcagctcctcccttccataaatgaagtctctttccccaccatttgaatctgggctggcactgtgacttgatttgatcaatagaatgtggaagaagtgactgtatgccagttccaagcctaggtttcaagaggccttataaatgtctgttggaaccttacccagccatgaacatgttgagtgagcatgctggagaatgagagaccacatgaagcagaaacatgctttcctagctgaagtcatactagcccaaccaacatggcagctaacacatgaatgaggccaatcaagaccagaagaaccactcaagcagatcccagcccaaattgcccattcacacaatcaggagctaaataaattactgttgtcttaacactaaaaaaaaaaaaaaaaaa

SEQ ID NO: 725 - DNA, 501 bp, HOMO SAPIENS
  misc_feature (213)..(213): n is a, c, g, or t
gaggatgcatttacttttccccaaatttgatagatagttatttttatatattttttctggccacttggcttctaactgattaacatgaaaaacgcacgtgtgcctgtttcactcaaatcatattttacaactttttaaaagctgctacagttatagtttgtgaaagaggagaaaggtgaattgcaacagagggaaattactgttactgtgtcnaatatgtgactgatgcttttggtcagataatctgctgcctgtcaatatttgtaataacagaattttttgttaagagtactctcatctttattttgctgctcactgattttttacactaagatgttctcatctttgtcgactcactgtttttgcttcatatttgtctgtgtacttgtgctctaaataaaaatctagttttatgtctagtttattccattgtgtgtataatgtttgcctctgatgtagtgtaattttctattgtttttgatgtttgttggtacagcctaa

SEQ ID NO: 726 - DNA, 2138 bp, HOMO SAPIENS
gggggggtgaagaaggggccggccttcaagcaagagcgacgcaagatggcagccaccacgggctcgggagtaaaagtccctcgcaatttccgactgttggaagaactcgaagaaggccagaaaggagtaggagatggcacagttagctggggtctagaagatgacgaagacatgacacttacaagatggacagggatgataattgggcctccaagaacaatttatgaaaaccgaatatacagccttaaaatagaatgtggacctaaatacccagaagcacccccctttgtaagatttgtaacaaaaattaatatgaatggagtaaatagttctaatggagtggtggacccaagagccatatcagtgctagcaaaatggcagaattcatatagcatcaaagttgtcctgcaagagcttcggcgcctaatgatgtctaaagaaaatatgaaactccctcagccgcccgaaggacagtgttacagcaattaatcaaaaagaaaaaccacaggcccttccccttccccccaattcgatttaatcagtcttcattttccacagtagtaaattttctagatacgtcttgtagacctcaaagtaccggaaaggaagctcccattcaaaggaaatttatcttaagatactgtaaatgatactaattttttgtccatttgaaatatataagttgtgctataacaaatcatcctgtcaagtgtaaccactgtccacgtagttgaacttctgggatcaagaaagtctatttaaattgattcccatcataactggtggggcacatctaactcaactgtgaaaagacacatcacacaatcaccttgctgctgattacacggcctggggtctctgccttctccccttaccctcccgcctcccaccctccctgcaacaacagccctctagcctggggggcttgttagagtagatgtgaaggtttcaggtcgcagcctgtgggactactgctaggtgtgtggggtgtttcgcctgcacccctggtttctttaagtcttaagtgatgccccttccaaaccatcatcctgtccccacgctcctccactcccgcccttggccgaagcatagattgtaacccctccactcccctctgagattggccttcggtgaggaattcagggctttccccatatcttctctcccccacctttatcgaggggtgctgctttttctccctcctcctcaagttcctttttgcaccgtcaccacccaacaccttccatgacacttccttgctttggccagaagccatcaggtaaggttggaaagagcctctgacctcccttgtttagttttggaaccatactcactcactctccaccagcctgggaaatgaatattgggtcctcagccctgccaccctctgctgtcatcagctgatgcattgtttttagctcaggttttgataaggtgaaaagaatagtcaccagggttactcagacctgccagctctcggagtccttggtggttgaacttggagaaagaccgcatgaagatacttgtaagcacacatgatccctctgaattgttttactttcctgtaactgcttttgcttttaaaaattgaagaagttttaaacagggctttcatttggtcatccttgcaatccattggggtctagtttggaatctgacaactggaacaaaaagaaccttgaatccggtgcatgccttggttttggtgctgctgctgcttcccaagatcctcagcagggattaagaaggaacccggtgtgcacagcagatccccgaaattggtgggcttgacctcctggcaaattgctgcgtctttccacttgctgttcaggaccactaaatgctgaaatgtggatgcataccgaaataaaagcaattcattgtgtactaaaggttttttttttttttttaatttagtatttgtgtaaaaccaccttttgaagcagcaactatcaagtctgaaaagcaattgatgtttccattaatctttttctggggggaaaaccttagttctaaggatttaacatcctgtaagtgaagtttaacataacagtattccataagcagcctttttattgtcagaccattgcctgattttaatataataaaaaaaaagtgtgcgttaatatttaaaaaaa

SEQ ID NO: 727 - DNA, 3956 bp, HOMO SAPIENS
gctgtgccactgccaccgccgccgccgctgcatcccgcccggtccgagtccgcccgccacgcccgccgagccgctgccgccgccagctctccctggatccatcgggtcccgagtgggattgcccactgggctccaaggacctggaggaagagggcccctggggagggggctctggcctgccgcccacaggctgcttccctggctcctggcgccaggacgtgggcctggactgcaagggatcccccgagggggccgaggcccgggcttggactgtctactactacagcctcctgcagagctgtctgcagcaagctggccttccggagactcaggaccgcggccaggtgccccgcacaggctgtcctggggcggaggtgaccttgtgcgttctgggctcccccagcacctttctgcctgtgctgctggagggtggggtccagagcccgggaaacatgctcctttgcctgtcccctgcttggctgatgaaggtgccagcacccgggcagccgggtgaggcagccctgctagtctccaaggctgtgagcttccaccctgggggcctgacattcctggatgactttgtccccccgcgccgtgccacctactttttggcaggcctgggcctggggcctggccggggccgagaggcagcagaactcgcccgtgacctgacctgccccacaggagcttcggctgagctggcccggctgctggaggaccggctgctgacaaggcagttgctggcccagcagggtggtgtggctgtgccagcaaccctggctttcacctacaagccgccggggctgctgcggggaggggatgccagcctagggctacggctggtggagctgagtggcaaagagggccaggagacgctggtgaaagaggaagtggaggcttttctgcgctccgaggccctgggtgatatcctgcaggtagctgtgaagctcagtggctggcgctggcgggggcggcaggcatggcgtctgcacccgcgggcagagctgggtgcagtggtggacacagtgctggcgctgctggagaagctggaggaggaggagagtgtcctggtggaggctgtgtacccacctgcccagctgccctgctcagatggtccttcacccggccccggcctggccgtgcgaatctgtgctgtggtgtgtcggacacagggtgataggccactgctgagcaaggtggtgtgcggcgtgggccgcggggaccgccctctacggcaccacaactccctgccgaggacgctggaggtggcgctggcccagtgcggcctgggcgaggaggcgcaggtggcggctgtgcggcagcgcgtcaaggcggcggccgaggccgcgctggccgccgtgctggctctggaggccggcctgagtgccgagcagcgcggcgggcgccgggcgcacacggacttcctgggcgtggatttcgcgctgacagcggccggcggcgtgctgaccccagtggccctggagctgaacggcggcctgtgtctggaggcgtgcggcgcgctggaggggctgtgggccgcgccgcggctggggccggcggccgacgaggcggtggcggcgccgctggtggagaccatgcttcggcggtcggcgcgctgcctcatggagggaaaacagctgctggtggtcggcgctggcggcgtcagcaagaagttcgtgtgggaggcggcgcgcgactacgggctccagctgcacctcgtggagtcagaccccaaccactttgcatcccagttggtacagaccttcatccactttgacatgacagagcaccggagggatgaggagaacgcacggctgctggcagagttggtgcgggctcgcggcctcaagctagatggctgcttctcctactgggatgactgcctggtgctcacagccctgctctgccaggagctaggtctgccctgcagctccccagctgccatgcgcctggctaagcagaagagcctcacccagctgcacctgttgcaccaccatggcccaccctggcctgcgccctccctccatgctgtgccctgctgcccactggagagtgaggctgatgtggagagggccgtgcaccaggtacccctgccaggtgtcatgaagctggagttcggggcaggtgcagtgggtgtccggctggtagaggatgcgccacagtgccatgagcacttttcccggattacccgagacttgcagggcgaggccgaccacccaggcattgggctgggctggggcaatgccatgctgctgatggagtttgtggagggcaccgagcacgacgtggacctggtgttgtttggtgggcggttgctggctgcctttgtctccgacaatggccctacgaggctgcctggcttcactgagacggcggcctgcatgcccaccgggctggcaccagagcaggaggcacagatggttcaggcagccttccgctgttgcctgggctgcgggttgctcgatggagtcttcaacgtggagctcaagctgaccggggctgggcctcggcttatcgagatcaacccccgcatgggtggcttctacctgcgtgattggatcctggagctctatggtgttgacctgctgctggctgctgttatggtggcctgtggcttgcgtcctgccctgcccacccgcccacgtgctcgtggccatctggtgggcgtcatgtgccttgtgtcccagcacctgcaggccctgagttccaccgccagccgtgagaccctgcaggccctgcacgaccgtggactgctacgcctcaatctgctggaggaggccctggtgcctggcgagtatgaggagccctactgcagtgtggcctgtgccggacccagccccaccgaggcccgtctccgcctgctgggcctctgccagggcctgggcatcgatgggcccagctaccctgttgcccacttcctgtctcacttcaaatagcactggggtcagggggcagggaagcagtgctgggtggaggcactgtggtgccctctgctccctggagctcttcctgcttctctccccatcaccatgccccagccccagcctggcccgctgcaatgcctaggtctgttccagagcagcagggcaatttagacaccaaggcatcctggactcaagggcctcttgccctcccgaaggccccagtccagcctacagcttccccagcattctagccttggagaaatgacaatggccacacacacacacacacacacacacacacacctctgacgccagctccccaggtgggagtgggcccaaacccagcccctcctgtccacctctccaggtctcactctcttcctgccatctacaagaggagaggacctggctgggccccaagccttggacaaatcctgggaaaacctgagactagaacccttgtcttcctcttacccaaattctaggatagctctgaagcctgctggaaacttggtggcatccaacctgcctcattcggcctgaccggtagaggcaggtggcctgtggacagaagtaatcctctttctgctcaccccaggcagacacaactgcctatgttcccccgatgagaggaaacaggctgagagaagaaaaatgactgctccaggattataccacagtggagagcgggtcacaggacatgatgcagggtccaggtttctgttttgatcaagtcttacatgcccattcagcttctaggcccccctcacctccctgccctcattcacaagtggccctgagacacgtgaacacctccctcctatgcatcacaaaccttctccaccgagctttggtgctttggcctctggcacacctaactagcattggcagaggagagtctacactctcttcctcattcagggaagatgctttaagaaatcctgcctctgtgcagcagaggagctggaggcagctccccaggcatccctccccaaataaaggcttatgtactggtgaaaaaaaaaaaaaaaa

SEQ ID NO: 728 - DNA, 2942 bp, HOMO SAPIENS
agcgccccccgccccccgccggccggctcccctcccccggccgctggctcgctcggctcgcgacgctgcagaggctccgaggcggcggcggcgactccctctttccctccctcctcctccgtccgcccgtccgtccgcgcgtctgtccgttcggcccggtccggcccgaagcatggccggcgtcagcttcagcggccaccgcctggagctgctggcggcttacgaggaggtgatccgagaggagagcgcggccgactgggctctgtacacatatgaagatggctccgatgacctcaagcttgcagcatcaggagaagggggcttgcaggagctttcgggacactttgagaaccagaaggtgatgtacggcttctgcagtgtcaaggactcccaagctgctctgccaaaatacgtgctcatcaactgggtgggcgaagatgtgcctgatgcccgcaagtgcgcttgtgccagccacgtggctaaggtggcggagttcttccagggtgtcgacgtgatcgtgaacgccagcagcgtggaagacatagacgcgggtgccatcgggcagcggctctctaacgggctggcgcgactctccagccctgtgctgcaccgactgcggctgcgagaggatgagaacgcagagcccgtgggcaccacctaccagaagacggatgcagctgtggaaatgaagcggattaaccgagagcagttctgggagcaggccaagaaggaagaagagctgcggaaggaggaggagcggaagaaggccctggatgagaggctcaggttcgagcaggagcggatggagcaggagcggcaggagcaagaggagcgcgagcggcgctaccgggagcgggagcagcagatcgaggagcacaggaggaaacagcagactttagaagcggaagaggccaagaggcggttgaaggagcagtctatctttggtgaccatcgggatgaggaggaagagacccacatgaagaagtcagagtcggaggtggaggaggcagcagctattattgcccagcggcctgacaacccaagggagttcttcaagcagcaggaaagagtcgcatcggcctctgcgggcagctgtgatgtaccctcgcccttcaaccatcgaccaggcagccacctggacagccaccggaggatggcgcccactcccatccccacgcggagcccgtctgactccagcaccgcctccacccctgtcgctgagcagatagagcgggccctggatgaggtcacctcctcgcagcctccaccactgccaccgccacccccaccagcccaagagacccaggagcccagccccatcctagacagtgaggagaccagagcagcagcccctcaggcctgggccggccccatggaggagccccctcaggcacaggcgcctccccgggggccaggcagccctgcagaggacttgatgttcatggagtctgcagagcaggctgtcctggctgctcccgtggagcctgccacagctgacgccacggagatccacgatgcagctgacaccattgaaactgacactgccactgctgacaccactgttgccaacaacgtaccccccgccgccaccagcctcattgacctatggcctggcaacggggaaggggcctccacactccagggtgagcccagggcccccacgccaccctcgggtactgaggtcaccctggcagaggtgcccctgctggatgaggtggctccggagccactgctgccagcaggcgaaggctgtgccacccttctcaactttgatgagctgcctgagccgccagccaccttctgtgacccagaggaagtggaaggggagcccctggctgccccccagaccccaactctgccctcagcccttgaggagctggagcaagagcaggagccggagccccacctgctaaccaatggcgagaccacccagaaggaggggacccaggccagtgaggggtacttcagtcaatcacaggaggaggagtttgcccaatcggaagagctctgtgccaaggctccgcctcctgtgttctacaacaagcctccagagatcgacatcacatgctgggatgcagacccagttccagaagaggaggagggcttcgagggtggtgattagcggtggcgccagccctaggctacccttgccaaggccgcccacctgcatcagcctctggccagacggcccgccgtgcctgcattcgcagcagctccgcctggcacccactccggattccggccctggctggggacttggccgcttccctacccacagggcctgacttttacagcttttctctttttttaaaaagttgataggagacttgtacagttgactggctttcctctcgttggtagttgagacgctgttgcaaattccacccctccttccctggtccagattgtagctcttagtcctccctgctcagctggccgggttggaggcctcaccctgcttggggcctggcgtggggggagctctggtgggaaaatgtcccccacctcttttcctagttttatgtttcttgggaaaatatcactttgtattctctgtccagggcttcagatattttgcacgaattttaaaacatggcaataaatggctcgtgggctctggctccctgggaccccctccccgcccttcttttgaccccttcctgtctggcccaaaggaagtagcaggcccagctggggcccctcggctaccccccgtctcctgccgggcaggtcccaggttggaggccctaggcgcggttcaggtcagggctatggatggggcccaggggctttggtggcccctccccaactccttcctctttgcttgggttcctttttcacgtttagtaactgttttttttttttttttttttttttttttggaaagcacaaacttctgtaacgggtcgtgctcatgtctgttaataaagaaatccagatcc

SEQ ID NO: 729 - DNA, 310 bp, HOMO SAPIENS
tgtttttattgttcacatgcctgaaaagttcacatttcagagagggtcatacggaagtatttctgtgttgtctgtaattttaaaatggaactcttacatatggttacagaggcatgttatcagggtccttccatcttgccacactaacacttaatgcttctgctaatccagtatggacagaggaaatgcagaacaaatatgtggatgcttatgtttggggtttgtggcatatatagatttggaaactaaaagtataaagttaatggactgtgcagagacctagaaatcaattttcagtcacataatagtt

SEQ ID NO: 730 - DNA, 313 bp, HOMO SAPIENS
  misc_feature (101)..(101): n is a, c, g, or t
  misc_feature (104)..(104): n is a, c, g, or t
gggagcggggtagaagatttattggcccatgtaactgggaaagccaaattgtgacactggttttaggaatggctggatccagggatttggatgatgtcatnggnacttgattctctttccatgtttcaattctccttttctctgtatagtggtaaagctaggctgacattcttatagctagcagctaaagagcatcctctctttcccagcccgtatttatcccttcttatcaagcatttttgatcttcccctcttcccccgtctaattaatcaccaggccacctctgaggttgaggaggcatgactgtgtgat

SEQ ID NO: 731 - DNA, 5018 bp, HOMO SAPIENS
gggagggaggcacaggcgcttgctttgcaggagtcagctctgccttcctcggctggagtgtgggtggcttggtgagccggtggtcaggaattctctctcctccttgcaattttcctttctgtctgggagcacgccaagatgtcccttgtgactgtccccttctaccagaagagacataggcacttcgaccagtcctaccgtaatattcaaacacggtacctgctggacgaatatgcgtcaaaaaagcgagcttccacccaggcatcttcccagaagtccttgagtcagcggtcgtcttcacagagagcctccagccagacgtccctgggaggaaccatctgcagggtctgtgcgaagcgagtgagcacgcaggaagatgaggagcaggagaacagaagcaggtaccagtccctggtggccgcctatggtgaggccaagcgacagcgcttcctcagcgagctggcccacttggaggaggatgtccacctggcacgctcccaggcccgcgacaagctggacaaatacgccattcagcagatgatggaggacaagctggcctgggagagacacacatttgaagagcggataagcagggctcctgagatcctggtgcggctgcgatcccacaccgtctgggagaggatgtctgtgaaactctgcttcaccgtgcaaggatttcccacgcccgtggtgcagtggtacaaagatggcagtctgatttgccaggcggctgaaccgggaaagtacaggattgagagcaactatggcgtacacacactggagatcaacagggcagactttgacgacactgcgacatactcagcagtggccaccaatgcccacggacaagtgtccaccaacgcggcggtggtggtgagaaggttccggggagacgaggaaccattccgttcggtgggactcccgattggattgcccctgtcatcgatgattccgtacacgcacttcgacgtccagtttttggagaagtttggggtcaccttcaggagggaaggcgagacggtcactctcaagtgcaccatgctggtgacgccggacctgaagcgggtgcagccgcgcgccgagtggtaccgcgatgacgtgctgttgaaagagtccaagtggacgaagatgttctttggagaaggccaggcctccctgtccttcagccacctgcacaaggacgacgagggcctgtacaccctgcgcatcgtgtctcggggcggcgtcagcgaccacagcgccttcctgtttgtcagagatgctgacccgctggtcacaggggcccccggtgcacccatggacttgcagtgccacgacgccaaccgggactacgtcatcgtgacctggaagccgcccaacaccaccactgagagccccgtcatgggctattttgtggaccgatgtgaagtaggaacgaataattgggtgcagtgcaatgatgcaccggtgaaaatctgcaaatacccggtcacagggctttttgaaggaaggtcttacatattccgagtgagggcagtgaacagtgcgggcatcagccgaccctccagggtctctgatgcggtggctgcacttgaccccttggacctcagaaggttacaagccgttcatttggagggagagaaggagattgccatttatcaggatgaccttgaaggtgacgcccaggttccagggcctcccaccggtgtgcacgcttccgagatcagcagaaactatgtcgtcctcagctgggagccacccactccccgtggcaaggacccgctcatgtacttcattgagaagtcggtggtggggagcggcagctggcagagagtcaacgcccagacggctgtgagatccccgagatatgccgtgtttgacctcatggaagggaagtcttatgtgttccgagtgctgtcagcaaaccggcatggcctgagcgaaccttcggagataacgtcccccattcaggcccaggatgtgaccgttgtcccttctgctccgggtcgggttcttgcttcccgaaacaccaagacgtcggtggtggtgcagtgggaccgacctaagcatgaggaggacctgctgggctactacgtggactgctgtgtggccggaaccaacctctgggagccctgcaaccacaagcccattggatacaacaggttcgtggtgcacggcttaaccacgggagagcagtacatcttccgagtcaaggcggtcaatgctgtggggatgagtgaaaattcccaggaatcagacgtcataaaagtgcaggccgcactcaccgtcccgtcccatccttatgggattacgctcctcaactgtgacggccactccatgaccctcggctggaaggtcccgaaattcagtggtggctcgcccatcctgggctactacctggacaagcgtgaagttcaccataaaaactggcacgaggtcaattcctcacccagcaaaccgacaatcctaacggtggacggcttgacggaaggctcactctacgagttcaaaatcgccgccgtcaacctggccggcatcggggagccctcagatcccagtgagcacttcaagtgtgaggcctggaccatgccggagcccggtcctgcctacgacttgacgttctgtgaggtcagggacacgtccttggtcatgctgtggaaggcccctgtgtactccggcagcagccctgtttctggatatttcgtggacttcagggaggaggatgctggagagtggatcactgtaaatcagacgacaacagccaaccgttatttaaaggtctctgacctgcagcaaggtaagacctatgtcttcagggtccgggcagtcaatgcaaatggcgtggggaagccctcagacacgtcggagcctgtgctggtagaggcgagaccaggcaccaaggaaatcagtgctggtgtcgatgaacaaggcaacatctatctgggcttcgactgccaggaaatgacagacgcgtctcagttcacctggtgtaaatcctacgaggagatttcagatgatgagaggtttaaaatcgaaaccgtgggggatcactccaagctgtacttaaagaatccggataaggaggatttagggacttactccgtgtctgtaagtgatacagacggagtgtcctccagttttgttctggacccagaagagctcgagcgtttgatggcattgagcaatgaaataaagaaccccacaattcctctgaaatcggaattagcttatgagatttttgataaggggcgggttcgcttctggctccaggctgagcacttatcaccagatgccagctaccgatttattattaacgacagagaagtctctgacagcgagatacacagaattaaatgtgacaaagctactggcattattgagatggtgatggatcgatttagtattgaaaatgaggggacctacactgtgcagattcatgatgggaaagccaaaagtcagtcttctctagttcttattggagatgcattcaagactgtgctggaagaggctgagtttcaaaggaaagaatttctcaggaaacaaggccctcattttgctgagtacttgcactgggatgtcacggaagaatgtgaagttcgacttgtttgcaaggttgcaaacaccaagaaagaaaccgttttcaaatggctcaaggatgatgttctgtatgaaacggagacactgcctaacctggagaggggaatctgtgagctcctcatcccaaagttgtcaaagaaggaccacggtgaatacaaggcaaccttgaaagatgacagaggccaagatgtgtccatccttgaaatagctggcaaagtgtatgatgatatgattttggcaatgagtagagtctgtgggaaatctgcttcgccactgaaggtactctgcaccccagaaggaatacgacttcagtgtttcatgaagtattttacagacgaaatgaaagtgaactggtgtcacaaagatgctaagatctcatccagtgagcatatgagaatcggggggagtgaagagatggcttggctgcagatatgtgagccgactgagaaggataaaggaaaatacacttttgagattttcgatggcaaagacaaccatcaacgctcccttgacctgtccggacaagcttttgatgaagcatttgcagaattccagcaattcaaagctgctgcttttgcagagaagaatcgtggcaggttgatcggcggcttgcctgacgtggtgaccatcatggaagggaagaccttgaatctgacctgcacggtgtttggaaaccctgaccccgaagtgatttggttcaagaacgaccaggacatccagctcagcgagcacttctcggtgaaggtggagcaggccaagtacgtcagcatgaccatcaaaggcgtgacctccgaggactcgggcaagtacagcatcaacatcaagaataagtatggcggggagaagatcgacgtgacagtgagcgtgtacaaacacggggagaagatcccggacatggccccgccccagcaagccaagcccaagctcatccccgcgtctgcctcagcggcaggccagtgaaggcgttttcctagcctggagatgggaaaatatgcttggcagagacaggaatgctgtgtgcttgttccaaatgagcagctggcatccgagtggtgtcctgtgtgggctgatagttgatcacacattgtgcttttgatttttgcatttggtgatgaatattttatacccgtctaagggagaaagctaatgttttccacaagactgaacaacgtgtatttacacgagggtagacggcagatgcctgacagagagtgggttggcagacaacacactagcattttcacgggtgtgggcacatgggtgtggcacctggacgtgtgcagcatgtggcggtctgtgtgaagccaccgtgcttctctttggggggccgcgagatctagcatctctgaaatcctggctgtcgaggctttgaagcatgtgttacctggttaagcttgttttctcttgctttaggcaaataaaagtttaaaaatcaaaaaaaa

SEQ ID NO: 732 - DNA, 6240 bp, HOMO SAPIENS
atttatattcattttttactcttttccatcaaaacataattttactaagtacgcatgttctgtgtccgtgttttgtcatcactgaagccacttttggagtcacctagtaatagcctttccactctatctagttctgtagcttttatgtgtgtaaattacttcaaatctgtttatgatcctattgctggaaactttatcccaagacacaaaaatcttttctattagaagttattaactttaaaacaattatttattttattttattttattttttgagacagagtctcgctttgtcacccaggctggagtgcagtggcacgatctcggctcactgcaagctccacctcccgagttcatgccattctcctgcctcagcctcccgagtagctgggactacgggcgtccgccaccatgcccagctaattttttttgtatttttggtagagacaaggtttcaccgtgttagccaggatggtcttgatctcctgacctcgtggtccacctgcctcggcctcccaaagcgctgggattataggcgtgagccaccgcacctggcctaaaacaattatttctttaaaaaaacataccctctattctattttgtgtcttcacaacacaatcacttactgtattgctttttaaagtgatctttaaagagtcttgcagaagagactacacagcaggcccgagaccatcctgagaggcctgtgtgcaaggctggccccccgctggtgtcaggacggtgcccaccaccctcaatgaagaggggctccctgtgcttagctgcttgtgtggggaacaagggcactgtttgaagaagcaaacatggtagcatcaagcattccttgaaatatggctccaagggaacaatgagacgtgctcttggtcttggaagctcatcagaatgtttagagctggggaggcctccaaacgcccattgcctgggccgtcgcccccaagggtgcggagtgtggaggttgcccgggggagggccggctacggattcacgctttcgggacaggcaccctgtgtgctcagctgcgtcatgagagggagccctgcggatttcgtgggcctccgagctggagaccagatacttgctgtcaatgaaatcaacgtgaaaaaagcatctcatgaagatgtagtgaaattaattgggaagtgctctggtgtccttcacatggtgattgctgaaggcgtcggccgcttcgaatcctgttccagtgatgaagaagggggactctatgaaggaaaaggctggctgaagcccaagctggattctaaagcactaggtataaacagagcagagcgagtcgtggaggaaatgcagtctggtggaattttcaatatgatttttgaaaacccgagcctttgtgcgagcaattcagagcccttgaaattgaaacaaagatccctttcagagtcggccgcaactcgatttgatgttggacatgaaagtataaataatccaaatcccaacatgctttctaaggaggaaatatcaaaagttattcatgatgattcggttttcagcattggactagaaagtcatgacgattttgcattggatgcaagtattttaaacgtggcgatgatcgtgggctacttaggctccattgagcttccttccacgagctccaacctggagtccgacagcttgcaagccatccgcggctgcatgcggcgcctgcgggcagagcagaaaatccactcgctggtgaccatgaagatcatgcacgactgtgtgcagctgagcactgacaaggctggagtcgtggccgagtacccggccgagaagctggccttcagcgccgtgtgcccggacgaccggcgatttttcgggttggttaccatgcagacgaatgacgacgggagcctggcccaggaggaggagggcgccctgcggacttcctgccacgtgttcatggtggacccagacttgtttaatcacaagatccaccaaggcattgctcggcggtttgggtttgagtgcacggccgacccagacaccaatggctgtctggaattcccggcgtcctccctccccgtcctgcagttcatctctgtcctgtaccgagacatgggtgagctgattgagggcatgcgggcccgcgcctttctggacggggacgccgatgcccaccagaacaacagcaccagcagcaacagtgacagcggcattgggaacttccaccaggaggagaagagcaaccgggtccttgtggtggacctgggtgggagctcgagcagacacggccccggaggcagcgcgtgggacggtgtgggtgggaggggtgcccagccctggggtgctccctggactgggcccttctgtccggaccccgaagggagccccccatttgaggccgctcatcagactgacaggttctgggacctaaacaagcacctagggccagcctctcctgtggaggtgcccccagcttccttgaggagctcagtccccccttccaagaggggcaccgtgggtgctggctgtggtttcaaccagcgctggctcccggtccacgtgctccgggagtggcagtgcggacacaccagcgaccaggactcttacacagattccaccgatggctggtccagcatcaactgcggcacactgccccctcctatgagcaagatccccgcagaccgctacagggtggagggcagcttcgcgcagcccccgctgaatgccccgaagagggagtggtccaggaaggcctttggaatgcaaagcatttttggtccccatcgaaatgttcgaaagactaaggaagataaaaagggctcaaaatttgggcggggaactggactcactcagccttctcaacgcacgtctgctcggagatcatttgggagatccaagagattcagtatcactcgctcccttgatgatcttgagtctgcaactgtgtctgatggcgagttgacgggcgccgacctgaaggactgcgtcagcaacaacagcctgagcagcaatgccagcctccccagcgtgcagagctgccggcgcctgcgtgagaggagggtcgccagctgggccgtgtcctttgagcgcctgctgcaggaccccgtcggtgtccgctacttctctgattttctaaggaaagaattcagtgaagaaaacattttattctggcaggcctgtgaatattttaatcatgttcctgcacatgacaaaaaggagctttcctacagggcccgggagattttcagtaagtttctctgcagcaaagccaccaccccggtcaacatcgacagccaggcccagctagcagacgacgtcctccgcgcacctcacccagacatgttcaaggagcagcagctgcagatcttcaatctcatgaagtttgatagctacactcgctttctgaagtccccgctgtaccaggaatgcatcctggcggaagtggagggccgtgcactcccggactcgcagcaggtccccagcagcccggcttccaagcacagcctcggttcagaccactccagtgtgtccacgccaaaaaagttaagtggaaaatcaaaatccggccgatccctgaatgaagagctgggggatgaggacagcgagaagaagcggaaaggcgcgtttttctcgtggtcgcggaccaggagcaccgggaggtcccagaaaaagagggagcacggggaccacgcagacgacgccctgcatgccaatggaggcctgtgtcgccgagagtcgcagggctctgtgtcctctgcggggagcctggacctgtcggaggcctgcaggactttggcacccgagaaggacaaggccaccaagcactgctgcattcatctcccggatgggacatcctgcgtggtggctgtcaaggcgggcttctccatcaaagacatcctgtccggactctgtgagcggcatggcatcaacggggcggccgcggacctcttcctggtgggcggggacaagcctctggtgctgcaccaagacagtagcatcttggagtcaagggacctgcgcctagaaaagcgcaccttgtttcggctggatcttgttccgattaaccggtcagtgggactcaaggccaagcccaccaagcccgtcacggaggtgctgcggcccgtggtggccagatacggcctggacctcagtggcctgctggtgaggctgagtggagagaaggagcccctggaccttggcgcccctatatcgagtctggacggacagcgggttgtcttggaggagaaggatccttccagaggaaaggcatccgcagataaacagaaaggtgtgccagtgaaacagaacacagctgtaaattccagctccagaaaccactcggctacgggagaggaaagaacactaggcaagtctaattctattaaaataaaaggagaaaatggaaaaaatgctagggatccccggctttcaaagagagaagaatctattgcaaagattgggaaaaaaaaatatcagaaaattaatttggacgaagcagaggagttttttgagcttatttccaaagctcagagcaacagagcagatgaccaacgtgggctgctaaggaaggaagacctggtgttgccagagttcctccgtttacctcctggttccacagaactcaccctccccactccagctgctgtggccaagggctttagcaagagaagcgccacaggcaacggccgggagagcgcctcccagcctggcgagcagtgggagccagtccaggagagcagcgacagcccgtccaccagcccgggctcagcctccagcccccctggacctcctgggacgaccccccccgggcagaagtctcccagcgggcccttctgcactccccagtcccccgtctccctcgcgcaggagggcaccgcccagatctggaagaggcagtctcaggaagtggaggccgggggcatccagacggtggaggatgagcacgtggccgagctgaccctgatgggggagggggacatcagcagccccaacagcaccttgctgccgccgccctccaccccccaggaagtgccaggaccttccagaccaggtacctccaggttctgatccctccaccttggccccgtaagcgtggtctgctcagcttccagtcagaaaggacagtgggcccccggctgccactgtttgctggtggtctccgtgaccccctcctcacctgctggttgggggcttccttggccctcttggaaaggaggggctcgtgtggccccaggccagtgtctgtcaggatggtccccccgaggcgctctgggcaggcatcctggtgtcctgagaggctcttgcaggaatgatacgtggcagtgcctgcagcgaggtctgggaacaccctgggtgaggcctgggggtttccgaaaatggaggcattcctttccaaatctggacagcgatcgtttttagtgtttctgtctcaagactggaaaacaatagcatttgtcttgagtgaggaagtgaagcccgctgtgttcatagcaggagagggctcccagacacaggcccgtcctcggaagagccttgagagtgcagctcggacccaccggcggcccccgtagcaggtggtgtgggtgctcgggagtggaggtgacgtcagcagcgctctctgaccgcgggtgtcacgggcatttctcaaaggaagcaggggattcagtgagtgtgaaggtgaacaggatggcctggcagcagggatgtttccgtgagccacaaataccagaaactgaggcgaggctcccagcagccggtagggaaaggtgtttccaggggtccgagggccgtggcctgcgtggccatcccctggagagaggagccgctcagggtgcgcgtcatggagtgtgctcaggggtgcgtggacacctctgctgtggtttgctgctgggggcgatgggagcgcctctccgtcctgtgccctggtccaggatgctgacagcagtgagaggcctgccgtgaggtttggtcttgtcagacctgtagcctggacctcgccgggggaccagggagtgcacgtctgtagatctgtacatatctgggcctttggaggccacgtgtggcatgggaggggctacctggtccctttcacagccaggacacgcctggatgagaaagcctgaggtgcctggcatgcccaccggtgccactctgcagcctccacccctggcctgagtccccctccatccgtcttggtggacacctgtgtggctctcacctgcgttttgagtctgttcttccaggagtaataaattctggacatcatcactgga

SEQ ID NO: 733 - DNA, 403 bp, HOMO SAPIENS
  misc_feature (198)..(198): n is a, c, g, or t
agaaggagtggatgggaatgatgagaaaaaggaaataagaggggaaaattaaggatcttgcggaaatgaaagaaaaacaagacaaccagcctccctcatctccctctatccattaaagaaacttcagaagagggcactttgaagctatttgtgatattactaggaatagaagagaacagaccacatccatataaaacntactttacaaaacagaaaatgcaaatcagctcatttcaggtaatgaaaatatttcccagaaaatcagtcacaaagcagaagaaaattgtaacataacattccaaactgaatcagatatcctcaaacagttaaggaggatatgaaaaaaccatgtttaatcagaaatactaaaatcaagaacagagatggaccaaaaaaccccaca

(The sequence listing continues in the following parts.)
